United States Patent Application Publication US 2011/0191912 A1 - sequence listing, part 15

SEQ ID NO: 21336 - DNA, 3000 bp, Unknown
  misc_feature (1)..( 3000): 2750-1469P.txt file - cDNA_ID_1977076; gDNA_ID_1620639; Annot_ID_47443
catggtgaagaagaacaaaacactcatttttttcaatagtaatgttttcatattcaaatacttataaaatctttatctcttgtgtaggtttttttataccacaggcttaccaagtgacatagaaatcgaagttgatgatataacatttcatcttcataaggtctcatcttcttctctgtttttttttcttctttcagagtttactcttaaaaactaaaactgatatgttgatcattctttcttcagtttcctctaatgtcaaaaagcaaaaaacttcaccaactaataacagagcaagaacagagtaaagtttattctcacatcaagctcgagaattttccaggaggttcagagattttcgagatggtgataaagataagctacggtttcaaagtcgacatctctgtttccacagctgttccactccgttgcgccgccgagtatctagaaatgacggaagagtactcaccggagaatctcatttcaaaaacagagaagtttctttcagagttcgtcttcactaacgtacaagaatccatcaaagcgttgaaagcttgtgaatcagtctcgtctttagctgaatcactctgtataacggaacagtgtatagactccatcgtcttccaagcttcctcaaccgatccgtcgtcgttttacggttggccaataaacaacggaggtatattcaccgttgaccggaagaaacagagcaaagattcgaaaacagagctttggttcgaagatctaacggagttgagttttccaatcttcagacgtgtgatcttatccatgaagtcgagtgtcctgagtcctgagattgtagagagatctctacttacttacgcgaagaaacacattccaggaatctcgcgttcatcgtcagcatcttcatcttcttcttcttcttccaccaccatagcttccgagaatcaacaaagagaattattagagacgataacttcagatcttccattaactgcgacgactacgagatctctcttcggtttgttacgagccgcgatcattctcaacgcctccgagaattgcaggaagtttctagagaaaaaaatcggatcgaatcttgagaaagctacgcttgatgatcttctcattccaagttactcgtatctcaacgaaacgttatacgatattgatttggtggagagactcttacgtcgttttctcgaaaacgtcgccgtgtcgtcgtcgtcattgacggtggttgggagattgatcgacggagttctcggtgaaattgcatcggacgctaatcttaaaccggaacagttttataatctggcggttttgcttccggttcaagcacgggtttacgatgatggactatacagagccgtcgatatatatttcaaggtaattaattataaaaatttataaaattgtctatggtttggtgctgcccagggtcgaactggagaccttttgcgtgtaaggcaaacgtgataaccactacaccacagcacctgatgattgagttgtgatttttgtttttatagactcattcatggatattggaggaagagaaggagaagatttgtagcgtgatggattgtagaaaactgactgttgaaggatgcacacacgcggcacaaaacgagcgtttaccactacgagccgtcgtacaagttctgtttttggagcagctacagctccggcaagtaatcactgggactttactgacggaggaagacggtgataaaacggtggtggacttgggtagatggaaggaagcggtgaaggagaatcaggtgcttcgtttggatatggatacgatgaggacacgagtgaaccagctagagaaagaatgcttgtacttgaagaaagtgatcgcgaagatcgacaaagaaagtttgttgaaggcgaagcatggggcggggaaatggtcaatcgggaagaagttcggatgcaaattttcggctcaagtttgtgattcacaggaggcaacgatggtcgatagaagatcacgacgttttcttagttagtacataaatcagaatcatcttgtgcttctaaaaattgtatttttacttcttctgtatatcttaaagaaaaagattgatactttagattgaatggaactctaaaacacaccctgatggacttgttattcagagaatcatagtataatgatttagagattatgaatgtaaatttgtaagatgctttaaagtggtgcaagtagagtataaaaccatcttcatcaatagtttatcactaagaaactgttcaatataaaaataaaatatatttaaaaagtatgagagaaagcagaaaaagtctctcaagtgaaaaattatgagaaactaataaaagcatgtgtatatcaattattggttaaattttattttataattaaaaatttaattataaaactaatatttattaaaatactttctttttttaaaaaaattcagaggaataatatcatgttcattgttaatcatatagtttattaatttatttcgatttttcccttggaataatatcattgtttgtactttgtagtagaaaaaattaacaaaatatttcaataatgttgtcatcaaaaactgatttattttttttaaattataatattcggctattgttttttagtttatttatttatttgaccttttgttttttttctccgattatctgaaataattgaggttgggtaacagaacaaaacgcgcaaatcaaaggactaggtcaaccgaataattgtttttgcctgccacatggcggtttaattttcacttcaatactatattattcaaccagataacgacacgtcactaatcacaatcggtttgcggcgataaaccaggaacgattgaagagaagaaaaaaaaaaaacaaatttgggaaagaagcagaagtgtgacaagacgattctggattctggatacagctggaagagaattaaaagaaaaagaaaaacacttccaacgaagaagatcgatttgcttcgagtctctgaaagaagaagaaaaaataatg

SEQ ID NO: 21337 - DNA, 3000 bp, Unknown; identical to SEQ ID NO: 21336
  misc_feature (1)..( 3000): 2750-1469P.txt file - cDNA_ID_1977076; gDNA_ID_1620639; Annot_ID_162982

SEQ ID NO: 21338 - DNA, 3000 bp, Unknown; identical to SEQ ID NO: 8928
  misc_feature (1)..( 3000): 2750-1469P.txt file - cDNA_ID_1977105; gDNA_ID_1971923; Annot_ID_58563

SEQ ID NO: 21339 - DNA, 3000 bp, Unknown; identical to SEQ ID NO: 8928
  misc_feature (1)..( 3000): 2750-1469P.txt file - cDNA_ID_1977105; gDNA_ID_2926219; Annot_ID_142375

SEQ ID NO: 21340 - DNA, 3000 bp, Unknown; identical to SEQ ID NO: 6739
  misc_feature (1)..( 3000): 2750-1469P.txt file - cDNA_ID_1977112; gDNA_ID_1621103; Annot_ID_55930

SEQ ID NO: 21341 - DNA, 3000 bp, Unknown
  misc_feature (1)..( 3000): 2750-1469P.txt file - cDNA_ID_1977135; gDNA_ID_2214541; Annot_ID_134470
aataacataccctttaaacactccaagtgcgcgactcaatttcaccaactgcttcaaacttggtgaagaatcaaggagactaatcatccaacgatgcgcgactcagtttcttgacgggtatgcatgcttaccgggaagagtaatgcctgatgagttcaaccaaagaactagcggtaataattccttgaacattcgtctttcttctgcatccttcaagtttaaagcatgcgtcgtgatttcacctaaccagcaacaacactcatgggaacacactgatatacggtgtatcgtaggcagttacaataaagttatttgcgtagaacacccaaatgaatcgaccagaattcaaaccgaacatttgtgtatatttcatggtagcgtgtctgaagttagcagcaacgaggcattgtttgaattctgcatcgatgcctcgaatcaatttgataacttcaagattctcgaatgtggtgtacgaatcttgactaatgaaccggagagaagcagcaagaagaccgtctctagggggctcaggtcccatgccaaaattttgaaagcttgcttacataaaaggaaacagaaaaaaatgattggttatttactaaaagaggaatttggtttgccaagggataacaggattattgaagtcgatgaggacaacaacaatgatcatacagtgagcttggactcggcatcagacaatgttgaaggaaaggagaaacctatagattgttggagttggctctgcatctgctttgatctatccaatattgtgaggaacatgggaaagcttgtgttgggtaaggaaacgacagaatccatagatggaggagttcttcacgaatacagcactaggaaagatgatgacgtgaccatgggctaatcctgtgtggcgtgggccatctggcatgggtcctaactaactcctatatataatcgaactcattctatttgtaatctcacttttttttttttttttttttttggtaaacattgtaatctcacttttctttcgtattttttgttaaatggtattcaaataataatgtctttcacttttctatggaacgaggattccgatatatatctattgtcttacatcttgctttatttgattaaaattgatacaaagattacatagttatttcttagacatacacatataaccaaaaagtgattaagttttaaagaagaaggtgcaatcaaacaagtgattaaacgccgctttttttggtaagccttacacgctaatagattatcaaatctgttatattccttattagtcttcttccttaaaccgttatgaggattttatctacgctttttagctgaattttggtttatatatttcgaattaaattatattttagatctaattttatattttttataaacaatgttgattttaccatgtgaatatatttatgtgtttatatagaaactaatattaaactaacatttgaaaataaaatgattggaaaatatattttttttttaaaatagaggagagagaatgccattatatggattttgaatgaagtaatcataaaaaatacaaaaaatgttagttttttttctagcaccattgaaaacatattgagcatattaattagaatcaattatgaatttgccattttatgtatttgttgattttggcattttttgaatagtttgcggatttggcctttttcaagcaacacaattatgattaaacatacgttgtatttgttatgtttgggtttagtcggttctatttattattcggttttagtatttggtataaaatacgtaaatttctaagttttaaaatgacaaatttttaattgatttaagtaaaaatggcattttcgtaacaatttttaaaaaaaggcattttctacaagaattcatattaattaagactaattttttccccttccatatagagataccaatactacatacaataaataactttacttatgcaaacatgaaatttttgaattttttcttcctgttatgaattataacattttgtaactctagtaagaaaaacattttgaaattattcaacaagagcgaaatatattttcaaataaatattttcatatgaaaaattttatgaagataaatttccaaaaacaaaattaacttttaaaattgttttctcttaaaaaaaaatcaaattgtatactctggctagaattaatgtcaaattccttaaacttaccaaaaacaaatgtcaaattccttaaaaaatttgttggcccaagtcaaatttaagaggcccatctataattaatattttccaatattttttctcctctattcttctccactgagcggagaaaaaaaaaatcattatcgtccgcgagatatctggtgttcttctcgtacttgcggattcctccgaattgtttcttcacaggttggtttttttgattcgatttcagtttggagtgtttcttctctctattctatagattgtttcttcgatttcaatcgtttggtttttgaatagaaaaccaaagagaagatgattttacttgtttccattgttcttaggttttgggaaaaatcttacgtatttaacatagtgtttcaaatacacagaatctcgaaattgattccgatttatgaggtcatgaatctacaatttcctacctcctgttttaggctttgaacagattaggtttaatatttaagtgaatttgcatcaaattagggaaattttcattgaatccagttaagttcttgtttgcatcaacttgtagtgttatatagtttagctacaaatttgcatcaaattagggatttttcattgaacccagttaagatttttatttacatcatcgtaatgtgtgagctttgttgttatttggtgcttcttgtgcctcttttgctattattcttaaatctcaatgagagaagagtttattttgcagtttattggcgtttctgttggataactttattggcgtttctgttggtttattttgcagtttcttaacgcttggaagtatg

SEQ ID NO: 21342 - DNA, 3003 bp, Unknown
  misc_feature (1)..( 3003): 2750-1469P.txt file - cDNA_ID_1977148; gDNA_ID_1620863; Annot_ID_51295
gaatcagctttccgaggaactaagcgagcgcctcggttctgacttggagcagaataagcggattgcaagcacccttacccttcatgctagcgctttcagagtacctacttctcttgttatatatcatttttctctgcgaagactacgacttaaaacatatttttcctgaaaaatattgcagtcaaaggattcagattctcataagaaatttccttcaaaatcatgtcctatgagatatggagtaaccaagatccaagaagatgcctttaacttgttccaagctgccttacgtgagtacatgggatccttcgggatcaaacctcaaggaaataagctagagacatggaggataacaggtctttctgtttcagcgagtaaaattgttgatataccatctgtaagttcttagagccattaaatgtcttctacttacttatctctttcaaacattggttggtttcttcactgatttggtaggagtgatatcttattactgtagggaacaagctcgatcatgagatattttcaaagtcaacctactgttccttctcgttcagcagatggttgtgttcaaggaaatgtagcgatgactgcttcaggtattctagagtatttctgtatattttcagaactttctacttctcttgattctggtacttaatgtcgtgatctaatctgcaactggtgcagctagcgaaggatgttcagaacagaggtcaacagaaactcaagcagcaatgcctgaagtagacaccggtgtaacttatactttgcctaattttgaaaaccaagataaagacattgatctagtctccgaaaaggtatcagctctcatttccctttactctaaagcatattttaggcctttcttagaggtgtgatctagcaaaaaggctaaacatatttaggctcaattacgttctcagtttcaactttcaaaggagcttctttagtaattataactggtaacgaagtgattggttaggccctgtagtgtttgaatgactcaagagcttatatatatgttcttaaattgtgtatccttgaagaaccaattccacacattccttgtcaggatgttgtctcttgtccatcaaacgaagcaacggatgtttctacccaatcagaatcaaacaaaggcacacagacaaagaaaattgggcggaagatgaacaactcgaaagaaaagaatcgggtacgcaatatattgctttgtttggtgcacgaaaagcttctacctttactgagatttgtttgcttgtttgttctcagggaatgccttcaattgtcgatatctttaagaattacaatgcaacacctccatcaaaacaagagactcaagaagattccacagtgtcatcagccagtaaaagagcaaagttaagtagcagcagccataatagtcaagtgaatcaagaggtagaagagagtagagaaacagattggggatataagactgatgaaatcgatcagtcagttttcgatgaattaccggttgagattcaacgagaactcaggagtttcctacgcaccaataagcagtttaacaccggtaaaagcaaaggtgatggttctacttcaagcattgctcattattttccaccattgaatagatagatctaagctcctttgtctctgttgttgactgtatatagtgtagtccttgtctaccttagatttggtcttgtatcttgagtactacagatatattatgcttaaatcctattaaaaatgtcatttttgagcaatagaaaaactaaatatatatatatcgtctttaaaatccatcgagacctcttgttttttatggtatgcacagtgatagaagggtttttttttttttttggtaaacatgtgaagaagtgatagaaggtttatcagaagtttgtatatctttgctcaaccacggaatctcatgaaatattcaaacatcctacctaattgctctagtttctctagtatgagttctttttggatcaattctatatcaaacgattacattttattttcaaaagtcaaatcaatcgaaatgttaattacaacttcgcctaaatatgacttttttcttaactaacttatttttcatcctactttctagaatagaattctctaatattaattgacctaacataagttttttttttggtaaggaggatttttttttttggtaaggttgaactaccataagtttgtttgctatcaaaacatttttacttcattttgagcgtaaaaacggtaaaaaagaaaacacaaaattcgaaaacctgaaaccgtttttggggttaggacaatactgcaggccactgtcatgccatccaatgggtttactttttattattgttcctcctgtgtgtaaaataccctaaataccctcgaacttgctctccaaaattgcaattaatttacctttaaaagcttaattaagagtgtccgatttctcaagaaatctatctaacaccaagattataatttctattagctgcctaaaatttgtctgtgtgcgcaataatccacacgtacacacgcatctactgtattcgatttcgtctctatatataaaaacacaaagacagtcttcttcgtgatctctcattttactgttgtcttaaagcaaacacaagataagaagaaacaaacaatggcgatttctttcatttagatattttcctcgattcttagcttctgggtacttcaaatctctctctctccttcacgggttcttccaaatttccatactttttaccttgtttcctgcgaaaaaaagctatcttttttttatttgtgaccctacattgatatatgactcaactgctgaaaaattgatactttgcctagattccatcatttattgtttcttgggttaatcaatcaccactttttagcaaaaaccctgaaatcgaatcagttttttctctgtaaatttcatttcttttctgcagaaattagcctatttgagctcagtttcgtgtatttgtgcagattttggtgaaaggatttgaaatg

SEQ ID NO: 21343 - DNA, 3000 bp, Unknown; identical to SEQ ID NO: 1600
  misc_feature (1)..( 3000): 2750-1469P.txt file - cDNA_ID_1977148; gDNA_ID_1620422; Annot_ID_156620

SEQ ID NO: 21344 - DNA, 3003 bp, Unknown; identical to SEQ ID NO: 21342
  misc_feature (1)..( 3003): 2750-1469P.txt file - cDNA_ID_1977148; gDNA_ID_1620863; Annot_ID_170398

SEQ ID NO: 21345 - DNA, 3000 bp, Unknown
  misc_feature (1)..( 3000): 2750-1469P.txt file - cDNA_ID_1977157; gDNA_ID_1621109; Annot_ID_56065
tctatctgtttgtgcatttaggtaaatacatcagtcaatcatcttgtgtttgtaaccaggtatgggacaaaggcgtatcaatgaaggaatacatatcgcagaagtttgagcctagcgaagacgatagagaactttctcgagtgatatctaaagctatcagtcctcgtaaaggttcttctcagacttctagttttggtgcagccacaaacatggcacctgcttcaaattcagcagacaacaaagctcctcttgtagccaacacaaatgaaagtgagttcctcttttattcctcaactattaacaatttgacacacctgcaattgtattctgatgcatttgattctgctgcagttgttgaagcagaaaatcatggaaagatacttcaaccaaactaaagaacagagagtgtttttcattgtttacaaagcctctatgtaagaaagaggctttctatttcaatcctctttttccccctattagttatgttatcataccaaaaccaagattcattttgtctgaagtctgttgtatacatacataagaaattctaatacatcttcttttgttcttttactcattttttggtttttgtttccttccttcttgtagttgacttctgtaataagaagaaaatattgcatcttcataaaaatttgagtatttaattcatccaggtgatcaaagagatgaacctgttcaatgttgcaatataaattacatataactcataatgaaaatcttcattggagactttaaatgccactagtataataaaataccattatcagagatgaaataccattaaataacaagaatggacggtcctggtacaacagttgaccttctcctgaaaagaaagtggtctgctactaatttcccacaacacacaaatcaccaaacagaaacaacgatgacaatagaggactaaaagctgccttgagaatctgcaaaaaatctgacatgtttgcaggtatatttctaagaatgggagcagcattaagatcaatgtatgtgaacagcaagtatgaagaagtacgagaagaatgggaggaagattacagtcctcagaggttttcttacaaagctctctacaaagcaaccaaagggttcaaagagagcgagttattcggtacagaggctaacgggacagtctacaaaggaaagctctcttctaatgcacagattgctgtaaagagagtttctttagatgcagaacaagataccaaacaccttgtttctcagattgttggtattgggaagttaaggcacaagaaccttgtgcagctcttaggatactgcagaagaaaaggtgaattactcttggtctatgattatatgccttatggaaatcttgatgatttcttgtttaatgaggaaaggcctaatctaagttggtcacaaaggtttcatataatcaaaggagttgcttcagctcttctttatttgcatgaacagatcgttcttcaccgagatgtaaaagccgcaaatgtactcttggatgaggatttaaacgggcgactagattacggtctagcaagatttggtacaaacaggaacccaatgctaggaagcgtaggttatgtggctccagagctaataataacaggaatgccgacaaccaaagccgatgtttattcattcggagcattactacttgagtttgcttgtggaagaatgttcattgagtatccagggaagcctgaagagtttaacttaatcagctgggtgtgtcaatgctggaaaagagggaacttggttggcgcccgagacgctagattggaaggagactacgtctgcaaggagatagagatggtactaaagcttggtctactatgtgcacagtacaatccagaggataggcctagtatgtcccaagtggtaaactatcttgaaggaaatgatgttttgcctgagatgcctccagacactcctgggatcagtattccaacaccgtaccatgaagttcttgcgtagcagcacttcgtctagtgcccggcaaaaaacagaacaaatcgcttctctcaacaacctacaaaaatatgaaccaaacaagttaccagaaattatcattggaagaacggtataatttttttcgcaacatttctttactgtttttcctcattctttaactcacaatgtatacattgaaagatcgaatacaaaccctatggccaggacacgacctgtaatgttgtaatggtatgaaaatattcaacaaaagtgttacaattatgtcataaagtagagttttcctataattcttgttagcagttttgtcatcattttgttataagaaataaataaatttgtatatagttcttgttagcagtttttgatttttagcttgttatcactaatacttatgaacaacataatgatttacctgttaatcttgttttgtttccattatcttctagaggtttatgttattgtgtagctccttgtgatccttctgcactgttaccacagccacatgcaaacataagatctcttatttagtctagggttcttctgaattcaatgcatttttgattttccatagggcaataggaaaaattgtgtcagaaaataattgattaattccgttacgacaaaataatagaaaatatgacgaaattattcgcgtatgatgcgatgacgaaacgtatgactttagataaaactatatgggcgttttcagtgaggcccaataattatgggcctagtccatttactttttctattaatatcaacacgtaacatcggaaattgatgagggattactatttacgtccaacattgtttcccttttgaaccacctgaaacgctaagtgaccagagctctgttttgtttctattttcatgactttgtgtgttgtgttgtattgaatgtttctctctccctctctcatcatctaatctcgaatctcaatttcttctttattcttcttcttctctctctcctctgttctatctctttctaacactcaagcctctcacggtcacgggctcacggccatg

SEQ ID NO: 21346 - DNA, 3000 bp, Unknown; identical to SEQ ID NO: 21345
  misc_feature (1)..( 3000): 2750-1469P.txt file - cDNA_ID_1977157; gDNA_ID_1621109; Annot_ID_171747

SEQ ID NO: 21347 - DNA, 3003 bp, Unknown
  misc_feature (1)..( 3003): 2750-1469P.txt file - cDNA_ID_1977166; gDNA_ID_1621093; Annot_ID_55564
actgatcaagatcgatggctttgatagcaactaccattgagttcatcggaatgcatatggccttgtagaccgaagcactaacaccaacgcctatcttgcagatgatctcgtaggcttcagcatcaagagggaactcgagcttgttccgagccataaatagaaagaagatgagtacactcttgcttattgaattgttatgtttttagtggaattgtggtcttttagaggctaatagtaccatgaggctattcatatagggatgaaaaaagaaagagttggtttagcatgtgaacttgaaaaaaaagagagcctttaatgtaaaagcaaaacccttatctcttacttaaaaatatgttgatgaaacaataagatgaagcatgtgaaagagctaactaactaaccttagttaatgagattttacctttggtctttccagggacccaaagggcaaacactatcatttcaacttcaaaccggtaaaggtacaaaaattaaatggagctatgaaaatttattttcatcatttcacagaaatttaaagttctagatttagatatctagactcgttttacaacttttttttcatggcatttctgaagaacttgcatttgcctttgaccacatgagaaggaaacaaagactagagaaaagacgtcagccttcttgacatttggtaaaatgaatgatcaagtattcaaacatcaatatgctaagataaaatcacaatggaacagaacttgttttataagtcttcagggatgtccttgaaacatatactataaagtgggcaaaagacttatgaaacctacttaaacatcagcacttcactgtttactttgtctcacacgtaaagcaaatgcaagtaaatcaatgcagtcaaaactctaagcaacacagccaatcccacagcattaaggtctacttcataagaaacttgtacctgtcagtatgtgtttcttattccatgaactgaagctataccaataatcagtgtgcaccatatcagttggacactttgtcaattcaacacatacacgctttagcctgaacttttctttgatctgaaatatactcacgaactctctgagttttacttcgcatgggctcaatcatattttctgtcttgtgaattatctcttttgacagatgaccctccagaaaactgaacaatgctcctaatgtcatctttcttagatctgtatcaagttcattgttcatatcttcttcaacatgacagcttaaaccctgctctcctgaatcagtaacctcatcattttcaaagctcttcaacggcttctgatccgctttcttgttcttccctttgttctttctggctcgatttagaaccatgtccaattccaaataagaatctccaacaatatcaatcttcttgcttcttgtagccctagtaatcctcttctcctttaaagtctctaccttctctacattaaccactcccaaacaagcttttcctacactttcttcaatcttcttgctcctcgtagccttactgctcactctcttcttcaatcccctccctaaattttcctccaccattgcacaatcctccatttcaaccttaattaagtttacagatgaactctgaatactttcaacattcctaaagcttccatttttctccaccagatcctcttgtaatccatcagtaatccctaatttctccgaatcctcgattttcctaactttcctaaccctagaactcggcttgttctcaaatttcacatccaaacccttttcttcctcagtgatatcccccaaattgatactttctaaaaccctaattcgcttcctcgcattagcctgacgcctattgttcctcgtaagcttcttctcctgaaaatcatcaatcacaaaattcaccaaaatagatgtatactcacctagtttgataacatcgccatctccgagatttaccgacgtctctggatcaagagcattcgaattcaataaagtaccgttggaagatccaagatcttgtattacccaattcccagaatccgattcgatccgaagatgcttagtggagattccagcgtctttaattgcgatttcattaccacgaacgattcgaccaacacgaatcgtagatccaggcttgtaatctagagcatcgccttctcttggacccttgacgaatactaatctcaacgatggcgtaaccattgttaccgtttctctcccaaatgcgaattttgaaattttgatttgtctgacgctccaattattaatgggccttaaatgggcttttatcgtttcgacgataaaacaatttcaaggctaaaagctactattggctaaacaactggcattattgattacccaaacttccagcaacacacgtgaatctctcagcaaacttatctctcccttatccactttttttccaacctttttcccctcacgctcctttaccctcgcgtgtatctcacctcatcatttggatatccactgttaaaattcccttttatattcgaaatcaaccaaatttaaccttactcctataaattaattaggctcttatctacaattgttgcaaatcaacaaaacgtgcttctaatgctaacacaataattgatttttgagtatattcctctacgtagtgaacacgacgcgctaagatctgacgcgtgggatataacttgtcggtcaacgaaagcgccacgtcatcgccactatgcttgtccttatcatttcctttcacccgccaacgtcgtttcaagcacagcaaataatatcagaacacatttttttctttttatgatttaatcaattaaatcaccaaactcaattaaataaaaagaaaaaaattattattatcccttcttcttcttcttcgtcttcgtctttgattctcctgattcatgtcgcttaaatttttagcgatcttcgaatcccattttccttcgggaatctgacattttttctcgggaaatttttttatccaaatcggagtaaagtatcgaatctagagaatccgctatg

SEQ ID NO: 21348 - DNA, 3003 bp, Unknown; identical to SEQ ID NO: 21347
  misc_feature (1)..( 3003): 2750-1469P.txt file - cDNA_ID_1977166; gDNA_ID_2926160; Annot_ID_139674

SEQ ID NO: 21349 - DNA, 3000 bp, Unknown
  misc_feature (1)..( 3000): 2750-1469P.txt file - cDNA_ID_1977174; gDNA_ID_2214511; Annot_ID_133842
ccgtaactcaaaaatgactacatgataacaataattggtctgacaatattaccaatgacatttaatttttagacatcctataaccaaattacttccaaaggaccaaagctaggtcataaatatacatatatacagcttttgttatacttctttctctctttttaagatcactatatacgtatatcataatcacattgattaatcagattttaatagtaaagtgtcatttcaaggtttctattttgtgttcacttatagatgaaaacgtgttgatgatttcacatgcttttttaacttaatttcgcaatgcattgacaaaagcgtcgctcaagttgtggctaacattaaattactttaccaaccattcgattgcctctaactctctcttttttctgctaatatactctaaaactttaacactatatgatttgaacacatgatttttagtcaattagactttggattttagacatgtaagaatttttctaggttagatttatttagttctgatgtaatcttgggtaaaaattgtagtatgaggttaataatcctactatattatttgggaagtacattttaaatgtaaccttaatttttgtaagtaattacataggtatgccattagaaataaaattttaaagagtaaattaatttatctctttaaggattaaaaagtcaaatactcatttaattaattaaatttaattaaaaaacgaaatacattattaatttccaaaaataataaccaatcaaaatcaacatataagatttgatatctaaattttaattaatttaatttaattagaaaaacgaaatacattattaatttccaaaaaagtaaccaattaaaatcaacaaattatatttgatatctaaattatcatattatttttttattaattattatagttcacttctcatctttatatgattttatttttgcggaaaaataatatcatcattataaaagaataattagagttttttcccatatgccataatttgaatttttaaaaacaaatataaactgttcaatacataaaaaaatattataacgggtaaaaaatagatttaagaaaactttctactgagtaacaggtcataatttgaaatatttatattcaatttcatacatattatattgaaaatttataatcttatatattacaataattaataacatattagatgtgattcaatttttaatacaagttggaaatcatagaattgcatgtttagatcgatattaatacaaaatggtatactacaggtgaaactcgtaaattaacaatcaaactacaagtgtataatcttaaacactaaacaatatagataatatcaacaaaacatatacaactcacagtttactatacatttaaaatcaaataaaataatatcaaatatttttaaatcatctttacaataaaaaaatttagtttaactaaaatatatactgcaggttaatatctagattatagggcttattggatctaaagacgggtcatcaaagatttcttaaactgaagcaaaatatattgaatattcaaatatctatctgttaccaaattataaacaaataagtcaatttaatattttatatacaaaatcaattaaatcttaatcacataaaaattagcacaaaaaaagtattcatcaattaaaaaattatcaaatctctgtgttatataagttttgatactatattcgaataaagtgtaatataccttttcaatttgtattctttaactaatttaagctaactaatatatttgctaatcttatacctatcaaaaccgactatcgtttcttatctctatagtatttttgcaagacttttttggtggatttggataaaagtgcattcgggtcatatggtacattctcctataaattaaatatggtgcactcctatgttattagctaaaatgtttagattctaattcagagtcatatcattaataaaattaatattaacaaaataaatagctttttggcaagacggatttggagggacgggtttttgaatcaacattaataaaaaaataaaatataattaatccaccgtttcaatacgggttaaatctttaatttattattttttaagaccactaatattaaacatatcaaatcatcctaatttagaaaaaattatataaaaccaaaaatgttatgtggtatgtataatgttactatatataaaattaaactatagatataaatgtattagagaatgatacaatttgcaaaacttttttatataaaaaattattcttaaatgttaaaaaattactattttttaaaaaaatcacgtgacggtaaaaaaaattacagaacgagttctattttggaattgggttatatggtggatgtatttgaatcaatatttataaaattttaaaatattattaatatgctgttttaataggggttaaaacttcagttttttaacaattatttcatgaattcgtggtataccgttacttaataacaattataaactgtaaaatataaatattttataaaaataaaatttgcaagttttaatatatattacttttaaaaaataaatcgtcccgcggtataccgcgggttaaaatctactaacagtttataaattaaagcacttaaaacaaaacaaaaaaagatgataagaagtagagaaataagaagaaagtcttgactcctttatacttaagtcttaaccaatcaaaatgcacgaaattttgacgtcaaaatataaaagagttcctgaatatcaaattctagctagattccaccatatatgtaaatactaacattcaccgtatacatcattgttttctataaactctttaaagttcttgtcaatgattcgacaaagcattatatgtaatttatgtcgtataagtaaataaaagaaatactcaagaaaaatataaatatgagcttaactataatctaagaaaagcatagtctctctctctctctctctcataatacatagaggagaataaaaaaatg

SEQ ID NO: 21350 - DNA, 3000 bp, Unknown; identical to SEQ ID NO: 21349
  misc_feature (1)..( 3000): 2750-1469P.txt file - cDNA_ID_1977174; gDNA_ID_2214511; Annot_ID_184256

SEQ ID NO: 21351 - DNA, 3000 bp, Unknown; identical to SEQ ID NO: 11691
  misc_feature (1)..( 3000): 2750-1469P.txt file - cDNA_ID_1977311; gDNA_ID_2214510; Annot_ID_133818

SEQ ID NO: 21352 - DNA, 3003 bp, Unknown
  misc_feature (1)..( 3003): 2750-1469P.txt file - cDNA_ID_1977413; gDNA_ID_2214503; Annot_ID_133716
atttgtcgttttggataatactattaattgggaacatattgactaattaattttgataggatattctgtttacttttggttcagtctcaatctttgtcgtccgatccaaatgtcaatccctagtcaaatttgttataatttttccaacaaattttgatgctattttggatgtgacacagaccataccagaatcactaacagcgagactactcaacttgatagcattagatgttcactcaaatcagatcaaagctcttccaaactccattggttgtctctctaagctcaagactctcaatgtctccggcaactttcttgtatcctttcccaaatctatccaacattgcaggtttcaccccataacttccacaaagctctcacaagacaacactcccaacaaagcataattcccatttttgttctctttttttttttttcaggtcattggaagaactaaatgcaaacttcaacaaactaatcagattaccagactccattggttttgaactcaccaatctaaggaagctctctatcaactccaacaagctaattagtcttccaatctccattactcacctcacatctctccgtgtccttgacgcccgtctcaactgcctcatgattctaccggatgatctcgagaatctcatcaacctcgagatcctcaatgtcagccagaatttccagtatctttccgctcttccatcttccattggccttttaatgaacctcattgagctcgatgttagctacaacaagatcactgtcttgccagagtccattggctgcatgagacggttaaggaagctgagtgttgaaggaaacccgcttgtgtcgccacccatagaggtgatggagcagaatttgcaggtggtgagagagtatctgacacagaagatgaatggtggctcaccaaggagtcccagcaaaaagaagtcatggggattcggtaaattggtgaagtatgggacgttcaatggcggatcaagaagctggaatagagaggagagagaagggttcatcatgcctgagtaccgctccatcgacagtcttgcttcgcctaggtattctggaatgttctctccacgtcgtctcttttctccaagaacctatttcagcagataaaacagacaacagccaagagttttcacattcctataagccatgtacacctctgtagcatcaaggccaaaacaatccaattttgtctatcattttaatagtagcatcaaaaaatgtgtaaagagtatttcaatatgttcatcagattctagaattcttgtttttttcatatctatgcttgcaccaggtccctatttgactatttctatacacaccaaattttgttcacgaataaagtttgttctttcagaaaacctacccccttctctgcctgatcctttagctataagcaaaagacttaagatttatacagacaaagaaagcaatacttaaaacctaacatacaaggcctcacattctttaaccgtctagaactcactcagttacatactctgacaattgctgagaggaatcaacaatctttattcctctcttcaatttcacatatagtttgatgatcaaaattcaaaacaatgtacgtcatataactaagtatcaaaactcaattcatagccaaaggagaatattttcactttacaaactcctagttcctctactacaagttaagtctgtctgaagattgaagtccggcacacgaatccacttaaagatctcaacttttcttgacttctgactatagaatttgcacaatgaggcaaagagaactcaattgaacaataattactaggactttaattcaaatccaaagagacatgcttcaaattggtgactacggaactgagttcgaacactaaaaaagacacaacttttcaagtgatcactactcttataagtcaagttcccattacacataatctaaaagctaataaagataaccaggaatcttaatacggataaagagcatactcatgacataagcgatcacaatggaggagacaccagcaacagcataagaagctttaacactcttggctttgttcttatcaagcgctaaatcaagcataacaatcccaattccaccgagaacgaacatgaatccagaagagagaccttcaatgatatattgcccgttaacccgacccgacataaacacaacgggtcgaatagttccagtagtcggatcctgagttgatccgatacccggaggctcgacaattacgtcgtagacgaaaccggagactactaaaaagtaggtaaggagaattagagcgtatacagtcatcggagaaggaagcgtgaacgatggaatcttcagacggaggcgcggtggtcggagaaatgagaatgggacgattcggagaaggtggaatattggatccattgaggattgatctgaaccgtctgatacactggagccggtttgcgaatcggatcttggagccattttatcgaatcctccttggatctcttcctctctcaccctatcgacggaatcaggaagagtttcagaattggctttgtttggaaactaggataaagctatccattacacgaataaacaaacgtctatcaatttccttctttcgattttatccccagaagttatcaaagatgcaaaagagaccactttagttctaacttgtattaaattagaaaattcagactattttcgtaattttgttagaaatttgagactatcttcgtaattttctcacaaaatttcttagtttggacgttctgccgttttaatgtataacaaacgacacgtagttctatcttagattgaaaatccggcaagatttggttgctttaacgaaagtatctatctcccgtcatcttgcttcctcgttaaaggaagcaaaagagtttgatcccgtcgtcgagctttcgaactttcgatcttcagcttttctcaggtgacagacgtcgttgtgattcaaatctttttccggtgaacttaatttcggaggctattcgatg

SEQ ID NO: 21353 - DNA, 3003 bp, Unknown; identical to SEQ ID NO: 21352
  misc_feature (1)..( 3003): 2750-1469P.txt file - cDNA_ID_1977413; gDNA_ID_2214503; Annot_ID_184056

SEQ ID NO: 21354 - DNA, 3003 bp, Unknown
  misc_feature (1)..( 3003): 2750-1469P.txt file - cDNA_ID_1977521; gDNA_ID_1620776; Annot_ID_50291
agcttttttggcttttgagttttaaaaaaaaaagtgtttaaatttcatttgtaactgatcgattttgtcacttctgtgtagattagaggttaaacgattttgattgtaaaggcaacaatgtaatctttttctttttgttgataaaaagtttgtgcattgcatttgcagataatttttttgtagaatttaatctatttttctaatacattaaaaaaaaagcagtgtgagactctttctaaacgaattatatttaacgatcgagattagtttttagtcctgagatcagtgatcaatttaggagagttgactacaatttcaattttacttttgtaattagtgggccttattgttagcccattatatgcttataatgtggttttctgaatacgggggaaattaaagttgactttaactctagacctggtttaggccctctaagaacttgtaacggcccaattagattgctatatattcacgattgtgcagttggaaatattaaaaccaaaaaaaaaaaatagaaaggcgggaaagagagttagttacatcgtcttctccggcgagacaagacgactgcgattggatttctctgaagcgcaggtatataagtgatagatcaccattgatactcttcaagaagatcccattcaattcaagctttatcgagtaagatctttattttattccatggaaaccgatttgagatttacacgaatgatccaaatacgtctcatatcatgcgatttcaagacgaaaatggcgtagttttattcaatcgaaggcaattttgaagatatcaaaaagatcgatgcttcaattgcttgatctctaacgtgtcagtttctttctttttgttcagcgacgatccttcttcagtggccatggtttctggagatacaaaatcggatgcgaacaacgttacttatgggttcgtgaacttttgtatttcccaaagccaattttgtggaaatgagagagatcgatcgatgcttaaagctctgcttcaactaataatgtcaatttctttctctttttttcagagaccttccttcttctccagcggctacggattcttcagaaccttcttcctatgcgttagtgaattttattgtattctttagaaccaatcttttagaattgatctttgcttttctggttatgttttgattgatttgttatctcattttcagtgaacagcttgaaaggctcatgatgatagattcagaagaagaccggggtccctctgggtttgtgaccttctcgattctttaaccaccaatctttgttttctctggtctatctatgttttgatattactctttttttgttggttttgtttcaggtttacgactgatgaattgatctttcaggctttagaaacagtctacgagaatcataatggtcttgatgtcgatgcgattttcacttttatcaaggttaggaggatctctctgtctctataagtatctgtgtttcatggtcatatctcatgagtagtgtatattggttctgaaatgtgagtcaatagcgggattacacaatggaacattaggatctgaaaatttgacttcatgttccatcccctaaaagtcttccttttaaagtcttggttttgttgattcctccgttgttcttgatcaactaaccatcatgttcttgtggttaatataaattgcaggaaaggaacgagttacaggaagattttagggagcggttggaaaaccagctgagatatctagtttctgaaggccaagtatacaaggtaactagtttttcagagttgcctcacactaatgttaagattcagtagttttgtttgatcagttcagaaaaacggaaaaaaaaacttgtaaatgcaggtaggaaacctctacaagatcccccgtggtgtatttgatactccagttgtgtcagtaggagattcaaatcaaagagaaaccatggatccagaagattccacgggcacaaaggcacaagacacaccaagtacttgtgcttctttcgcaccaccaacaacagaagtagatcctcggataatcgcattagcaaaagaagtcgcagaggcagaacacttggagttggaagcaaaagaggcatacgaacttgcagataaacacgcccagttgctaaaattagaaagcaacataaccttgcagttagccgtagaaatccttaatcgatgtaagtaatgtccacctcttaaccttttatcatcatcatcatcactgactttttcatttgatttggtccttgcaggtgctaacggtgaaaagattttcctgctgtaaaagctttgaccttctggtccggttcaaggtggatatattcgatcaccggtttctttttagtgtttttggttttgagtaaaaaaaagagtgtagatatgaaatgtgatttcatttgactaactagtcatagtttgttactttgtggttaaatgattttggttgtgaaggcaacagactattctgttagtttttgttaatacaagtttttacagataatgccaatcttaagaattgaataggtttttctaatacataacataagaaagaaaaaaagaaagtgtgtcatggtgtctttagcaagtatttttaacggtcgagattaatttcaaatactgatcaagaaagaaaaaaattagttatgagaattacaattttataatgggcctcattgtaagcccattataagcttacataggacttttatgagtttttgttctcagtctgtccctttaattgttttttggctcttctatcgcccatcgcttgggagattaaagtctgaactttttgatctcaagcttctccatctctccctcaactcaagctcctggttcggaactatttactttcctatgcgattggttgtttataagttgatttcagagttcggattcttgtactcattagatgtccatataggtcttgtttactggtttaattggggttttatcaaggaaataaagagtgtttagggtttgaatttccgtgtttgcagatg

SEQ ID NO: 21355 - DNA, 3003 bp, Unknown
  misc_feature (1)..( 3003): 2750-1469P.txt file - cDNA_ID_1977553; gDNA_ID_2214482; Annot_ID_133287
atgaacatgcagcagataacattcttacattttgtaacaagaaaatacagtaaaggatatttgtgcatataacggggcagtgtcaagaactgatttgaagactaaattctatttgaaatattgttatttgagagcattttaagtaatggaggtgctatcagatgagcgacagaaaaaaggaaataagaacttgtatttgcttagttgacctatatttcttttgtttagatgtaaatttatatttcacatgactttacacttttacagagaaggaatacaacaaaaactgactttagacttcagatagcatgcatgcttgcgcaagaactaaaaaactaagcaagactgctcttataggtaaggtacttaacaaaagcatgtattctgtttggagactacttggaagagaatattctcatatagctctagttttcctcaatatcgtctcaaatttttagagctcctttacaaaattggtgatcaaatggaaaaaccataagaggatatattcaactatttattattttgtctgtagtatttatctaaataatttatatcaatattaagcattggataatcttaaacatttatttagatatagtttgaacttgtaaacttacacgatttttaaagttcgtaattgaaaaaggagtatacgtccaattgaaaaaacgaaccgaccttctgaaaaaaaaaaaatatatatatatatatatatatatatatatatatatatatcgtgtgatgcaactaccacataaaattactcagattacaaaagaaaaaaagaagacaaaaaacctaaagaagatcgaatacgtaagatggagaaacttggcagagatgatgaattgattgtggacgagtcttcgttgaaatccttctctcttctttgccaaggtaacttcagttacgtctgtctcatgaaggactccaaatctcgacgttgcgcaaagaagtcatcgccgatgcagcacaaacagattctcgagaaggaactccggatcatgcatcgtttccgtgaccatcatcgcatcgtccaagcctcaaacaagtttcacatacaaatcaaaccctctgaatgctacatctatatggagtacgcgtccgaaggtaatctccataagtttatatctggtttggaaggaaaatccgtaccagagtctttggtccaacgcacggctcgtatgatcctagaaggacttgaggctcttcactcccatggttacgttcactgcaatctcaggccatccaacgttctcctcttcccgtccaagactcctggagagccgtgggatctcaagcttgctgatttcggctcatccaaggaacctgattccgattatggttggatgtactttggtacggcgcctaagtacatgccaatagagtcttttgggcctaagggagtgatcatcgatccgagccttgatatatatgctctagggtgtgtggtttatgagatgcttggagctatacctatccaggactactttgacgaatattacgaatggaatctgcgtcgtcatatctctccggaggctagagatttcttaagccggtgcagtaacatgcatccacacaggcccaccgcggcatatctcttgaaccatcctttcattactcaaatacttccatcgccaacaacagaagacaacaaggagatatctaggtcgttgattccaagtttctcgaagcttcttttggcctaatcctctctctatctctcttgtttgcataaaaaaaaagaaaaaaagaaactggatagtgaatttgctatggcaaagcctagccgagatgtaccaaggatcggtttgaccttgggaactcgttaaattgtgtgtgtctttgttttcaataatcgtgaaatcttcattaagtgtaaaagttatacatgattaagcttaaatactagtaaactaaaccaaaactactaaccaaacttaaccacaactaaaccaagtatatacactctaatactccccctcaagatgaaaggaactttcatcttggacttgaaaacccaatgaatatgtgtcctccacaactttttttcaatgagagaagcatcaatggacatgaatatccatggcttgaaactgaaaataaacgttacgagcttccggtggtcttgttagtgatccaaagataaatgtgcttaagcgaccagaatcatcgacatgcgcttgcccaacaaagctaacatcgccacaactaaaccaagtatatacactctaatatttgttctttcgattcatacaaacgagagtcgtgcgtgagagatatgcaatcgagaccaaagtcttcttccgtgataagattatcagatcgatatttctctacaacaagacttccatctggtgatttcattttattacataccgcggagaagaaagatcttatcttatttaagtgttatactttagttaggtttattactcgagtttgtttgttacttgcataacaaaaaattactcttaagtcagtattttttctttgaaaggttttacctttttaccagtgtgaatgtgctgagttcaacactccttcatgtttaatctgagtatattttatattagtcctgcatattttatcggagaatatcttcatatattattattagagtgtacataaaattcaaggtttactctatattactctatccaataatttacatttgtctgttagattttgttggaaaaaaataactgtgatttacataagttttttttttttttttttttaattgatgaaagaagaaaaagaagaagaaagtcttctctagaaacaaaatccaatttttggtcagaatgaaaaagtcactggcaatgtttattaaaaaaaaaaaaaaaaaaaataaagcccaagcccactacatgttaaagcccaagaagtaacaataaagatcagctctcctctatcagagattagacgaatgagatcggcaacaagagcgtaaaccctagcagcagacacaacacgagttcatcgagaagcaagatg

SEQ ID NO: 21356 - DNA, 3003 bp, Unknown; identical to SEQ ID NO: 21355
  misc_feature (1)..( 3003): 2750-1469P.txt file - cDNA_ID_1977553; gDNA_ID_2214482; Annot_ID_183391

SEQ ID NO: 21357 - DNA, 3000 bp, Unknown; identical to SEQ ID NO: 3955
  misc_feature (1)..( 3000): 2750-1469P.txt file - cDNA_ID_1985369; gDNA_ID_1620675; Annot_ID_48234

SEQ ID NO: 21358 - DNA, 3000 bp, Unknown; identical to SEQ ID NO: 3955
  misc_feature (1)..( 3000): 2750-1469P.txt file - cDNA_ID_1985369; gDNA_ID_1620675; Annot_ID_164249

SEQ ID NO: 21359 - DNA, 3003 bp, Unknown
  misc_feature (1)..( 3003): 2750-1469P.txt file - cDNA_ID_1985369; gDNA_ID_2926202; Annot_ID_141569
aagttaagaataattttttagttacataaatatttgtctttaaaattgctcaatccatccatcttctcaaaatatatacagggaaattataggagatggaattagcgcattgttttccaagtgaaatattccaagactcaaataagttaaatgggcttgaaaaaattagcactaaaaggcccacttaacgtcttttcaatttataatttaaagataagtcgaagatataaattgaaaataagttaaatgggcttgttaatgggttaacaacagagacaaaaagccttataacatgtagaagatgaagtccacataattaaattcgtggtttagctttagtttctggaatcttcgtaccaaagtcgccggagatcggaagctaacacgggaagatttagccggaagaaatggcttcgttaggtttcaacctcggcttcaccttctccaatgcacaaattcagcagcatcgaaaagtttccggaggtggaagagctcgcgtaatctcctgtaacagctcttcttcttcttcttctcaagcatcatctcctcaggggatttctgcagtgacgcctcttgagatagagctcgagttcttcggtgtaactctcggcgcgattttctcgtcgattattgatacaattcgtttcaaaactcagaagagacttttcgtttttttctttgcagccgaagccgggtagcgacgggtcatatccggtagataaagcaaaggctgtgagtggagataagcttctcagaagcattatgcaggataacaaaattgaactctacgctgcttacgtgagttatgttgatttctctctctttaattacgaaatttaacttcagattttctcaatcttaatacattgattgatttgatgtttgaactagtttctggaataatttagtagacaatgaaaatatttagttctagattttgatgtgaggagatggtttgttgaaggcttatgtaaactttggattttggtcaatttgtgatgattaggggaaagtgatgaactgtggtggtggaggaagctgtggaacttgcattgtggaggcaagtgacttcatacaatgttaattagattctgattatgaatttatgagctatgattgttctagcattcatggatatcaatggaggaaaatagatttgtgtttggtcttcttatgatgaccagtaactcaaagcaaaaaaatacacatttggtcttcttgtgtgcagatactcgatggcagagatcttctgaatgagagaacagatacagaaaaccggtacctgaaaaaggctagttatttgatcactcctctctatattattgttagattcacaagtttctcattgctagtgtttggaatgggtatgtgcactaacaagatgaatgaaatgttgagcattgtttctggttaaatgtgaatatatgttttgttgtctgatatggttactaagtaacttttcttagatatgcaaattttggataaaataagagccttggctgtttaaatcttaagggttttgttactattgtgcagaagccggaatcttggagactcgcatgtcaaacaatagtagggaacaaagaaaactcaggaaaggtacctactttcatacaccaatttatgcatatgcaaattgcaaacgctaatgtgcccattatttgggatcataagagtttatttttcctttttatgatctttctcattgagaaaagtcggctttggatataggttgtcgtgcagcggattccacagtggaagaagtgaattaatgtaaaggttatttgtctcagatttatgtgtatataacacatctctgtatgaatgttgtctcgtattaatggaagattcgtttgtctagacgtatttttctttagttcttggatatgtggtgccatgatagtgaaatttaagagagaaactatcaactagctcgcatgattgaaatgtttaaaatttgcttaaagatacggtaggagtgaagctggtcagaagattcggtaggaagtgtttttatgatgatctgaaaatcagtagcatgttttacctttttgagctgaaaatggcatttgtttcttaagctttgaaaacgtgtttctaaaaaataagaacttggtttagtattcgaaccgtttctttgacaactttcagatcactttatttatcgaatgtcaccgaagagacaactttcagaacatctaattagattacgcgccgccccgtaaaacaggggtaaagtcaaaaagcaatatcttctcatttttactttttacttttttcttgttgagggaaaatataaagaggaaggagccaaagaaagcatcactatctgaatttttctttgtacatttatttatatataatactagtttttgtgtgattgctgtttggctccgaattttatatccataattttttttttttaatctccccttggttgatcggtgaacacaaaaaaaaaaatctaaaataatcgcaaaatacatttgaagaagctacacgatcaacaacagcaaaggatttcgattgttgaaaaagttgactcttcttaatttgattcgttgtcttggtttctgggttttcttcttcttcttctgcggcgctctccaattttacaccttgcgaccagcgagaaaagaaacaaatttcacccccattgaagaaggtttgtttcccctaattgcttgattttattctgagattaatcccaggcgccaattatatgcttctgttcttctgataaatctttgcccttttacgatttttctttgattttaccctagttttatggtataatctgggtgagtttctttcctttaattcatgtatgattaagcttggattggtcgattctgatgagtcaaaatcttgaaacagacataaattgatgatttttcgtggttgttttaggtcatttgagggtttaagctttctttgtggatttgcaggacctttggttaagctccatggtgtggtatgcgcaaagtggacaatacctagatg

SEQ ID NO: 21360 - DNA, 3003 bp, Unknown; identical to SEQ ID NO: 21359
  misc_feature (1)..( 3003): 2750-1469P.txt file - cDNA_ID_1985369; gDNA_ID_2926202; Annot_ID_201939

SEQ ID NO: 21361 - DNA, 3003 bp, Unknown
  misc_feature (1)..( 3003): 2750-1469P.txt file - cDNA_ID_1985373; gDNA_ID_2214599; Annot_ID_135532
tctaaacgcttaaccaaaccagcctggcgatagatctgagcagcgatttcattgtgaaggagaccggcggcagaaaagaggggaattttctgtcctctagcaatggagttcatgacatcaatggttgaaatgccagtctgaatcatctcttcaggataggttctctcactaggattgatggaacttcctggagagaccaaagatcagaagcctctttagtgagagggaaaagaatgcgtcaagaggaggctaaagtgagtgctcaccagaaatatccaagtaagcctctggcaatataggtggaccattgtcaataggcttccctgaaccattaaagatacggccaagcatatccaatgagacaagggtttttaaaacctatattggcaaaagtgagtgagtaaaccaaatatatcacgcaacaagagaagagagtagtaacatacctcccctgtaaattgaacggtggtgtacttgttgtcaattccagatgttccctcaaagacctagacaagcaccacagtactataaagaaaaggccgtgttgcattattttgaatgaggaaaataatagttggaaacctgaacaacagccttctcgccatcaacttcaagaacttgaccacgtcgagtagttccatccccaagatgtatgttgactatttcttggtatttaggtccctgggaatcccaataaatcaataataatgcatcaagaaaacaagacatagaacaatttcttggtaaatataccttaactttctcaaggataacaagaggtccagcaacaccagagactgttctatactctgcagatgaaatatatatcaaaaagaagaggaagaagatttagcatcctcctacattgcaatgaatgaatgtattcaacaaccaaatagttgtttacccattccgatctccagggcaccttcctccatttcgacattgtttttagcagcacccatttgaagatcggagagactatctcttcttcttttttcttgagagccggctgagatctatcgtcgactatcacttctctgattcaattttattttgttttgtataaaatggacaacaatcagacttgttatgtatataataaaaacacccaaaatttgttgttagtctcttcctctttcaatttacttgtccaaaattgaaataaatattatccgacaatccatatttataaatagtgttgatcctagtatttggttctttgctagtctttgtctctggaagtttgttacttgtcgggttatgtctcccttcccttgtttgggctttagcctatgttgatatactcctatgtatgaagactcatgacattggttagctaggcagtaagatgaaggaaaatttagtcctattacaacttgcctgcagccattagaggaagaaaagatatcttgtctgctaaagagagccgagaaaactgcagaaataacaatggtaagaaatgggatcatgaagaatatttgagaaacaggggaaatatttgacttacttgagaatactactgtatagaagaagctcttgaaatacaggaaacttaaccttaaaacacataaacattttcatccttataggtttcttgcttcataagaaacagagaaaaaatatatgagtacctgtaaatcttcccaggttgtgaagggtttgagtccaagttgatcaaccaaggaaaatatgtttccattcggataccaaaacccttgttgcacagatcacatgtattagttgggtaacgtaaaactaaaaggtaattaaatgggttaccttggaacccaacatcaacaggaccatgaccatcgtcaagaactgtgacatcaaatggagttggagatgagaatatcaaagtgaaagtaaccttggttacaaagatgatgagcggcaccaaaagcagcccagctagaacccacgacaaccaccttcttcttcattttttttttggtttaaaacaaccttcttcttcttatctgaggtggctcctccatcgccttgggctatgatacatagtcttctccggcgcacgggaccttgtactattatcagattcaggctcccacaccacaacatctttactgcctcacaatctttcttcttttgtttccttgtgtttaacttgtgagtaagtgatgtgtgggtgccatggccacaaagacatcataaaccaaattttgtctgtatttttttggttacaaagatgatgagccgcaccaagagcagcccagctagaacccacgacaacaaccttcttcttcttatttgaggtggctcctccatcctccatccccttgggacctagtactattatcggattcaggctcccacaccacaacatctttactaccttacaatctttcttcttctgttttgtttccttgtgtttaacttgtgagtaagtgatgtgtgggtaatgccatagccacaaagacatcataaaccaaattttgtctgtatttttttttacctaaaatatattagcattcattctacaattatgcagttgtttctaatacagtatgcttatttttcagtattactcatagattaaaattaacatttacctcacaaacaattatagaaatagaaagacatggaaaaaaaaaaatagaaagacatggaccacaaaataaataatatgtcgaaaacaaaatatccatttgacatacttatcaaatatcaatttattatcaaagattcaaaagtaattgatgtaagtacaaaaaaattgccgaattcttttgcttccacgcttcgaattgtgtattggacccaaatttatgtgtgtgacacaagataatcgttagtataggtctatctaccgtccgccgtttcaatctgacggctatcgtacaagccgtacaatatagactcaatctaacggtggaaatagaaagatcataaatccctcaaatctcacagttacctcaagtttttttttttttttttgttggtggagacgaacaacaacaacaccaacagaagacagaaatg

SEQ ID NO: 21362 - DNA, 3003 bp, Unknown; identical to SEQ ID NO: 21361
  misc_feature (1)..( 3003): 2750-1469P.txt file - cDNA_ID_1985373; gDNA_ID_2214599; Annot_ID_186996

SEQ ID NO: 21363 - DNA, 3003 bp, Unknown
  misc_feature (1)..( 3003): 2750-1469P.txt file - cDNA_ID_1985415; gDNA_ID_2214555; Annot_ID_134769
gagcagatgggagatgttaaaaagcgtattgaggcgctagaagcttctactgatcagcacattgaagagaaggagattgttgttaatggagaactggtgatgaaccttcttttgaaattggatgctgtcgaggtaatgcatgaaagactaatttcattggttggccgagatagtttatctcagtatgtactgctgtgtaggatttttgctgacagtttcctatactgatgtttatcttccagggattgcatcctagtataagagagttcaggaaagctttggccacagagctctcaagcattcaagacaagcttgactccttgaaaaatagttgcgccagtgcagagaaagaggctgtaaaggaacaagtggaaattaaatctcagcctagtgactctccagtgaacttggagcactcccagctcacagaagagaacaaaatggtatctgacacgaatttagagaaggtacttcgtctgtctcccgaggaacatcctatgagcgtcttgaatagaacagatgaaaaacaggctgaatcggctgctgaaacagaagagggatatggattgtttgaaaccctggcaacggattctaagcaagctactgaaaatgcagcggctgcttcctcgacaacaattccagagaaaattggagaggttgagactgttgttccgggtaatccaccgtcagctgatggaaacggaatgacagtgaccaacgtagaggaaaacaaagccatggtggtggaaagtttggaggagccaataaacgaattgccgcaaatggtggaagagactgaaacaaactccatacgggacccggagaatgctagtgaagtctctgaagccgaaaccaactcatcagaaaatgaaaaccgaaaaggagaagatgatattgtattgcattcagaaaaaaatgtcgagctctcagagctacctgttggagtgattgacgaggaaacacagcctctttcgcaagatccatcgtcatcatatactcgtgaagggaatatgactgcaatggaccctaaaacagcgagccaggaggaaacagaagttgatcactcacccaacaactccaaaggcattggccaacagacttctgagccacaagatgaaaaagaacagtctccagagaccgaagtcattgtgaaagaacagcctctagagacagaagttattttgaacgaacaggctccggaaccggaaatcactgaacctgggatatcaaaagaaaccaaaaagctgatggaggagaaccagcgattcaaggaaacgatggagacgttggttaaggcaggcagagaacaactagaagtcatatcgaaattaaccagtcgggtcaaaagccttgagaagaaactgtcacataagaaaaagacacagatcagacgtcgtgcaagcaaaccaatgtccgtaagtccaaccgatgccgtattatgacccccataaacattgatatgtctcaattcctcatatattgtatccatctccatcctattgagtacagaaaagagaacgagaactcaaaaattgtcttaacgaaaatccaaatatttgcctctctgttttcttcgacgttcatggataacctccttaaacgacccattcgctctgacagattcgactaaattttgtgtcaaggcccaatatataactatataaggcccatacaatgatcaacccattagttatttcaaatgtttttattatttatttcaaatttttgctataggtgtaaatttcatgtattattactttaattacatttaaaatttgtatctttcaaatttgttatgggagaaagaaagagaatgattgtgtggtttgtgcggacatagtgatccttttcatgccataactcactcttcgttttcttctttctcatcgtcacgttaggttgtctctgagccgccaaatattcatctcttgtggtcccgttcacgtcccaacgccatttacactcatctccgtaacctctctcttatgtgctttctcattacaaacaactaaaattctcaaagattaacatgtgcaagagaaataacaagtaatgatatgatctcattctcacctaatctatggttgaaaaaaaggaaatggtgtcagtattagtcataataaagccttggagttgtagactatagcatgaaaggaccaggaatcttcaagcatggttattttctgatacgaatgatttatattttaatcgtttattaacacccatttaacctcataatgactctattagcctactctcaatccccaaatttactagcataattaactaattcaagggattatcttcacccacttgtgtgcatccatcaaaagttaatttcttatcttagaaatacatttcatctaaaccaaacaaatgatatacactctcatttctattcattagtgtcatttctacaattgtagcagtatgttaactactgtaactattgtgatccaaatatacagtaaaaggttgcacctctactgtaactattttaacaagttcgcaaaatgtacataggagaaataggttgatttccatggagaaaagaaaatagtaaaaggtgaaaaaggttcactcacacgcatcctctgtctctgagagatatatttccccttgcagtaaataaaaatctatggctttgttgggaagaagaaaaagtcagagtaaactcgtaatctttgtcgggagagagtaacaggcttttgatgttgtaacattatactactattgttttaaaaagcaaagaattgtagtagtaagaattacaatcatacttaacaacaaatcacgtttttcgggtttttgtataaataaatgataaagcaagatggacaaattttaaggataagccattaataagtgatctgtgaatttttaaggaaaagacgaaagaaacagagagagtcgagacacaactgtctccaagaagacaaccttccacagcttaagggaaacagaggtggaaacagaggtgaaaacagagcgagtaaagagatg

SEQ ID NO: 21364 - DNA, 3000 bp, Unknown; identical to SEQ ID NO: 5279
  misc_feature (1)..( 3000): 2750-1469P.txt file - cDNA_ID_1985438; gDNA_ID_1620776; Annot_ID_50298

SEQ ID NO: 21365 - DNA, 3000 bp, Unknown; identical to SEQ ID NO: 5279
  misc_feature (1)..( 3000): 2750-1469P.txt file - cDNA_ID_1985438; gDNA_ID_1620776; Annot_ID_167735

SEQ ID NO: 21366 - DNA, 3003 bp, Unknown
  misc_feature (1)..( 3003): 2750-1469P.txt file - cDNA_ID_1985614; gDNA_ID_2214700; Annot_ID_136836
tggaaactggatcgtagattcatatacaattgagaatttaagatcatgccaaaggcgattgctgatatcatatttatgtagcttttgtactttttaatagaagtggacacaatactgatatcattagtgaataatcttttcatatctttcagtctaagtatacacaaatatatcgtatatgcataaaacgaatgtctctcattttcgtaggaaagaaaacacaattaaaaagaaatatttttaaaaagcaatgtgaaaagaagttggtaacttgaggttcacgagatccaaatgtggatgaacgttggaacagctaaatccacgtaataaaagaggacgaagcttatgattaaatttggtcagttaagattctcatcctatgcaactacctaatacaatacaattaatttgtctccctcccaaattcattcaaaatttttttttgcttggttataatctatttattttgaatctggtggctataatttttcaaaaatctatgtcaagtaacgtatcttacgaaaaaaaacactgtgattaaattcatcggaattactagtctcatactaaattctacaaatagatatcattttctcttgtaaattacacaacaataacaaaataacaacaaaaatcattattttcttctcgttgcttttattcttacgaactggatactatctttcttatatgtaaaaacaacacgtaatatctaataagtaaagtagggaaagtagacttacttatgttacatagggtcccccttattaggctacatatgtataagcaggaagtagacttggcatttgaaatagacggttgatatctccctgtcactatttatccatccttatgacctttcggcgggaaattcgaaatgacatttgcagattttcttgttttttccttttctttttttgtttgtccactccacttatatctttttttcttttggggtttttaatcgcatcctacaacatatcactcggatagggtaaattgccccaaccaaccattcattattaattaataaacctgacgaggaaaatgaatatattttggtttcaaatgttttgtggaatgaaggcagagagaaagacagcttctgtaaaagcatttgctggcagacacaaccctaaacccaccttcacttgcctcacctcaccactctctcttcctcgcgcgtgtctatcacttccataaactctcattgcccataattgcttgttttctttctatatgccaagcctgataaatctcgtagtaaattacgggaaaaaattggattccacctcacacaataaagcattttacaaaaccagctttatcattgggttttttaacagattatagtattgtgggtgctcttaatatctggtacacaatagtataaggtctatcgacaatacagagtagactccgggagacaagagaagccaactaggggcacattttttgggcgtaactagacattatatattaatttaaaacttttgagtttcttcgttgaaaaacaattatagaatatagttttgtcttcaatataaaatgagaaagaagagaagaagatctgttcccgctcttttgacttaacggtgctgtcgttttcagcaggttaacctcgaccccaccctccatttttcacttccttctttttaaattattttctctatcactaaaaatatcaaaaaggcgggaaaatcacctattatccaattcagtttataaaccggtttcggttccgtcgttaacggctgattcttctgaccaatgaaaactcgtgaagtctgacggagaagaagacggaactgttaaaatccgttacgtcagacggagaggagggagagggacggatgactgaataaatctgccgaatcctgctgaattgccacgtcagctttattcaaaattctctgagtggtcacgagatttctatggactcttttttttttgttaattaaaagtttaaaaccctacaaaataggggtcttcaatggggttaccagaaaaaaccgaacagtcgccgattccttggtttaatctttgaaccgacagtgtgaccttttaattttctaacctttgctatattattatgaaaatcagatgtaattatttagtgccattcattaacgtgattcttacttataattcctctcatgaatactaaatggagtgtatataattatatttagcagtaaaaatgtattgtattgattgttggaaagggaggaaaaaatgatgagaaggatttgcatgaggaaaagagagagaaggcgtaattatcaagtgttcgatacttttgattagcccacacatttataatattttagtgtagtagtgagatttttatttagggttttaattagaacatagtataagacattggagctgtaaatgacaacttgtttgggatttagtgggttccacctgtatttctcatgcccttacacatttccacattaatatctatcttatcttataaaaaaaagttccaaagaaaagagtgagatatacatatattagcaatatgagtttaatgtgccattcaaaataaataaataacattttgaagaatattaagagtctcaattaaaaaatatttaacttgttctttagtgagttacatccatatcttaagagacatgtgaagagttgaatccaaatgataacacaccaaaattgatggtttttaaaaaatgtgaatactattactgtttttttctttggatttccaaggcaaaatagttaagaaaagaccaaaggaaaatagttttgattttcgtccatcacgcattaattacggataattattatattaagaaggaaaaaaaaaaacaaaaaaaagcagaagtgatattaaagtgcttttgagctgtctcgtagaaaccatgaaaccttaataaaagcaaccttgtcttcaacattctccatcttcctcctcacttaatccccaagttcacacttcaaatccactctttctatttctctccttcttcttctatg

SEQ ID NO: 21367 - DNA, 3003 bp, Unknown
  misc_feature (1)..( 3003): 2750-1469P.txt file - cDNA_ID_1985638; gDNA_ID_2214558; Annot_ID_134826
tgaagtcagttgttgactcaaggtttattagaacaaaagtcaggtttttagctcattaaagtcaaccggataaagacgaccggtctaattcggtttgggatttagaaagactctatatcgctcagagggtctaacgcagacgcttttcaactttcgagatatttttcttaggtatatatttccaaatgttacggcgtcgttttcaaaaacatatttttgttgttgcgtagtagtccttcggaaattctttgcttcctagttgaagcactcacaacacacagcttttgtaggaatccctaagcttaaagtctctattattctctaatctcttcttcgccgacgacttctctcaccaaggcgacgttttgatcaggcgatgatgagtatcccaatggagttaatgtctatcagaaaccctaattccaccttgctctatagagctcactctcgtccgcctgtgaagctctgtgctccacctcgttctctcctccctagccgacgccatttcagtgctcctcgagctgttgtttcgtatccaggaatacgtttcggctttacctcgccggaagtcttgcttaatcgatccgtcgttgctttcgctgcatcccacgaggattcggtgagtagtgtggttgtgctcaaaacttctaatttctctgttgggtatctcgaaattcagatgctttatcttgtaaattgcttgaggctagaaaaaaattggactttggtgaaatttatttgattaagcaatataatctgccaatttcaagtgaggtgcaatttggggtttgaaattatcaaatgatctgtgattagctaaagaacatgttttgattattaccctttatcgccattgttcaaatagggagaatcaggtgttgaggtggggaaggagaagagtgatatagatgttgaagatgatacatctaaggaagcatggaaacaaactcttgagtcttttaaagagcaggtatcaaagatgcagagtgtgtcatcggaggcatactccgttaactcccaaaaggcgatgacggtcttgaaagaaacttctgaacaacttaggattcaagcggaaaaggcgaaagaagagttgggtactaaagcgaaagtggttagtgaagagggtagagaatatattttgaaagcagcagaagaatctccatcagatgtgaaagagattgttgaagcatttgcctccactgaggatctgaaaaatgtgtcccgagcgaatgattttcatgttggaataccttatggtaaacatgttgtatatcttgttcatcttttgtaagctttcattgttcgtgagtaacgggataacaatgtttgtatactttacaggtctactcttgcttgtgggtggttttattaacttcatggtatcgggaagcattccggccatcaggtttggagtcattcttggtggagccctttttgcactgagcctggcaagtctaaagtctcataggaaaggagagtcatctacaaagttcttaaaaggacagatgggttagtaaagtttttcaatctgtattaaccctttctcatatcattcacaaaagctagccccagttactgaaatctagttttaacaaccagaattgtgctttgattaggaacggctttgataacccctctgatatgcatattagctaaccatgaatgaattagtttaagttgcattattgatttgtctagaaatgagtcttgttccaatagatacttgttgaatcctagattttgagtttagtcaacaaattaatttttcactaatctgatttttgaggctttccgacattctccggttgagtatagatgtaaagcatgtttagtgacgcttatctgttaccgtgttcttatgttcaacagctatagtggcaatcatatttttgagagagttgcggttgctactgtctcaggtaactttcattgctcaatgttatatttcaaatggtttgaagaatggctttgaatgaaacataattcactctcctttttctctttatagaaatcgacgttcctaggtttttttaccacccttacaaggtacactctgaaaaccatatcattaatcattgtacatttgcaatttgataaatgaaacacgataggaagatgattgatagaagaacctaaactaaaattcaaagagatatctgaatgaaggaagattagtcataccttttgaccaaacttcctgctagattcaaatattccacggggaaaagcaaaacacactttgcatataatggattaattaggattcttatcagaaagaaggcttaaaagtttgttggattactgttgcagtggtggtgtgctagggttttacttgtacaagatggtggtcaagagagaaaagggaccaaccttagaagatggcggagaagatgaatcaagcgatgggtttgtaagaagtgaaggataaagaaaaatggggtaagaggaagaagtgttgtcgtcaacatcagcatcatatatgccaaactcttttgatatctctttttaagttgtgtacaatttttgcgatcaatccttctaatttccgttgtatttggattagtgagtcgtttattaatatcaacaaaccaataaaaacgagaattttattttgtttgtgaaaagcccatcaaactttggcccaataagggcctgggtgagcccaagcttgatgcagtaatatcgggataaggagaaagagagcagaagcgtgaatctagtagtatccatagacctagccacgtgatccaaaccgttgattcttcaaggttttaactgaaaccgttgatcactttgtctcggtcgtataaaataaattaagaacacagtttcagtccgtaatctctatctatcttcttcgtcgtgactcaaacgaggttccgccgattataatccttctctccatacttgagagattttgttggattgttctttgttctgagtcgccttggatctatcggtgttggtgctttgttttttgagctagggattgtcggaacgatg

SEQ ID NO: 21368 - DNA, 3003 bp, Unknown; identical to SEQ ID NO: 21367
  misc_feature (1)..( 3003): 2750-1469P.txt file - cDNA_ID_1985638; gDNA_ID_2214558; Annot_ID_185796

SEQ ID NO: 21369 - DNA, 3003 bp, Unknown
  misc_feature (1)..( 3003): 2750-1469P.txt file - cDNA_ID_1985662; gDNA_ID_1621150; Annot_ID_56863
aagggcagtgcctgtggtagaaagggctacggagagctcttttggttcaaagactgtgtcgtcgttttcgagcagtgaagaagagtcggagtttcatcatgttaatgatggagaagggaagagtagcagtaatgatttaggtgggcatgagacggttgctactaagagtgttggagaagtagaagaagaatatgtgaggaagaaaggagttagctttgagttggatgaaaatgtaactacttcttttgatgttgaatcttccaagattagtagtctatctgcattgtcggttcatgccactagagatcttagagaagttgtgaaggagatcaagagtgagtttgaggttgcttcttcacatgggaaggaagtggctgtgttgcttgaggttagcaagttgccttatcagcagaaaagttcggggctcaaaggtaatgtttttacatgttctgtttgtatctgtgattgcttccttaattgcataaatagctgcattttgaaataacttatacatcagaaaccattttttggagatcaatcttgttacttgtggagatgataatgcattactgcaaatcatttgcagttagattagagctatagctttaaattagcagtaatttggagctcttcatgcaggagaaatatatgtatactctgatagtaatattagtagactttcgtgaattttcttcattttaccttggatctgttcaaattaggaactacatttcgatgtaatgggaagtaatgttgagctcttgttgctttcgattgaactgttatgggctttttcttctctgatggagcttctagattatgaaccatagatttgatttgcgtcacttgagtcttaccttggtgctttttttctaatgatatttacttcattttttctctagtcatcttctcccggatcatgtatctggttgcaccatccacagtttcatcgcgctctcagcctcaaccgtcaatacgtttaacatctaggatattgaaaattgcaaaatcatacaatggtcaggatgttagagaaggcttaactgggaacctctcagcaaccttggagcaactctatgcttgggaaaagaaactgtacaaagaagtcaaggtatgtatgtgtttcttgattttgaatggattaatctccttagattggagcatcttttgacagatgtagttgtttgttgatggcaggatgaagagaagcttcgtgttgtctatgaagaaaagtgcagaacactgaaaaaactggatagtcttggtgcggaatctagcaagattgatactactcgagcagccattagaaagctgctaaccaaactcgacgtctgtataagatctgttgattccatttccagcaggatacataaactgagagacgaagaattacagcctcaactaacacaattgattcacgggtataaattgatctcaattcttttactattcctacatttatatattttcgtttgtgtgatccgatacttgggatttgaaggttgataagaatgtggagatcaatgctcaagtgccaccagaagcagttccaggcaatcatggagagcaaggttcgatctctcagggcaaacaccggcttacaaagagactccggtttgaaagctattcttgatttggagatggagctacgagaatggtgcattagcttcaacgactgggtcaatactcagaaatcatacgtggagtctctaaatggatggctctcaagatgtcttcactatgaacctgaatcaacggaggacggaattgcccctttctctcctagccgtgttggagctccacaggttttcgttatatgcaaagattggcaagaagcaatggcgagaatctctggagagaacgtttcaaacgcaatgcaaggctttgcctcgagtctgcatgaactatgggagagacaagatgaggagcaaaggcagagagtgaaagcagagtatgtgtcacacgatttcgagaaacggttgaatgatcttcggatggagagggcgagagtgagaatgagaaacgatcagctacaagacggtgcatcagagaaaagcgtggtcttgtccgagagcgggatctcggcgttggatgatttgaaagtggacttggattcaatgaggaagaagctagaagaagaaagagcaagacacaaggaaacaattaaacttgtgaacaatgcagcttcaagcagcttacaagctggtttagtaccaatctttgaggctttggggaatttcacttcacaagttgtgaaagctcatgaagatgttaggtttcaacaacaacaacagcctgagtctgaagattgattttgcacgaattaaaaagttttggtaatgaaattagattcggatttaggaaacaaattgttgtacatattttagcatttatatattcattgattggttggctacttgcttgtagattcttaatctttttctattttaaggttctcagatctttaaattaaattacttctgaaatctgaaccttataataatcattaatctatgagaaaattgataataatcgcaagaaaccaaacataattggtcagatttaagatctatgaccatttacttgcacgaagtcacggacctgagatctcacaacaagatcaacgaaagagaagaagccacgtcattgtcgatatcgtgacgcttgtacattggtgcggaacagtgtgtcttcggtttagacaatttttctcttcttaaaattactttttactgctggtaaaatggagtaaataactaaataaattttataacggcctaggtcaaaattatcaagacactgtataaacattaaaattcttgccaaatccctataaactatgacgacgtaatacccaattagagatagccacgtggatgtatgaccaatttaggagcattcagttttcgtgttttgcagtgataaatatctctgagagctaaccccggagagcttacagaattcaagctaaacattgttagagagaaagagagagcgataatg

SEQ ID NO: 21370 - DNA, 3003 bp, Unknown
  misc_feature (1)..( 3003): 2750-1469P.txt file - cDNA_ID_1988779; gDNA_ID_1971786; Annot_ID_58009
tagttttctgtcagcccaatgggtcttaacgattacgtgggtataatattttagccatactaattgtttcgtccaaaattcgtcactaatgccacttgtcaagtagcttaaggcaatgtaacgttacctacaaattagtttaagctaatcatttactacaacttgccattttaacttttgaatcatttaaaccgtgctagagatttttgatgtttcggtccacttttagaaaaaatcatagtaactcggataggtaggatgacatttgattccctgttgattcggatcgctaacactactacttagtgcataaaacattcgcagatccgtgactcaaaaattaaccggaataattgtataaaattaattaatataatccatagtaccataattaaggcttaaaaacactatttaatttataaattatatgtgtgagattttcataaacttcggaaacttatgagcttttacaaaatcatccaaaatctccccaagaacacctacacacgttgaaatttcacttaatttctatcatattacggattgttacacttgagaaaggtaaactttataaaaccttccagtaatagagagttattctctggaaaataagcgtgcatcctgcgaaagaaaaaatcgtcataactaatctcatgtcgttaaggatatatagtctagtgtattaataatacaccacatctttgttccagaaattcctcgtgaccatctattatattgtgcagcttagttatacaccaaactaaagtttatttcagatcaccccaagaccatgaagatttccgaatccgtatcgttacaacttgataacgtaagaatatatacgagtatgcatagtttctttaatttgtatatatattaagcaagatgaatacacaagactttaaaagaaaagggtgttgataataaaaaccaaaaagtctaagaaaaagagtactaatcattaagacatatatatattacatcttaaggagcaataatctttctattcagtatcttgtattggagtttcgtgaaacttagcaataaaagccgtggctctcctatcaatacaaggctcagcaatcgtccaagaacatccatcatcgtcggtggtcatgattcttggtctaacattgatcattctctcttcgttccaattgtctttttccttcgaacaacgcgcaaacaacgattttactacagaaaaagatgatgatgatttcctcctcctcccgtgacctcccattttcatgtatactttgtagagagagagagagagggatggtatatatataactatatattgtgatttgaacaaactcttagattagatttatatagtacagtatgtttaagatatcctaataattaatagtacaagagaataattgtaagttacactggtgtattagttaatgaatcagaaaattgggtttatagaaaccaatagaggtgtaaaataatagtgcgatgtctagagaaaatgtatgggaatgtttagagagattaggaaaagtcttattattcttctttttattgggaggaaaccattaccttatacacttttggcaaggatacatgtaaactcgattcatgtatatatgtagatccatgtgaataacaatggattatctccttgataaaacactaacttacacattatatttataatattaattaagatccaaaaagacccaggttcggccatgaaaaatactattagtccatgtaagttacgtatatatactttaacacaattttataggtatcgaacaaaatgtgtatagtttcgtggggaaaacaaaatgatatataaaaaatagcttaaccaaaggctattgatgagattcgatgctcttgtttttattaatctaagaacgagagtgtagagatacactaagaattcaattgtgattctttaacaaacaaaaaaaaagaattcaattgtgattgtagaaacaacatctttgatttgatcgaatcatattctttttctcttctcaaaatctatttcatattcctttgttttgtttagtttatacatattccatcaattaaaaaagaaaagaattatcgtttttacgttagtttttttttgttttcttacgcattataggcagactgattatagttgcaccggcctatatatgtcccatattctccgtctacccatttgaggatgttttatttagtctcatatatataggaacttgtcgtcggataaagagatgaatacatctgaattacccgtttagatactgcattcagataaccttgacaatgttttgctcatccttgatatcttgtgtttagcttcttactttttcctgaaagctctttctttaattacttacttcgatactctattgcataatccaatcctctgaaaccctctttattgttcagatagccaactagttgcccaatttggtgccttgatagtatatggattaaagtctatgataactccgagtacactatcacttgataattatattgcatcgcatacatgtactttattattattccatctcttcaacaaagaatatcattttttaaagttaatttttgttttctgttgtcacttgttagttgttagtttgttactccccaattacttcattaacccgttcactataatgggaaaaaaaaaaagagttattactaatgggcctttacggtagcccattagaggagctcaactttcactttcggcctattaaaccaaactgacaataacgtctccaacgtgtcaaaactatatgactttggtccgaaagactctcaccaacgcccaattataaagtgtttttggacataaaaggtctcagtcaagtaaacgtctttcacgcacctacgcaaaaaacccatttcatcgaaatttccacttgacgttaatcccaactaccaccaattcaatccatttctcaaactctcttatcatctctaacacacccaccctacctacctccatctctctctctgcaacagagcacaaaaatg

SEQ ID NO: 21371 - DNA, 3003 bp, Unknown; identical to SEQ ID NO: 21370
  misc_feature (1)..( 3003): 2750-1469P.txt file - cDNA_ID_1988779; gDNA_ID_1971786; Annot_ID_175484

SEQ ID NO: 21372 - DNA, 3000 bp, Unknown; identical to SEQ ID NO: 6803
  misc_feature (1)..( 3000): 2750-1469P.txt file - cDNA_ID_1988780; gDNA_ID_1621106; Annot_ID_55980

SEQ ID NO: 21373 - DNA, 3000 bp, Unknown; identical to SEQ ID NO: 6803
  misc_feature (1)..( 3000): 2750-1469P.txt file - cDNA_ID_1988780; gDNA_ID_1621106; Annot_ID_171584

SEQ ID NO: 21374 - DNA, 3000 bp, Unknown; identical to SEQ ID NO: 8677
  misc_feature (1)..( 3000): 2750-1469P.txt file - cDNA_ID_1988781; gDNA_ID_1971851; Annot_ID_58399

SEQ ID NO: 21375 - DNA, 3000 bp, Unknown; identical to SEQ ID NO: 8677
  misc_feature (1)..( 3000): 2750-1469P.txt file - cDNA_ID_1988781; gDNA_ID_1971851; Annot_ID_176377

SEQ ID NO: 21376 - DNA, 3000 bp, Unknown; identical to SEQ ID NO: 8677
  misc_feature (1)..( 3000): 2750-1469P.txt file - cDNA_ID_1988781; gDNA_ID_2926179; Annot_ID_140485

SEQ ID NO: 21377 - DNA, 3000 bp, Unknown; identical to SEQ ID NO: 8677
  misc_feature (1)..( 3000): 2750-1469P.txt file - cDNA_ID_1988781; gDNA_ID_2926179; Annot_ID_200097

SEQ ID NO: 21378 - DNA, 3003 bp, Unknown
  misc_feature (1)..( 3003): 2750-1469P.txt file - cDNA_ID_1988785; gDNA_ID_1620835; Annot_ID_57971
gtttttaagtcatccgatccctttcataaatatcagcaagttttgacgtatgacaattttttattgttcatgtaattacaaacaattaaagtgggatcgttttaccaaattttgtttttactaaaacgtgtatgctgacagaaaatctgtcaatgtaatacttgtattcgaataattaaactactaaaacgtgtacattgaaagagaatatgttttactttcatgctggtatccaataatctctatggtaattggtcggtaattttagtaagtttttaacgtgtggaactaatttaacatttcttcctttggttttagaagtaaagcatgaattataagttaaagatataggcgttttgcgactcaacaagtaatcacccactcacagcattagtaacaaactctgagattcttctctataaatatcacttgtgtgtgttcaagttaaagaagaagaaaatggagaataagaaagaaaagaaaagaaaaagaaaaatggagaattcaagttccgaaacacttcatgttgaagatttacaaacggagataatgtcatggctgcctctgaaaagcttgttgagattcgtcatcgtctcaaagaaatgggcatctattatccgtggagaacaattcaaagctctttacttgcgtcgatcgatgacaaggcctcggctgatgttcatggtccgacgaattgcaaccctaccacccgaacctgagatggtgtggtttcagtctttttgtaaagaggaaagatgtattcccggccaactcgaagttgagttcttgtttcactctgtttatcaagaaaagataccgtatttttcatctggtcaacagcagttgcgtgttcctcctaatacaaactatacgtctgtttctcaacccatcggaggtttgatctgtcttcagtcagaaactaagtttgcgctttgcaatccgggtacgaaaaagtctcgggctttacctgatatccaagcacatgaaaaagcttttataacaagttttttaggatacgatgaagctacgaacgtattcaaggtgttatgtttgacgatggtatgggcccatgaaccatcaaaacgagtttatgagtatcaagtcttgacggtggaatccggtgtagagtcttgttcttggagagggatcacatgtaaggagaaggatcacacaccagaaactcaaggactatgtaaaggaggggttttgtactatggagctcggtccactagtgaccatcgacctctggtaatgagctttaatgtgaggtctcaagagtttaccgccattgaacttcctgatcaactacatattagttatttttggaattttgtgatttacaatggggatattgccttagtgaacgaatctgactttgaccctagagttgtgaatgaaccgaatgggaataaagtttttcacatatgggttagggatgcaactgcacaagaatggcagagaacccgcatcgagattcctcgttgggaacaaaatgttggacatgtggactatgttttcagaggtaccactggaacaaaagaacttgttttcgcccaagactctcgccattgcgaagatgatttctttgtgttgtattacgatacattcacaaaagatctcagaagatttcagattggagtgactggccctaaaatttctgttcgaacctgcttggatcatgttgatagcctttggcttatgtgaagaccaagatctcagtctctcttcttgatttatgctaaatattaatgttgtctctatagtagtaatatcttattttagttttcatttcattaatctttatttatgctaaataataatgttgtttctcaagtagtgctatcttattgccattgggatggtttgttttcatttctactgtcgtttatctttatttatgctaaaataataatatgtttgttctattcagattataacttcaataacatttctaatttctatatatatatactcactatttctcaagctctgagagccttttcatgaaaccaagggggttccattccaaaaataaaaaagaattgagtacagaacaacgttgtaagatatgcaagaataaagcatggaagcaaatattagccagaaagatcaacccagagtcgagatgaaaaaaatgttccaagtaagaaatcaaacattcatatataatacttgttcagataatcaatagaaacaatggtaagaaaaagtaccatataaagtctctcaatcttcgctataacagagttaagacgattaggatgaggtttaattcaccatttcattctctgtttgtgccccctgcatttgatatatagcaaaatcattagacaatgataaatatccacattgaaatcactatacagctttagttttgtttcagtttcaagagttagtttattgaaaccctagctccaaactcaatgtcaagaaataaattttccaatttcagctctcggaatgatacaatacaaaaattgttctaacagagacagagaaatgaatacgtgagaatatgcatgtagcagctaagaactcaccgcaccggtgcaaggcgaaactcgaggttaggaagccgaaacgaacaagccgccgttttccttgctagcctcatccataagcttcttccatgatacgagcgtggtggtctcctattggagaagttcgactttaagtactttccgatcaccggcagtcaatatctctgacgagattttacacgattcgccgaaagttggaccgtcatcggttgggaccgggtcagagttagactctgtagagacccgaatcggagaggaagtgaaggcccatgaataagcccatacaattacaattccaaggaaaagaagtatacaaagacacgttttggagctgcgtaaactgtccccataatcctttgccatcaacaacttcgattccggggactacaagcctctgtcttctctctcgtttagggttttattccaaaattccgtgcttcgatcccgaagatcagaaaaaatg

SEQ ID NO: 21379 - DNA, 3000 bp, Unknown; identical to SEQ ID NO: 5975
  misc_feature (1)..( 3000): 2750-1469P.txt file - cDNA_ID_1988786; gDNA_ID_1620834; Annot_ID_57921

SEQ ID NO: 21380 - DNA, 3003 bp, Unknown
  misc_feature (1)..( 3003): 2750-1469P.txt file - cDNA_ID_1988786; gDNA_ID_2684203; Annot_ID_191281
agcgatctggttcgtgactttatgaacgaggaatattctcaagaggtaaggctctcttctctataatctgttccctttaaccccctcataagctatatttttaagttgtgacttgattgattctcattttgcacgtaggctccatttcgacttgtttgtataacgaaatactcaattgcttctaccaacaatatgcgaacctcatggagggaacctatgaggatcaaactacctaagattaaagctgcccccaagcttgtgggattctttgtccaaatcatggttgtttgcgaaaagcccttccatctacagtttccagcgttttcttataattgggactgtgaaggtagcaggttatatcggattaacctcaaaccaaatctctatcaatcatcagagatgatggaggacaacaataatagaccatataaatggcatcacctggtcattgtccaaatcccaactggcatcatcagcgcagaaattgatgaggtgcaattcgaatcccatatccaagttccggagccgggcgacgagataattttgtgtggagttgaacacgttgggttcgttttaaagtagctggtgcggagatcaattcttaagatgatgatggatctgcagatttctaaacacaaggatttgtaccaattttcgttttggaactaaataaattactacccatgtaacctcgtgtcggtttgcttttataatcggtttggtatttttcggtttaattgtgacttgattttatttttttccttttaagagaaccaattttttctttctgctttgtactcgatgtctgccctttttgctcaacaagctttaccagattgtattctggtatttcatcaggctagaaatggagaaagaaaagttggagctgccaaacccacaggagttgtgttctcactggaaatgttacattaaatatcattgcaaaacaactactaatacattgaatctcctttgattttggtccaaagaaaggtgaataacttttgattttggtgcatatgggatgatgacggactgatgagtacccaatatccagtgcccacgtgtcctaattcttatggatcaatcaagggcttaaaagcccataaacattaaacagagggaataaaggaatgctaaaaactaattaagaaaacatcaagtaacaattattatgttttggttgttacttgttacttccaaggataaaggagggattcctatgcttgacttgcactagagctttatttcattgcaaaaaaggttaggtacttgattaagaacccaacctaagttttagtattatacaatcctttttcccatctcattttacatgcttacactttcattaaactattatactcaaggaaactggttgcaggtctataacttgtaaattaaaactgttcgtgttatttattcccatgataaaattgtaagagcgtgtgaatcacgagcttaggagagcgtgtgaatcacgagcttaggagagcgtgtgacatcaatatggggaggggcggctaaagactaacgagtaaaggcataagggggaaattaaggactgttcagagttcagaaatgtttttagtctggaaacgacaatacactttggacaaaaagctaaataacattttaaaagcttcatacaaattaaaaatataatcaaacaaaagctaacgtggccaagatagctaattacttttttggaatcattattagagataatggaaattaagaaatcatacagccaaaacaaaccgtagttattatattcgtaacaaaagatgggggaaaagttaatataaaacaaaccttatactagtatatataatacatggctcataatacattactgctaaatgagcaaaaacaaataaaggtaaagttcttaacggctttgtagagataggaatcattaattttagagaaaaaaaaatcttgaattgtacgtttacctttccagaattacattatttgttggcttttaattgttaatcatttttgttgtgtttttcctccaaattataaaatttaaaaactgtgtcagggaatttaggaatctaatatagttggacgatttcgtattaataaagattttcaaaaaaagagtctgctctaatcgttatttgggggtaaattgattctataaggtagggttagccagagagccttattctgtgttttgggttaaagtgagaccaaataaattaagatatttaaaatgaataattaagagcacttaagacaataattaacccagaaggagaagctggtgtagtggtggttctcatggcgatgttggtttcccaggaaaggtaaaagagacggagacgaaccaaaacaaggaagaaagaagaagatcttacatacgaagatcactctctgattcactctgagagacaaactggtttactttggttctgtttgacaaaaggagacatgcaaaaataaatctctatcccttgtttttcttcttcgcttcatcgattactcaaagaggtttctttctctatctcttatctatttctttctgcatctgtagtctctttgttcgaaaaaaagatgtttaatttctgtcaaatttttctccttttttctttgttcgattattggtgtatctgtcttgtggcgtgcgattgatgtttactgattctgaaaaattcttgctaaaataattcatcttcaagtcaacgactttttgcccaaaagtgatgacgggaacaagaaatttttcttggtcggaaaattactaattttagccaatcgtagcgatctctgcaatcgtgttttggttacccaagatagtacgatcgaatcagttcgtttagagaattaaaaaattactcaaatttagaaacttccaacttctgtttctttctattctgggttttttcacccacttggattattagctttaaaaatctaatctttgagtcatttttgattgttatttaggttgttggttgtgagaataattagcttgttaaggaagacgttatgatg

SEQ ID NO: 21381 - DNA, 3000 bp, Unknown; identical to SEQ ID NO: 5967
  misc_feature (1)..( 3000): 2750-1469P.txt file - cDNA_ID_1988786; gDNA_ID_1620834; Annot_ID_169781

SEQ ID NO: 21382 - DNA, 3000 bp, Unknown; identical to SEQ ID NO: 8953
  misc_feature (1)..( 3000): 2750-1469P.txt file - cDNA_ID_1988787; gDNA_ID_1971948; Annot_ID_58598

SEQ ID NO: 21383 - DNA, 3000 bp, Unknown; identical to SEQ ID NO: 9037
  misc_feature (1)..( 3000): 2750-1469P.txt file - cDNA_ID_1988791; gDNA_ID_1971974; Annot_ID_58698

SEQ ID NO: 21384 - DNA, 3000 bp, Unknown; identical to SEQ ID NO: 9037
  misc_feature (1)..( 3000): 2750-1469P.txt file - cDNA_ID_1988791; gDNA_ID_1971974; Annot_ID_177549

SEQ ID NO: 21385 - DNA, 3003 bp, Unknown
  misc_feature (1)..( 3003): 2750-1469P.txt file - cDNA_ID_1988821; gDNA_ID_1620834; Annot_ID_57941
gcataaaatagagcccaaaaacctgcaatgccgaaaatttccatagcaatgattagaaaagagaaacagtgactctgcaaaacaatgcttttcttactttgtaaatcaagctgttagctcggtattccacactctcgttgatttctcggtttatcagcttgacagatactttccctcctagccgagtgaggtactgaatgattagaaggtagatagctgtcaatacgtacctgagaccatcatagaaaattgtcatgattgtaacaaagttgctaacacatgggactggtaaagcttgtaaacaaaaaaatgagtaagctctcacttgattatatcagatgtgataatctcgaaaatatgagcatacgcgagctcaaatggaagttggaggcagataatgctcatgataacaagaacatcattcctaaacctcttgcgataagcaaaccattcatatctctggtaggcttccttctctttggctctctcatttccgagattcttaataagctcctttggaaaaggaagggaactccattccattccgagaaatctatatccttggctggggccaactaaacaatttatctgccatctattgatagagaattgacacaaaaaaaagaaatcagaaaatagaaaacaaatctaaaattgttgcagaattatgcatcagtgtaggagtttcctacctggctaacaaggccgcatttttacgtttccagaactgaagaaacaaggcagcccagagtattgtgcccacaaagaaacttgggagagcaagaaactgcaaggatctgatcaaagagatagaaaacaacgcatgatggatgtgccggcatgtctattagtatttacttaagaccttgtaacagagttaagaacttacccaaaatcaaccatctgcactataaacccaagtaaggctggaaatatcaaccattgcgtatacattcccaagaacgaaaagtagactccaatctgtgatttttctatgttatgagtttcatatcaacacctttctgctacataaatcatattaatatttataagtgtctacctttgcaccaaagtaagagtagatctgatcaattggttggtttgtgcagttccaccaatttaatgcccaattttggagaagttcctttctcttgagttcatctacaaccaaatgtttttgtgagaattcttaaccatctagagtctagactccttgtaacccaacagatataacagagtagcttaccatgaagaggaaacatttgtttaatgacgccctctgattccaaccttcgaagtaatgattcccctgctgtccaacaaaactctctgccgtcaagtttcagagtgacatcgtgtccaccagagtttacctgtaactcaagagttcatttgctatgtcataaatcaagtacactgtaaactgacacactaacgcaatcaaaattgagttaatagttaaattcacgataaagacagatgttttagagagatggaacttacaattccataaataagatgttgatagcaccgaaaacgttcaaaccagctgaataataacccatcaggttgccgaatgaaagcctcagacccttgcatctcaaagggaagatcaattcctgaagtgagagataaccatcaaacttaagacaaacacaaaatgaggaaatatctgcgatacgagtaaacagtagtatttaccgagacgagtaggtttgcgtatatgaagctctgcagctgcattgcccaagatctccgaaggagctgctacctaaagagatacttgaattgctgttatctcaaacatcactctcataatagcaaaacactcttcaaacgtcaaagtattttacagatttaaagctaaataaggaaagaaacttcactagatacttcgtttaaagttcccaatttgttgaatcctagacataatatagcaagttttatcaaacaaaactcaattctacttgactttcagataagtaattttgtatgaaaaatcaaagactttcacacctgaaaacccctatttggtcacaaaattacaagtaaattgggcaaagaaagaccgaccttgagaaactcatgagcaagaccgacgactctatcaacaaccatccctttcttccttagctcagtcaccaaaacctcaacacagtctccttcttcttcttccagaaccctcttaggaaccaccattgcaacctcgtgaacaactcgctcctccccattactcccattcatttccaaaaaccctatcacacaagcagaattttgagatttcttctcagtagctggaaagcttcctttttctaagatctgactcaaaatgcccaaatgtgtattcaccaaagaatccacctttattcactttttttcctctgaactacttttctcctctgtaattaatctaattttccggtttctgggccacaaaaggggatcagggttttaagtcagaacactgcaaaaatcaagaattcgattccaacattccacgaaaaggacctaatttactacgtatctctcacgaatttgaatcttccattacttcaaaaaaacgtttctgggaaatggaagagacaagacaaaagcatttggggtttgaatttgaaacttagattgaattttggaaagaaattacatgcaaaacaatccaaaatactttaattttgctatgagttggcacgcagatgatgattgatccatcgtgtaaaaaagagtgacacatcggacggtgctgagtcacttttgacacgcgtgccttgtgtgtgtgactgtttattatcaccatgatatataaatcaaaccgggtaatgaccgacatttcgattgaaccggtcaattccgattttgacttagcttccttcctcccctcttcttcaaacatcaacgcgtcgagatattttccccaaatacagagaaaccctaaagtctctgtttttgagaatttttctaccgatagatccaagcgaattgatctagaggaattgatccaacatg

SEQ ID NO: 21386 - DNA, 3003 bp, Unknown; identical to SEQ ID NO: 21385
  misc_feature (1)..( 3003): 2750-1469P.txt file - cDNA_ID_1988821; gDNA_ID_1620834; Annot_ID_169804

SEQ ID NO: 21387 - DNA, 3003 bp, Unknown
  misc_feature (1)..( 3003): 2750-1469P.txt file - cDNA_ID_1988832; gDNA_ID_1620812; Annot_ID_57883
ccggtttcgatcttaagttgtggtaacgattgaatcgcattgcagaatcttgaactggacgatgcatatggttagttgcttcagtgaaggttgacttcaatgatattttggaaagtcgtcgtgagaaagttgattatattgatcgggtcttcttaaaaaaagaaagaataaacctcataaggtcctttaggtagttagctgaaatgtgattttctttatttaatatagcgaaaatgatagttttaggtcataactttgaaaatataatatagaaatcttgactaaaaaatattataagtacgtgtaaaactcgtaaaagactcacacaattagagtaaactattaggacaagttaagaaacaaagtctaaaacaatctgaaacgtaacatgctacaaaacgatagaaaatatgatgtctttcttgtgacaatagaaaagatgacgtcaaattttcctttcgtttttttattgttagcccgttccgttataaagagtggaggatatatttgtctctagcccattggacaaaacgttcattgagaaaaataccatataagatacattttttatggattatatggaaattaagatgcatgaaaaggaaattaagatgcctcacattatttccaccatctagtcatttatgtcgtcttagattcttttataaatcatattcatatgtgactaacacgtcttcacattctcatttgatcatgttgcttaaaacaaatatctcatcaaccacataagcaataaatgtttttagtttttgtttgattcagttcattaatatataattacatgtccatcttaagcgttccgttaattatcacatttttaaactctatgtgattagttgcagtttgcaacttggtttgtcaattaacaataatgtataatttacatatctgttttttttgcgattttttttttttttacatatatgtatgcctcagcatgcattgttatttgttgactctttgaacttaagttgtgtccaattgtgtcagtcataaatatgaacacgtgttaaatattatagagaaagatttgagtttttacaatcttataatccactctccatagtttatatatgtacatgcacgatcagttttaactaataatcataaacatatatgtacatgtacaatcaatctcatatgcaatcaaagtaaatataaattaaaaaaaatgtatatatggatctcgtttagtttaaattctaaacgtatattgtcgaaggagaaaaactataattttgtttgtgtatattgattgattcttcagtaatttcttcaactattctgatatatatatatatatatatatatatatatatctacttgcaatcatagtttaaagatgttatttctgttagatgtttaatcttgtttttttctgtcagtagtctttaatcacgtgccaagtaagcaaaacactctcattattttaaagaatgttgattaaataaacattcgatgggcgatgtctattggaaactggaaagtcagctaaatacaacaattttccacttaacattctaattatctaactattaattattaatcattgctgcatgcctctgttcaactgtacaggctgttttcgaatattttgtagagtacaacttatcaaaaaatcccaaactcttttatctgacaataatattttaagatataagaaatagtcatagtatcatatttttcaaactatacaatttttataatttcattaaaaggcaaaataaaaaccaggttacgtaattaatttaatagtcaaatgtttgctacaataatatatttacaattctagttacatctaagtgtaataaaattacaattccattatagatagtataatggatgataaaacttttgtacagttgatagtaagaaaatttaataaaatataggatatttaccagaaaaaaaaaaccaaaaaaaaaaaacacgttaatgggtaaacttcgaaactgaaatttttgtagaaaaaaacaatcacatcatcaatgtatctttcaaaataatgttttgacaacttatcagtcacttttaattgggtgtgttagaaatagaggtacagtttaaagtttttattaggttttgggtggtaaggtgtgttagaaatcagtttattttttaatcagtcattggtggtggtggaaaatatcattttcaaatttcaagtagcaattatgggtgaaatttcttgtataaatttcaagtagcaattaatatatctttttttatatatagaaaatttacattttggtaaaaatttaaattaaaaaaaggagcatggttatatcttgaatcttggtatctacgagcatattatttagatataacaaacaagttgggaatagacaaaacaaaatgacgaactttccaacgaaagatcccattatagtaatgttattcttatttatacttatacaatctctagtggcttccaaagtacacaaaatgggagtattataccaacaaaaataaacgactaatgaatcaaaaaattcaaaatttgctttattttattctgaaaatctaacgagctgaaaccaaaatgttatagatttaaaatagaaacaaaacaccgatgattgacccaataaaaagcaaaataaagtagaccaaaaagaataatggttatgctgataattgaggagtcgtcgtcactcgtcacatgagaggaacaacaagaaaagtcaaaacgttgaagctttctcgaataacgccttctttagtttacagtctctcgttgcgggtcttatcttcttcttcttcttccctctttcgtctgctctatattatgaccagattcaaaattgcgtagcgtactaattcaatatagagagaagttagatcaaaagaagaacacgaaactctgactgtgtctctctttctcttcgtgtgtttctatatttatatataaaaagacaagatctctggtctggaattagaagaatcttatttggggttttttcttaggattaagctctaatg

SEQ ID NO: 21388 - DNA, 3003 bp, Unknown
  misc_feature (1)..( 3003): 2750-1469P.txt file - cDNA_ID_1988834; gDNA_ID_1971948; Annot_ID_58592
gcgccattgggaccgtagtttcttgcaccataatatctctaggtatcttactcccctctccctgtaattgattctgttgaaagcttactcctgattagtaattgtggatcattaatattcttgtgatgtttgaaacaggtgcaattcagttctttaagaaattagacattgggacctttgacttgggcgattttcttggtaatgtgttaaggagtttcttttatcgattttttgttctagaagacttgattttttttttgcttacttaatcagcaatcggcgccatatttgctgcaaccgactctgtatgcacactacaggtaatgtgattcgccaattagcagaagtacatacaggcccagaatcaaagtgtaattaacaaaaactcttgttcctttggtgatacaggttctcaatcaagatgagacacctttgctttacagtcttgtatttggagagggcgttgtgaatgatgccacatctgttgtgctcttcaatgctattcagagttttgacctcacccaccttaaccatgaagcagcttttcaatttcttgggaactttttttatctgtttctcttgagcaccggacttggtgtcgcagtaagtccattttcttctctctactgctctttcgtctggctactacttgcacgttcctctgttaactacaatttttttgttattcatcttgcagactggtctgataagtgcttatgtcatcaagaaactgtattttggaaggtagataattggctttagctcatatgtgactttatctctattagtcttctgttatgtagtctaattgggtatctttcttaggcactcgactgatcgagaagttgccctcatgatgcttatggcttatctttcatatatgcttgctgaggttagttttgtgaaattttataccactgtcataatttaggcatggagacaatcagttgtatcttaagaatcctttattgataatatattgtttgggttgcagctattcgccttgagtggtatcctaactgtatttttctgtgggattgtgatgtcccattacacttggcacaatgtcaccgagagctcaagaattactaccaagtaatatgacctccattttctcttgaaaacaaattcaaatgttttccatcttcaatacttacttactttctatgcatttacgatgagacaggcatgcctttgctactttgtcgtttctcgctgagacttttattttcctctacgttggaatggatgcattggacatagagaaatggagattcgtgagtgacaggtatggtcactcagtagaaacataaactctctttttgttcattggctatatacataatcttcttatgtttccattgtttggttttggacagcccggggacatcagttgcagtgagctcaattctaatgggtctagtcatgcttggaagagcagcttttgtctttcctctttccttcttatcaaacttagccaagaagcatcagagcgagaaaatcagcatcaagcagcaagtacgaacaatctactttgtctattgaattcaaatttgctgaggattgttgatacttactaatcttctctcactttgtctgtaggttgtgatctggtgggctggtctaatgagaggtgctgtatctatggctcttgcctacaataaggtaaattgaaagtttaatggatagtaaacagcgacatggtgattagtaaaaatctagcagataatttaacttctttatttctctgtgctctctaatgcagtttacaagatcagggcacacagaattgcgcgggaatgcaatcatgattaccagtacaataaccgtctgtctttttagcaccatggtaagatatctccctctcaggtttggactactaaatgtattttctctacagagatgttgtcaatgaggataaaccaatgctgagccgtgagacggatttgcattttctatatccggaaaactgttccctcctatttgatttgttattccaatgttttctggatcgctaacactgaaccctgataccggacatttaacatatgtttttttttttccacggctttcaggtgtttggtatgctaaccaaaccactgattagatacctaatgccacaccaaaaagcgaccaccagtaccacgagtatgttatcggacgatagcactccgaaatcaatccacattccgctcctcgatggtgaacagctagattcatttgagttacctgggagccaccaggacgtgccacgaccaaacagccttcgaggtttcctcatgcgccccacacggactgtccactattactggagacagtttgatgatgccttcatgcgtcctgtgtttggtggtcgcggattcgttccctttgtccctggttctccgactgagagaagcagccatgatcttagtaaaccttgaggagaaagatatatagaaacttaaccaaaaaacttcttcttgctcttccctcttatggtgactagtattggtgatgtaaatgtatttttcgttcttcaaatttacatattcttctgtaaatttgttattattcgatgatgaagaagcttcttacgtttttgagagacgtgtgggggttcatgtgtgttactattagtctttgttttgtttaacaaaaaaactaccaagtttttgactatgcatcatggggtttgttgttgttggtcagaacttagaacttgactaactctgcttcggttaggatctgattggtacggtttggttcgattttcgtcaatagaataaaaaactgtatgaatagaataatccggttaaattggcacgtgaaatgcgaaatgggctgagtcattcattatggaaagcccatgtgattggtagggaacgacgtcgggtgaagggaggggaagagcttataaatgaaagcagcaagcagagcagttcacgctctttgtacactccgccctctctccccatctctttcgacagatctcttctctctctcgtgtttcacgaaacaatg

SEQ ID NO: 21389 - DNA, 3003 bp, Unknown; identical to SEQ ID NO: 21388
  misc_feature (1)..( 3003): 2750-1469P.txt file - cDNA_ID_1988834; gDNA_ID_1971948; Annot_ID_177291

SEQ ID NO: 21390 - DNA, 3000 bp, Unknown; identical to SEQ ID NO: 7395
  misc_feature (1)..( 3000): 2750-1469P.txt file - cDNA_ID_1988838; gDNA_ID_1621143; Annot_ID_56686

SEQ ID NO: 21391 - DNA, 3000 bp, Unknown; identical to SEQ ID NO: 7395
  misc_feature (1)..( 3000): 2750-1469P.txt file - cDNA_ID_1988838; gDNA_ID_1621143; Annot_ID_172921

SEQ ID NO: 21392 - DNA, 3 bp, Unknown
  misc_feature (1)..( 3): 2750-1469P.txt file - cDNA_ID_1988848; gDNA_ID_1590644; Annot_ID_149884
aag

SEQ ID NO: 21393 - DNA, 3003 bp, Unknown
  misc_feature (1)..( 3003): 2750-1469P.txt file - cDNA_ID_1988891; gDNA_ID_1620834; Annot_ID_57929
ggcaagcgttggccgctttggcagatatctccggcgattgttcagggtgaaatttcttaacttggtgataaagattgaattgaattttaaccaagtcgccttggtccagtggtaaaaggaagataattcccgccacctggtttgatggtttccccggacactaagattagtcttccggtttaggaaaaaaaatagattgaatttttattgttagatatgatttgaagagatgctaagtttcgattattttttattttttttgtctatgtagggaagatgactcgaagctggtggacgtaatcgctgacaagatatcaaaagagctgatgatagttacaagaataagcaatgggaggaacctagttgggattgataaacacatgaacgaacttaaccgattgatggatttgaattccaacaaaggtaagagaatggttgggatttgggcaagaggaggaagttgtagatcggctctagctaaatatgtttatcagacatcctgtcaacactttgatagccattgttttcttggaaacgtgaaacggatttgtcagggtaactactttgaaagccatctacacaaagagtttctggataatattcaaggagaaaactctagcaaacaaagtctcaagaagcaaaaggttctgcttgtggcagacgacgtcgataagcttgaacagttagatgctcttgcaggggatttcagcggttttggtccggggagtgttgttatcatcactacaaaagataagcagttgttgatttcttatggtatacagcttgtctacgaagctgagtttttgacattccagaaattttgtcgtagcttccgatcattggcctttaaaaagagagacgacatttctgctgcgttcgagtgggctttgtatatataaagcaatgaattttgccacggaatgttttagctctcaaagtagaagatctggttatgagaaagtgttggaatcagtttaataagttagatcccttgagtcatatgcattaagttaactaaacttaataagttgtgtggctttcaaataaggttgttttgtctatttttggagtgggttctcttggggtgtataaaaatgtcactcttcattggattaaataatatacaaattttttttgttataatcaaatttgtgtattttagttataacctaaatgttgtatgtctctttctagacttaagaactaaagtctatgttttccttaaaaacaaagtttgtataatttcttgggattcccatgaccatttgttctttgaatacccgaattctcaaaggcagtttggttgtccctcgcatcacatgttttccatagccctcttctgcacttgctaaagaagttaattggtttggtcttggaagcagaatcttcataacaacacaagacatgcaattgcttatttcatcaatagtggggagcgtctacgaagttgagcttttgagatgttacaaagttcgacagctatttaggttagatgccttcaaacaaagagaggatcatgttggttttgagcagtctacagagtttttaagaatgttagagcaccctaaatgggggtttctaaacaagtttcttaacaaagaataaaaaatttatatgatttaaatattacataagtctcttaaatttgatgaaacttaggcaaattgtctcttagttaagagataattggtcttggtttcaccaaatttaagagacctataattaaaaatattatttatctatacttacactttaattttgtttaagagacttaggcttagagactaccattgaggatgctcttaaacaaccatttttaacatctggatgtactagttgtttgtaatactgttctttccttataagaaataaagaatacaccatttgaaacctgaaagatggccaagcttgaggcctattaaccactccaactagaaccacgtcctccacaacacagacaactctgcggctaaccatactctccaccgcccagacaacgcaaagaaaatgggcttccaatttagttttaatgtttgtgaatgccggatgactatgcagcaaaacatgtcctgattcctctcttagaactcagtagacaactgccacaaagtttcttttagaccaggagaagccaatattacactgagccctttgacttgtaccagaaaacacataagtgacataaccagtagggctagtccctgtttcaagagaatttctttcagactacacttcctacgcagcaaaccaatcatccacatcctctctcactttctttatggtttccaaagcagagaatgtttttccttcaaaaaacatgaggtttctatttttccaaattctccaaataatccatgggaaggggcatgataatgtgacatgcctcaaatttgtctagagaaaatagactctccatcaagaccacaagttggcatctgcagtccattttcacacccctatgcgtcagaagatccataacatgtacaactccacttagaatcttccaaagaaaaacattaatttttggttttagtcttgagcttccaaacttaatgttttaactcgttggttgaaagttgcacatttgcttaatcatccttatcaattagcctttctcgtccgtcaattgacttagttctaaccattcgtttgatcgataatcaaacaaacatttgaatcttcttcaaccaattaaattagactacgagtaactaaatgccaatacacgagaaaagtaagaggagaatttgtgttcgttaatatgttatccatactcattatcttactttggcggcccatctattctcttccctctttctgagtagtttagtgaaacagaagctgacaagaaaaaatagaaaatgccaggaaacacacagttagcagtaggaagactctttgttctaggatgactcttataggtcaactcctgtagtggtagtgcctataaatatccttgagttctttatttctatcactcattgagaatcaaaaatcaaaatg

SEQ ID NO: 21394 - DNA, 3003 bp, Unknown; identical to SEQ ID NO: 21393
  misc_feature (1)..( 3003): 2750-1469P.txt file - cDNA_ID_1988891; gDNA_ID_1620834; Annot_ID_169792

SEQ ID NO: 21395 - DNA, 3000 bp, Unknown; identical to SEQ ID NO: 6892
  misc_feature (1)..( 3000): 2750-1469P.txt file - cDNA_ID_1988895; gDNA_ID_1621111; Annot_ID_56091

SEQ ID NO: 21396 - DNA, 3003 bp, Unknown
  misc_feature (1)..( 3003): 2750-1469P.txt file - cDNA_ID_1989201; gDNA_ID_1971867; Annot_ID_58437
taatgttgatattcagatggatataggtgttttagatggttgtctttgcttgatgtgtaactatgatcagagttatgttgatgtttggatgatgaaagaatacaatgtgagggattcttggactaaggtttttacggttcagaaaccgaaaagtgtgaagtcgttttcgtatatgagacctttggtttattctaaggataagaaaaaggttcttttggagcttaataatacaaagctagtctggtttgatttagagagtaagaagatgagtactcttaggattaaggattgccctagctcgtatagtgcggaactcgttgtgagtagccttgtcttggggtgtaaaggagatcttaataacattaagtatcgaaaagaacaacaagctaaagaagctagagaagctaaaattatgcagaacactaaaaggaggtgtgatttttttgttcttctctaagtccaatttactttaatatcattttcattcgtttttgtatcgatatgttcagtatctcgtttgtttttattctcagggatgatttcctgtccaaaggattcaagctggtcttataagccaaaaacaagagacaggagctaaagctgcacaaggtaagtgaaaaagttgaccgttcttaatgggtctagtttgctgctgcattcttattgcatttcattcttttctgtctctgctctgttttgtcgcggacgttcatatccggtgtctgttttgtggcggacgagcaattttcatattcgggttgggacaagagtgaaagtcacagtatgtcataggtattgagtgcttagaagttagaacattccctagaaaatgttatggagtcatcatcaggataattactttagcatatgaccatattcaagtgtggttttttcacatcaatctatctgcaaaacaatcattgggtatgattttttcagggaggagaaacgagaaggggaacaaacaataacttcaaccaaaaagctctaatataccaaaggagaataatatacaacttacctacgtatatgtgcttatagaagagaggacaaatgtttttggtttgtaaataactctttttaagtttgatatatataacttactagtactaacgctttgtatacttgcttttttaagtttctgcataatatgagatgttaaataaattaaaatttgtcatatttaacaagagctggttctattacagtaaaacctatataaattaatattaaattaataatttgtataaattaataaattcttccgtctccgagttgggagtaattgatacaaatcactaaatcaatatgataataatttttttaaaaatcttatataaatatatggtctcatcaataatataaattaataattgtataaatttactaatatatattataaatatcatatgtaaaatatgactcttgtaatatttttcttcagtttttattaattttttgtagtgttcaattataatatttaacaaaatgaatttttttttttattgtaattggtttcagaaatactattgattataaaaaaaaattacattttatatcgattttgtgtaaaaatttacgaaatttgtacaattttattaaattttcgataaattaatatctttttaaattaataaatttttttggttctaatattattaatatatagaggttttactgtaatactttgctatcttttcatttatttattaatattattaaatcatcgacatgagctaacgtttttctacaataacttttgagatcactaagtagaaagttgaatctttcatcgacaattttataagtagtcaataagaaactttctacagcttgcttattaccctcgtcgaaatattgtgtttcgtgagcaatcctattattggtcaaactaaactattttgctcaaaattcttcatatggataactacaaaaatccaagttttccatttagattttactaatcggcgctatcgtaagtgtagtcgtcattgcctatttctcgagtttttaatagtctaaatcgtgataccatttcgactaaccaaacaaaacttagtaaaaaatttggtgtgtaacgaatccaaaatatcaagtttacgttttgtcacgattcctttaccaccaagttgccaatgtttggttacatttaccaaagatctaaatagtaaccaagaagtctcactgaatttatagagatttttggctgaatctacttaattgacctagtgctctgctctacttctacaaagacagatgggcctgatatgatcgctggtggactcaggtgtgacgagcccaactccggaaaggagtataaaatagaacgattcgtattattgatgctatcattaagaccaaaataaaaaaaaaaggtgaaaaattagcaagtgataaactataaaacacaacgttttctaaatggtaagaatataaactttttatagaaattaagaaatttaataaaaaatttataggaaataagaaatctacataagaacacagacaactttttggcttttttgtaatgtttttctaggtaataaatttcataatcttccaaaaataattaatcaaaagatttgactaggcgattaacccaaagcttcaaaagaaaaagtaaaaaaaatccttaatttgtttctttatcggattcaacaatttgaaaccataaatgacatattctaattaattcagagatatttttacactaattttatagaaattcattaatctaatcacaaattaataaaataaagaggtgtgaaacgtttaacaatggcatagagagcgagagagagagagaggaaaactgtgttaaacccagacgaaaccttcgatcttcttctcctctctcaatctcttcaccttccttcctccttcttcctcacctctatactccgttacggttaattttccggccatcgaatgttggataaggttttcgcgaaagccgatagagaaagatagagacagagagagagagattctcgtcgctaaatg

SEQ ID NO: 21397 - DNA, 3003 bp, Unknown; identical to SEQ ID NO: 21396
  misc_feature (1)..( 3003): 2750-1469P.txt file - cDNA_ID_1989201; gDNA_ID_1971867; Annot_ID_176502

SEQ ID NO: 21398 - DNA, 3003 bp, Unknown; identical to SEQ ID NO: 21396
  misc_feature (1)..( 3003): 2750-1469P.txt file - cDNA_ID_1989201; gDNA_ID_2926155; Annot_ID_139484

SEQ ID NO: 21399 - DNA, 3003 bp, Unknown; identical to SEQ ID NO: 21396
  misc_feature (1)..( 3003): 2750-1469P.txt file - cDNA_ID_1989201; gDNA_ID_2926155; Annot_ID_198350

SEQ ID NO: 21400 - DNA, 3003 bp, Unknown
  misc_feature (1)..( 3003): 2750-1469P.txt file - cDNA_ID_1989202; gDNA_ID_1971868; Annot_ID_58449
ccatgcttagtagagagatcattgattgttttaggtaacagtctttagagtaaagagtcttgttttcacaatgttcaatgcttattctattcatagagcaataatcgtcattgcaaactctgtttgattgattgtgtagggtgcatggcagctttggatgcagagcattacttacaagagattggatctcagcaaggtaagagtgattgaggaaattgttggaaggctcaggtcattgagttattgttgattgatccctgattcagttagacattgatggaccagaatgagacttgatctttatcatagaacaagttaagatacattgatttgtttattccttaatattgcagttggaattgagtacgggtattgttcaaagttgtagctctaatggtaaaactagctacgacaaaagtcctcttaaaatatgagttttagatgatgccttaacatttcatatattcagtgaacatgatttatccaataatgtattatgtattcttataaattagtataatataaaaatgggtttccagaaatctttaagacatttctgatcttgaagccgagtcatttccagagcttctagaggcttttgaaatgatcacagatttttcagaggaaacggctttggtgaagctttaacactttgatgtcaagaaagagagaaatgacggcttggaagggtcttcaaccgatgacgtcgttcactcctacatggttgaaatattcaaaagagttcataaaatccttcccaaaagtagtcccgattattcttctaaccattcttaaaattcgaaacgatgaatgtgattcttaaatgtggatttttctcaaaattatgtagtcaacaagattgaactatgccttaaataaaaaaagctgtttgattaaaaggttgaattaaatctctactttataataaataaataaaagttcctgcattttatctttgttgttttttctttttgtttgacttgatttagaaatattaaacttttctaatcaacgatataggtttaaagagtttttaaagttagttataaagtgtattttcccgaaatgtattgtgaaataggacttctaaaaaaattgaggttcatacatttttaaagtaaagtttgtgcttatagtagaaatttggaataatgatcaaattcctcgataatagtatgtagcattcttgtaatgcttgaaattgcaatgtgttgcgaccactgaaaagtgcaatggatatatttctgttttatcttattttattggaatttcctataagattttaatcagttatatcaaaacaaattataattatagccagtatagatccgacgttggtgtgtcaagccacttaaaagatgatggaaatggatcagatttactgaataactgacacacgaaattcctaaataattgttttctgtagaagaatatgtacaactagaagataatatatgattaattattcagattttatcttaactttttgttgtaaacgtaagtttttatttggaatggtcatactacaaataatcttcaagcattttataaagagtaaatttaaatatcttcgacacaaaaataaaatatatattacaaaggaaaaaggtaaaagaaaaatatattaaaaattaaatttagtactacattaatgtaagtattaaaaaaaaaaaaaaaattggttcaaaatactaaacaattttagatgagaaattcatccaagaaaattctcaagtaaaagtttttgtttttacttaaaagtttaaaaatctcttcataccaaaaaaaaaaaaaaaaaaagtttaaaaatcttccagatatgcaaatgcatatgcaagtgggggccatgaatgtgacagctggatacaggttaaaggacaacacatcatcgaccacatccccgacacgtgtcccatctcacacatggcgttttcctctctctttcaccatttttttaatttcgcgtctccgtttttacatctttttttttggctaaattgttttctttttcttattattcatttctatatattatattgaaaataatttgattattagtagtactgtagtattattatttcatacaaagtatatatatatatatggcaaaaaatagttgtttaatgcttgtttttttcttcacaaaaattcaccttctacttctccttcttaggacataatgggcctattgatttatctttgttaatccctataacattccaacttccaagtgtaatgcttattttccatataagaataacaaagcttaaaaataaaaaaaaattaacggtcacaacacaaacactattttaacttataaaatggaaataggcaattaggcattgatctccgcagaatctattgcactagcttgcactatgtttattcactttaatctcaccctttttgtcttctcgaaaatcagttgataatatccataaatacggtcaaaatacgtagaaaatacgataaggagagtgtaatagtatagggagaaaatgggaataacgtgatatacatatccacagataagcaataggtcaccatcccacggttcacgttatttccgtcggtttttaaaatcaaaaaatttcctctactgataatgttaattaagaaattaaaattatgtcttcaacttttaataaaacaattaatgaaaaactatcattattgtagtttcattagtgacaaatgacaatattaaaaaaaattaagaaaagtaagcaattattagttgaagaactgaagaagcagaagaagaagaagcagaagaagaagaagagaaaattttgacagagataatacacagatagagagaagagacagagacagagagtgatggaaacagctgtatttattatgagacgaaacaagaacctctgggtttctacttaaactcttctctctttcctctctcactttaaaaatccacactttagagcacacaatacaaaaaataagggtttctttatcttttcgtttcttccaaattttgtaatg

SEQ ID NO: 21401 - DNA, 3003 bp, Unknown; identical to SEQ ID NO: 21400
  misc_feature (1)..( 3003): 2750-1469P.txt file - cDNA_ID_1989202; gDNA_ID_2926209; Annot_ID_141895

SEQ ID NO: 21402 - DNA, 3000 bp, Unknown; identical to SEQ ID NO: 8721
  misc_feature (1)..( 3000): 2750-1469P.txt file - cDNA_ID_1989203; gDNA_ID_1971868; Annot_ID_58446

SEQ ID NO: 21403 - DNA, 3000 bp, Unknown; identical to SEQ ID NO: 8721
  misc_feature (1)..( 3000): 2750-1469P.txt file - cDNA_ID_1989203; gDNA_ID_2926209; Annot_ID_141892

SEQ ID NO: 21404 - DNA, 228 bp, Unknown; identical to SEQ ID NO: 8782
  misc_feature (1)..( 228): 2750-1469P.txt file - cDNA_ID_1989204; gDNA_ID_1971889; Annot_ID_58485

SEQ ID NO: 21405 - DNA, 3003 bp, Unknown
  misc_feature (1)..( 3003): 2750-1469P.txt file - cDNA_ID_1989204; gDNA_ID_2684256; Annot_ID_193146
acgctcactcactcctcctatgcctccttagacggcgttctctataaccaactcttcctcgaaaaaggaaactatcccaaagtcttgattatctcttgctgtatgatcggggaaagaaaaatgattttcatttacaatgggttgtttccatatcagacatgattttctttcagttgaatataattttgtttagttttaccttaataaaaactacaagaaataaccaaacatcccacgaattggtttaataatttcaaacaaagaaatcaaaaacataccgaaagactctcgagacgattataccccacagaacaccaattagatgagataacctcccaaaagatgactaagccttgcggctaatgttctatgaggtgtatcattgtctcgaaactcttttcgaagggttttgatttctttgcttgaaattgttaaactaataagtgcgtggaatgtatacgtgaaggaatattaacatacttgtgagaaattatcagcatatatgtcaatataaatattatatgctatgagtctatgacaacgaatatatatatatatatatacatggttaattaatatagaagataaatcagaaaatatgataattttctactttttagggtgtttagtatgcattcccacgtgttgaatatgcatgatcaattacaaaataacacgacaagtggaacaattatgtgaatttgaatatagtcatggaagattgtcatttattattgctaatttcttttgaaacatacaataaagcaaaacacctaagttcttttgctaatatttcactttttttctttcttttttcaatataatcaatatttcacttttttttatttattaatggaagattgtcatttattttgcgatttatcatgtaagttcaacatgtgtgaatgcatactaaatcccataaatatatgttttgctatgtttatacattttaattcatggatataagaaaaatgcaatcatatttattatttctgatttgattaaacatgtgtcaatgtactttccataatatctagtggaaattggccaacaacaaaaataaatcttacttacaaaatagattcccacagatgttattttatttaaacaaaatctatgttttaatacatttttatatagatatactggatttatttatatcattttccatatttctagttagtggaatatgaaaataaccatgttatttaattattatcattaaattatttgataatatcattttaattgcttaataatttaaatatattgatttcccttaaatatatccaatcttttgtaagaaaagaaatttaccctgaagtttatcacctaaaatttagcatgcttgtcttttaagggttgtcgaaaacaagtttacatagatcttcaattattaattaaataacataaacttgtgtttgtaaactaaaatttagatctttaagtttctgttatttaattaatatttgaagatctatgtaaaaaaaaaatttccctttagattttttgaaccttgttaaatcaaatcatttataataattatttaatatttcaaaatataataaaaacttataaaaactagttttatacttattatctgtaaaagctagaggaaacgaaggaagaagagaagaatcatgctgagattgtgagtgttatatgttgatttagtattttaatcatacatataaccaaatgttgtattataatataagaaaccaaggtttgaataatattttcgtggtcatgacagccagaagtggagaatgtactcacaattcatgcacttccaaattgcctacactattttcctccttaattttgtgcatatctgtggggatgtcattcgtatccggcctaagttcggtctactctacatcctttttattttaatcgaagtgctactaaaacatctttgtccatccgacaagattctttgcagctttgtcgaatttttaagccattttagtggagctatcactatcgggctggtgagctcatgttgtaatgtcttattttattgtgttggtataccttgggttttgtttgccttcatactctttgaatgtcttgttactgaagactgaagaacctaagacgcatacaggctcttcaagagggaaattttaaaccatttgcttgtgaatcgtgttacatatcttcgtttttagcatattttataagctttatagtttgtctttcttggactaccatggctttcctagtctattatatatctatgtgttatatgaatctcatggtggattgatattattaaatgaataatgttttctgtaagctctttatttcatccaagacatttttcatatctatattgaaactgaaaggcttccaatcgctaaggttttctatgaacgagttatctcccgtttgacaatatgtttcttcttctttgaagtgtcgtttaaaagaatctacaaatcctttatcacttcattaattccaaaagtgtcactgtttttatcgatgtcaatagactgattgctttttgctttcgtattcgttttgccatgagatcaaacaattgtaatttctaactatgaacaaaaaagaaagatattttagggtgcccttcataaatttggaaatagtcttcaccaattgtcctgaacagagagaaatgggtatcaagtcaactctgaacactctatgactaaaagaaaaaatcattcacctcgataccagaaagaagaaaagtcatcgcttttgggaaatttgatgaacaaagaccaaatcttaaaactcgaattcttctggttcctaaaaagtggctgtcaagaagagtgagacatgcatcaaactctctcttctcctgccatggcgtcaaacctccggaaaccctatttcctcaggtacttaactattcttccccaatcgatgatggtcgaaagctgaaacctttttctgcaaatcgattaaccgacaagaaaatccaacccaacccacccactttgttttgtttggatgataaaaatg

SEQ ID NO: 21406 - DNA, 3003 bp, Unknown; identical to SEQ ID NO: 21405
  misc_feature (1)..( 3003): 2750-1469P.txt file - cDNA_ID_1989204; gDNA_ID_2684256; Annot_ID_138118

SEQ ID NO: 21407 - DNA, 228 bp, Unknown; identical to SEQ ID NO: 8782
  misc_feature (1)..( 228): 2750-1469P.txt file - cDNA_ID_1989204; gDNA_ID_1971889; Annot_ID_176839

SEQ ID NO: 21408 - DNA, 3003 bp, Unknown
  misc_feature (1)..( 3003): 2750-1469P.txt file - cDNA_ID_1989205; gDNA_ID_1971889; Annot_ID_58484
atatcatatgcgacaaaaagtaatacgtatgagtttacaaagcaaatttgcttctttttttttaataacttctggttgcaaggtgatatgaaaaccccaagtccgttctggctaaatctaattattaaaatatgattttgtttgtaaaactataacgaatatcattcttctgcagaaatcaattttctttatttttctaacaatataatatcctgtattcatgattaatttcttttaataaaataaaagaaaattgatctctgcagtcaataatttacatagcaatcttgggagatggtcttgttacacagaaaattgattttcaaaaccaatgatttacataacaatcttgttgcagggaaataataagatttgggatcccatgagatttcctctgaatttatctgatattggtgtgctcgtctgtattctctacttccacacttcattctttatcgagatagaagaaatcttaaaattaacaacagaatacaatgtttacatgtggaatacaaaaacaaaagtatgtaaaacctataagagtgttataatgtttagaatccttgtgttagtgcaaacacacgtccctctaaaggtggaggcaatgcagaaaccgcatcttcgatttcctgtgaaaactcgcaaagattaattaccactacaaggtaagagagtaactgatttcctactgcttcataaccaggttggataaagaagacacaccttcactgtataccgagccgaaaagtggattagcaggattgctttgttttcaaacttttcagcatgatttactatctgcagtttaaggatatatgaaatcttctatgaccatcaagagacagaaagtaacaagaggtgtcaaagaaaggaggatcctgacctcagatatatggatatgtccataatctctcgcatgctctaccgataccgaatcatcaagaaatgtgctctgcacaagaggaaatagagacagcttcccttttaatacaaagccatgaaacttggaccgggaagaactatatcattataaatcacgcacattgtccaaattcatatcagtagcagatattcacctccatgacgagaacctttgccttgagagcatcagcattagtttcatcaactacaaaatccgacgttgtatctcccgtaaaagcaacttcaggagttattatgctgtctgtaatctacaatccacaatccaaacttattaaacaggcttatatactttggaaagaccattgcaaaactattgactttgtgatagacaaacataagaaaaaattgacaagcaatattaagcaaatcaaagacaaacctcaacacctgaaaccttcaagttcttaatttcatttccagataggccaatatattccttcttgagtttatatttagttgaatacactacataaccctgcaaaatatcaaacgaaagcatgaattcaacgaagacacataacgctaagatatcgaaaatctcatgcgagtttactaaaataaacctggctttggatgacatggaatgtcttaaaggctttgactttgagatctttccttataataaactcctcccctgcatgaagaagtgtccaaggtttaacaaaaaagccaaatcttggctgcaatgaatgctagaggttgagttaccacctatgtccaagccaacaagattgtgctttagctctgaagaatctaactttctgtgaacttcgaataaactctcaacagtttctttaatggatgcgggtactataatcgttggaggcttcattttgtacaagcctctagtagcaacatacattggtaatccaccctaacataacaatacgaatagtttagctcacaatttgagaatgtaacacccaaacagtaacagagcaataggctaatataacataacaatttagctgacaattagagaatgtaacaccaacacagcaacagagcaatatgctaatgataataaacacatggtggctctcaacaagggtttatcaaaacagtaacagagcaataagctaatgataataaacacatggtggcagtctcaacaaaggcttatcaaaattgttcttaaaacaaaaagtcaaaagaaggatctttgcaaaatataatccgaaatttcaagtctttttatagaagattcaagatacttacgatatgatccatgtgagagtgagagatgaagaggaagtcttgagaaattgcgcgatgtgggcaacgaccaatgtcgaaagctatccgaagagatggaaatatgatgcacgtctcgtgcccaccaatcgacaatccctcgatcgggtaaccttcaatttgcattgctttcttcttctccatctcactgttccttagggtttatcgaattttggctgtgctcttcgttttcaaatattgatcaccaagtgttcgatgaaatgtctcacaatcacaagcttttttcttccatgatcattttttttttttttaataattttatggattgggcttaggcccataacggttaacgagactacttcactggagcgggaaccactaggcactggttaataaatttcccacgtgcctctggtgcaaaagttggtctttcgtattcaacgacagtgcaagggtatgattgtaaatttacttcgaatgcttcattagaacgtcgcggtattcttacacttgttttcgaagtaatctcgacgactataacaaaatctgagcaatttcaattaaatatctgttactgttgtattttaaaatctagactactgatgacataaccaaatttttagactaaattaccctttttcttctattttaattatcgcatttaatgattttcagctttttttctttatagattgctctcttaactcttctttaattttccctctttcgagttctgaatttttctgtaaaaattaattttagttaaactaaaaatgtttgacaaaaatactaaatttcagagaagatccaacggctagaaatcaactgcgtaagattggagttatg

SEQ ID NO: 21409 - DNA, 3003 bp, Unknown
  misc_feature (1)..( 3003): 2750-1469P.txt file - cDNA_ID_1989210; gDNA_ID_1971889; Annot_ID_58478
catttcagttacagatactctatcacttttcatagtggtgcctaacgagtcatgcttcatgtaggtgtttcctttgttaatagagaagttttctttccgagaacaagcatcacttgtgtggcaattcatttgtagtgttccagtgatggtgcttgaagactttttgccatggatgatctctcatctctctcacgaggagaaaattgaagttgagaattgtataaaagatgttgccccaaatgaagactcattgcaacaggtatacatatcccctttgctgagatatgctatgtttttcttctttccttttgataagctaaaattttctgaaggtcataagctcttggctgcttgacgatagtcaatcttcttgtgggactcctacagagatcatgaaaggagtccagtatgttaatgtgtctaaaagtttgaagaaatcacctgagtcacatccgtcaagcggatgttttcaacgcttttgggagtggagtaaaaagtccctttcaattccaaatgtaggacggagcccaattcatggtcttagactttttcaaaatgcaattgaaaaagatttgagagatattcaagaaggattatgccaagcaaaattccaaacccttattttggatcttgatgtactgatggctagattaaacttccttgctgatgtccttgtttcttataggtaataatagtttctcggattaacttaatttttctctttggtatagtgtctagtctcttgtttactttccttccttctttctttgagtgagttacagaatgttttgttttgttttgttgcagcaatgcatttaagaagttctttcacccagtgttagaagaaatgacagctcgccgctcttcaactgccaaacagttcaacatagatgattgtcttgagaattttcagagattgttatacaaaagtgctgatgataaaacaaagacggacaattttctattgcagcttcaggaggaacttgagtcccttataatccaagtaacaaagcaatttgccatacagagaacagaggtaaactcttatgatacttactcgtttctataacataatggaagtttttcacggattcattttgaagatgttacattgtgtgtatattatattcaattgtctcattgttgtccaggtattcccaatcatcagcaagaattgcaaccatgaaatgcagaagcagctcctatacacaagcattcatgtcttacctcttggattactaaagtgtgtcatactttggttttctgctcatttatcagaagaagaatctcaatccattcttcatttcttaagtttggaagattcttctcccaagaaatcatttccacgcctcttgctacagtggcttcgttttggctattcaggcaaaacctctgttgaaagattttggaaacagttggatgttatgttcaaagtaagatgttcctgccaaaaggagcacactgaagaagcatcaggatcattttccaaccaaacacagctgcaactatgtaaagtatctaaagatgtttatcctagaaagaaagataagtcttcaacctgcttcatgtcaatggatctagctgttggagacatgtatgagacaccttactcaagtcgaatgaatcaacaaatgactttctcaggaaagcttaagcctcctctccatctcccagatttttttggtgagaagaatatggatgatcctatgattatggatgttaaaccaattgacctccttttcttcttccacaaggcaatgaagatggatttggactaccttgtttgtggatcaacaagattggcagccgactttcgtttcctcgcggagtttcagcaacggttccatatgataaagtttttgtatcagatacattctgatgcagaagatgagattgcatttccagcattggaagccaagggacagctaaaaaacattagtcactcgtttagcattgatcatgagctagaaactaaacacttcgacaaagtttcgttcattttgaatgagatgtcagagctgaacatgttggtttctaccatcaataccactgcagctgaccacgaccgaaaaatgaagtatgagcggttatgtctcagtctccgagagatttgcaaatcaatgcacaagctattgtctgagcatatccaacatgaagaaactgagctttggggtctattcaggaactgcttctctattgaagaacaagagaaaatcataggatgcatgctcgggagaataagtggggaaatattgcaggatatgattccttggttaatggaatctttaacctctgatgaacagcttgccgcgatgtccttgtggcgccaagcaacaaggaaaacaatgtttgtcgaatggctaacagaatggtataacggtcatgttttacaagaggaagcaggagaagcaaacaacgatccatttggggattcagatccactagagattgtctggaagtatctctttgaagcatctgctgatggggaaaaagggagcatgcgcagcagccttctcaaactcccgaagacgaattttacaggtattatgaatcagcctcctcctaattacaaggttgaagttggcaaaaaagaggaaaaagatctagaacggtcagaaagtaaaaagatatgcagaggatctaaccaagagggggacaaagaacaaactgacaaaatgtctcagaaggttagccagtttggtccatccaagaaatatgaacaactgttaacaatgagtgaagaagaacttgtggttgtgattaagaaaatatcatgcgactcttccctggatcctcagaagaaagactatatcaagcagaacttgttaatgaggtaagctctactaactctcttttggtgtcctgttccaacatatttagataagcaggaaatctatttagtcttgtattgagactaaactaatgtcaggttcttctttcagtcggtggaatatctcacaacgtacatataatttggaaccatcctctctctcgagcaacatg

SEQ ID NO: 21410 - DNA, 3000 bp, Unknown; identical to SEQ ID NO: 8786
  misc_feature (1)..( 3000): 2750-1469P.txt file - cDNA_ID_1989212; gDNA_ID_1971889; Annot_ID_58476

SEQ ID NO: 21411 - DNA, 3000 bp, Unknown; identical to SEQ ID NO: 8786
  misc_feature (1)..( 3000): 2750-1469P.txt file - cDNA_ID_1989212; gDNA_ID_1971889; Annot_ID_176828

SEQ ID NO: 21412 - DNA, 3000 bp, Unknown; identical to SEQ ID NO: 8798
  misc_feature (1)..( 3000): 2750-1469P.txt file - cDNA_ID_1989213; gDNA_ID_1971889; Annot_ID_58475

SEQ ID NO: 21413 - DNA, 3000 bp, Unknown; identical to SEQ ID NO: 8796
  misc_feature (1)..( 3000): 2750-1469P.txt file - cDNA_ID_1989215; gDNA_ID_1971889; Annot_ID_58473

SEQ ID NO: 21414 - DNA, 3003 bp, Unknown
  misc_feature (1)..( 3003): 2750-1469P.txt file - cDNA_ID_1989218; gDNA_ID_1971889; Annot_ID_58469
tcgctaatctccagctttctgtcattttcatgttccctcggaggagatgttttcaaggatataagagtgccgacatccttctgagaagagtttggagacactattggggcttctccatctttaacagaagatatggagtcagtagcatcagcacaaccagacatttctaagctctctacaattttacaagacgaaacttcgtgaagacatactccatcattcacatctcctacttctacagaggaagacagaaccccattggccatactgctatctactgtgtggatcatctgagctaaaccttcagtttccctgcgttttgtcagtatagatggaagagtgtagtgacattgatccttgttatctttataagaacaccggttaatactatttatgcgagtcaaagacggtacttttatcccattagccaccactgatccattttgttccactgggatgcaaaaacctacagcttctgtgttctcgtgactgcaagaaacctcaggcattacagaaactgcagcatcacggttattccaacagaggttttcctcatgattctttttaagatgtttctgaccatccgtaagtttcttgagctcatcgtgaagtactctcaactccaacctcagctctcctacaatatcttcagcttctccaagctgagcttcaagttcctcaaccttctgttgctgcttcaaggattgcatctctgtctccttaacctataaacacaaatcggttttttaaaaattagagttgaggaggaaacgcaaagccagccacaaaagaaagatatactccattagggaaagctcatcctcaagcaaacgtgatacagtctctaagatgaaaaagctatatcccccacactgaaaaacctttaacttaaaaatttcacgatgaaatgagaattgagagcataagccatgaaatatgtgtaagcctcactgccaacaatggtacaacgaatctagaacttgctgacactaagctacacttggttacgctcattagttttaggccttaggtttcatgaacaaatatcaatggaggaagagaaaagctatatctgcaaagtatcaatgtaatagtctcaagagtgtcaaaaacaatggcttgtatcaacgttcaatgaagtgaatgtagtgaaaaaacatagcaaaaatgatagtctcgaagcatatcatttgaatgatggaagattttagtcacttcaaatgtcaaagactgaataaacaaaactcagagtcacacacacacacacaacattaacaatgcttaaaaccatgaaagcaaggctgaaaaacttaatttcaaaagccatcttcatatgaagcaagaaaaaagaaatgcctctaagaccccaaaaacataatcaggcagaaaccaaataaaacaaaccaagaacccataaacaaatgaaaataagaacaaagtgatagtaccttggaatcaagcatctgtttaagcctaaccaacgtatgaagtgcttcatttctaaccgtcacaagttcttgctgatacctacgcgccttcttctcagaaaccatcacacgtgccgccgcttccttcgtcgtgttcagtatcgtatcggcgtaggctctcttcaacgccgctaaggtctgtgttaacccaaaacaaaacgaacaaaaaatcatcgcaaaccccgaaaagaaaagcaagacaaaacccacatcgtgaaacccaaaatttaaacaaaattagcgaaatcagcaacaagattctgtccgataagagaaacaaggtctagaagaaacagaacgaaactaaacgaagaaaaatccgaaatcgaaaaaaatgaactcgtgagaggaggagattgagggggtttaaggtaattgtacctctgggtctgccattagagccgataatgcgattgcagagaagcgattgttgattttccgaccaaggtcgcgaactcgccaagaagaaagaaaaagctaaaaaggtttttttttttttttttgtttctttttgtgtttccttgaagcgtctgtctgttaggaacagaaagaagtataaagacctatttacccctaaaaactcgatgttatttctcaaacgccacaccacacgtcacgtcagcttcagcatttcagactgcaaacggcggtacggtttcccgttatctccgtcactcttttcgtaatctctcttttgctttttacatttttcggtgataaatttacaatttcaaaatacactggacttttaatttttacctcatttagacaattagaccactagatttcgtagcttttaccccaaacaaaagactatattgtagctagttctaattattgaattttgtatcaactattccaatacgagacatgatataatgttccatatttggtagatacattcaaagaaaaaaaaaatggtagacagctaaaaaagaagctagctcatgggattaaaccaaaattaagatatccaaatgattttgaagtttcgattgcctagaagatggatggacaattaaaccgacttatagaacattgtctagtttacaacatatattaccaatgtaattgtattctactatttactagtgtacactaatactacttttcttgcaattttaggcgccaattttttttgatcgaaaaatatcgagttaaccaattaaaaccgggaagtaatcattaaaccgggtaatgaccgggtgattactcgagactgttatccacaataagaatccacgtgtcttcttcaagcccctccctcttcttccatttttccgccatttcacctagagagcgagcttttgggtgagaaaatctcttcttctaaactattctactgccaatcttaattcgtgcgtttctgtctagagcttggtggtgactagtaacttagccgttaatcttaaatctctgattcaattcaaatcgaattgcgattttcccgagaaaatctcgtttcacttgctggaggatttttgaatccttatgtgaactctagttacccaaaatg

SEQ ID NO: 21415 - DNA, 3003 bp, Unknown; identical to SEQ ID NO: 21414
  misc_feature (1)..( 3003): 2750-1469P.txt file - cDNA_ID_1989218; gDNA_ID_2684202; Annot_ID_137234

SEQ ID NO: 21416 - DNA, 3003 bp, Unknown
  misc_feature (1)..( 3003): 2750-1469P.txt file - cDNA_ID_1989222; gDNA_ID_1971889; Annot_ID_58458
cactggacgacgtaagtgcgcaatcgctagagttgttcttcaggaaggtactgggaaggttatcatcaactatcgtgatgccaaggtaaatttatttctaatttcattatcttattggcttttacactgttgcttagtcgcttgatgtgtttgcttaggccttgaatttggagtttatacagctgagaattgactactcatatgagattaagatttgaacttgaaattggtattttaacagctaaagctatgaaagcagtccacttacccccgtttgaacatattcttggtttatatgaatatctgatacctgcaagagactgacatcatgcatagtgtgtaatcgattgaagcatttagtagtataaattgtagcagtttgtaggagagaaagtcttgacctttatgaagatattctctgttatgtagggtatactagtcttgtgatcaaactgtatctttatgtacttctttttgatagatgagttatatcagcgcgttacagattaagttgaaactggaagaactctctgaacaaatagtttatatgatgaattctaggctatttagactttagactaggataagtggctgagaaagtgatcaaactgtatcggtattagtcttgtgatcagacgttatctgtatgtagttctttgtgacctgggagctgcatcagcacgttatagattaaggtgaaactggaagaaatttctgaacaaatagttcatatgataaattctaggctgtttagacttaggataagtggctgagaaagtgttaacaaggagagattatgataaaagtttggggggttttgacaagctgttttgttgtgaatgggaaagatttgaatccatacgtatattgctgatgatgatcattgtaaacctttttcaggagtaccttcagggaaatccattgtggcttcagtatgttaaagtaccattggtgactttaggatatgagaatagctacgacatatttgtgaaagcccatggaggcggtctctcaggtcaagctcaagcaattaccttgggagtcgcacgtgcactcctgaaggtaagtgcagaccacagatcgcctttgaagaaggaaggtttgctcactagagatgcgagagtggttgaaagaaagaaggccgggctcaagaaggcgcgtaaagccccacaattctccaagcgttaagagttttacatatcattggatcaactcttcaagtagactcctctgcctccattttttttaaaaacttttcttgtctattatcggtcttttgtttcatgttaatgtttatgtgtagacgaactaatacaatctctgttttgtttgaatggaacgcaaagttgatatgcttttgtaacaaatgcacttatgaattgtgatcagacaaatgcacttctgaatcgtttatcagttagatttcaggtgaaagtgaaaactttgcttctttcaaaaggtgttcatggatagtggataagcagcaatacctgaacacacttgtatcactttgtgtatctatctaattcctttgatattgaagtagtaatgttgattttgatgggctcataccgaacgaatcagaaatcgacaagtgtgagatagtatgtatgtgtgcataaaataggctggtttagctgggaatggtgatgcgaaaatggaatgttaggtatgagagagcttacccactttgactctttccatgcatattcgcttgctcccctctttcctgcttcctctgttttcttttattccatttccatcacttaaaaacaaaacaaaaaacctgaactcttgggttggatttcaaaccaacataaaccaattctctaatacaacttggtttgatacaatattagagctacttgatgtgtgtaatgtttcgatcagtaggaaaaacaaatcacgtgtatcctatcaaacttttgattatacacaagtcaaaagagacattcattgtgtgaatttaatgaatttgaggggtctattatatttattagtcagctttaacgtatcaaatccatgacttttatcaatgttttttcttcttttctttctggatctacttcccaataccatcaccggaccggaccacttgatgatcttcctatttatgaacactactactagtaaactcatgtataaaatacgtactttatacgtgtatttctgaagattagtcacttcaaaaaatcatgagagtaataaatgttaaaaaaaaaaacagtggcgctcctttgccatatcactatcccaagtctgtaacacttcactgccacaaaaacaaaaaacaagtaatccaaaataaaataatgattttccaagtgtccttccttcgattaaaccgaggtcaccaaatctgtgtatgtaacaaaaattgtagtggaacatattgaatcagcagcgttactgtataattattttttgattatatcattacatcaacataaattatgatttcctatcattctgtgaaattactgttttcaattttgtgatttgtacttgaaaactaaacctaataaaagaaaataagttaggaatattttgttttttagttttgaaaagtggggctattttttgataaaatatcatcaactttaacaaaaatagataaaaaggttatagtatatattttttagttacaaaattgagattgagataaaaataaataaaatttaatggtcatcgataatattgagatttgaagtgtcgattggtatttgtatagtgttgtatctctctctctctctctctgtctgtttgtttcagagaaggatttttggcgtctccacgcacgatttaacgcatcgaagctctctgcacgcttcctgaaagagagagagaagagagagatcgcagatcgatttctcttaaatctctcgtgaatcccatttgccttctctctgctagattctctcttcttctcttcacccatttctcgctttctcctttgttctctcatctgggttcttctcaaagcctcttcctttttatgccatg

SEQ ID NO: 21417 - DNA, 595 bp, Unknown; identical to SEQ ID NO: 8822
  misc_feature (1)..( 595): 2750-1469P.txt file - cDNA_ID_1989226; gDNA_ID_1971898; Annot_ID_58522

SEQ ID NO: 21418 - DNA, 595 bp, Unknown; identical to SEQ ID NO: 8822
  misc_feature (1)..( 595): 2750-1469P.txt file - cDNA_ID_1989226; gDNA_ID_1971898; Annot_ID_176940

SEQ ID NO: 21419 - DNA, 3003 bp, Unknown
  misc_feature (1)..( 3003): 2750-1469P.txt file - cDNA_ID_1989227; gDNA_ID_1971898; Annot_ID_58521
gatgttgaatatctaagagaaaatatacatcacaaaagcaacgagaaaagaagacaatatacaccaacgagaaaacaataaactaacataacatggaaaatcaagaaggaaacaagacataccagaagccgccatgtttttatgagaagaacttgaaaatagtcttttttctatactcagccgatttttgttctatattttgagaggagttttggaaaagcagtgatggtgaaaatatgtgacgaacaatgtgtatttatacacccaaaaaagcaaacacatgatatatttttctgtttcactaaatcaaaatgtcaaaaatattggttggtcactcattaatgaaggaaacctaattaattagatgtttcattatcaatatgtgcaaccagacctaggttttaatgtttaatttctttctaattctatatgaaatgataacaaggaaattgaacttatgatatctacagtgtactacagctggaaagtggaaaccaataatatatttcatattatttgttttagttttgtttaatcaattgataaaaccaactatacatatttggaaaatgttaatatgtatgaatctctgaactagtagagattttcgttttttacacgttgactattaatgatggatcttaaaaaacaataatatatatacttcattttctaaattactatttcgtagggcatgcacctacacacgtatatatgaatttttactaaatcgttttattttagttggtatacacattttggcaaaactgtaatagttatgtaacccgcaaatattatagatataaattgaggaaacaaaaaagaattaaaaaactatgagtcgtttcaaatgactaagtgagtcataggaaaacttagtcgcatcaaatttctaattggggcatgagtgtgatcaaagaatacatacacataaaagcaaattactaacaactatgaatcccataactagtatagaattaaattaaggaaacgacaaagaaaaagaatcttgactatgagtacaacaacttcaaatatttataggtaagaataaggaatttcagatgactaagtgagtcacgggtgctttccaaacaaaaagaaatttccatcctcattgtggaacacgtaaactttaatatttccttcttttttgttttaagtcccacaactaccttaaacctgaatatcaatttggttagcacttggtattcttccgtcgcacgttttggtggtttctaagaaaagtataataaaattccggtttgttatagaacaaaaaaagaaggtcatatagagttgatcttttcgtttcaaataccattgacagaaaagcttggaggaacaatttgcgaatataatgttgagtttggtgtttctcgaagctgaacaaacccaagcaacaatatgcacaaggctagaaggtggagagtattatttcaaaaggtcaaaatgttcgttggtctcattatcaaattagtgtagtaattaacgttccatctttggcttcctagattactcttatgtttgaaaaaactgacttgacaaaagctaaatgcttgttttctttttcctgtattgaaaagaggttaccatgtacaacttgataacaccaacagaaaaaaagtgaagaatcaagaaggaaaaacaataaaaagtcattgcaaaaaaaaaaaatcgattaatcttcaaccatatatacctaacagattacaaatcccttctaatatgtaatagagatcagagaaatgttttgatgtgtaattaaattaagtaaaatatcacaaagaaagacaaatgtcattacttgcacgaccttgtggtacaacaattaccaaattcgatgtggtatacattttattttacttgttaatttccgcttagtgttttggttcaacaagttatttaatttcaatttcttagtcttatgatatatatatatgtatatttttttttggtgtaaaatcaccagccccaaaacaaaatctagcagtactagcttaggaattcaaatactaaacatggaaagacaaatgaagaagaagaagatctaacgagaggaatctgagtctctagtcttatgatattatattattatttgttaacattgaccaaaatggcagaatagatgagttaacgttctaataaaaataaaaatatgatcatatgaatccgtgagctagtcccaaaaagagatatggaccaatcacatttaacatgttatcattctactgtgactaaatcagttttaaatttaaataagaaacaaatgtttttaattgaaaataagaaaaattaaatgattttttaatctatgtgggaaaattttaaacatcaaataaattgaaagagaggaagtaatatattttttagaaatttgaacttaattaatataagtttccgttttaatataaaaaaaaacaattgatactccaacaatgtgtaagcaaccaattattttaaaatcaaataatttttaaaatgtgcatagaatctttttttatatataaaaaggcgtaacagctggaaggaggagattggttagtgatgaaaaatgaaaagtttctaattacaaaagacgaagatttgcaaaagcttttaattgtttatgtcccaaagctacttgatttggtgaacctctgttctttgatcatttcaagtctgattttcgttcatccccgacatgaataccattctatattcaaatatcttaagcaaaattcgaagattcccagaaattctgggttttcgaagtagtggagtgctatggatgttgcacacaaggtgttcgacgaaatttcccaatgctatttttttatatatcattcttgtgtcacgtgactctcacgttataaaagccttgtgtcacgtgactcacacgttataaaacccagcttcttcttcgatgcaattctgttattttcgttgcttctttttttcccgcttcacaaatttctctctgaagcaagaaagcttaaagaatcttgagaatcgtctacaatg

SEQ ID NO: 21420 - DNA, 3003 bp, Unknown; identical to SEQ ID NO: 21419
  misc_feature (1)..( 3003): 2750-1469P.txt file - cDNA_ID_1989227; gDNA_ID_1971898; Annot_ID_176939

SEQ ID NO: 21421 - DNA, 3003 bp, Unknown
  misc_feature (1)..( 3003): 2750-1469P.txt file - cDNA_ID_1989229; gDNA_ID_1971898; Annot_ID_58519
gtgacgaataatgtgtatttatacacccaaaaaagcacacacatgatgtgagagagagaatattccatttatttttccatttcactaaatcaaaatgtcaaaactattggttggtcactaattaatgaaggaaacctgatttattagatgtttcattatcattatgtgcaaccacacctaggttttaatattttctttctaattctatatgaaatgataacaaggaaattgaacttatgatatctacagtatactgtatactacagctgattaccaataatatatttcatattatttgttttagttttcatataattaattgctaaacaactatacatatttggagatttaattacgtataaatctcataactagtagagattttcgtattttacacgttgactatcaatgatggatcttaagaaccaatatacttcattttctaaaatactatttcgtaaggaatgcacctacacatgtatatatgaatttttactaaatagttttactttagtcggtatacagattttggcaaaactataatagttatgtaacccgcaaatattatagatttaaattgaggaaacaaaaacggattaaaaaactatatgagtcgtttcaaatgactaagtgagtcataggaaacttattagtcgcttcaaatttctaatctgtgtaatcaaagaatacatacacataaaagcaacttactaacaactatgaatcccataactagtatagagttaaattaaggaaacgacgaagaaaaagaatcttgactatgagtacaacgtaacaacttcaaatatttataggaaagaataaagtaatttcagatgactaagtgagtcacgagtgctttacgaacaaaaagaaagttacatccacattgtggaacacgtaaactttaatatttcattttttttcaagtcgtcccacaactataccttcaaatctctagacgtgagatatcaaagctaccttaaaacctgattatgaatttggttatagtacttggtattcttccttttcacattttggtggtttctaagaaaaataaatttcggtttgttatagaacaaaaatagaaggtcatgtagagttattttcatatattcatatctactattgacagaaaagcttgaggaataacttgcgaatataatgttgagtttggtgtttctcgaagctgaacaaacccaagcaacaatatgcacaaggctagagactggagagtattatttcaaaaggtcaaaatgtttgttggtctcattatcaaattggtgtaataattaacgttccatctttgggttcctaagttactcatatgtttgaaaaactggcttgacaaaaccgaaatacttatttttttctttttgctatcttgaaaaggggttaccatgtacaacttgataacaccgacaagaaaagtgaagaatcaacaagataaaacaataaaaatgaattgcaagaaaaatagattaattaataaccatatacctaatagattataaatcccttctaatctgtaatagagatcagagaaaaattgctgtgtaattaaattaagtaaaatatcacagagaaaaacaaatgtcatcataacgtgcgtacatttgatgtggtatacatttcattttacttgttaacttccgcttagtgttttggttcaacaagcaatttagtttcacttgcatagtcttttgatattattagttaaattgatcaaaatggcaaatagatgagttctatgttcaaaataaaaatatgatcatatgaatccgtgagctagtcccaaaaacagatatggaccaaccacatttaacatgttatatttctactgtgactaaagtcagttttaattctatgacataactacgtaacacattgatactatatatccgctcattcactctacaatgactctcatctcaatcgagtcaatcgccacaatttgtttgccaactaattacaaactcactagatatataacattcgaagtcaaaagataaaaaaaaatgtcgcttatatgatcttacgcatttgacaagaatgtcgctatatatcttgtatacatatctagcttcatgggcacgtttctatgtccttcactccccacttgtctttagttgataagaaattaatgttatacaacatcaaatgaattgaaagaaagcaagtagtatattttttcggaaacttgaaattaatttactctatcctttttgaaatgtaaggatgtttcaactaaaagcacaaaaattataaagtataattttttttttccaaaaacatcattactatttaattaagattcaaccaattatatataaaaaatattgcataataaaattgttgcaaagtactccttatgtcagttaatttgttgcaacaatatgcaaactttaaaattatttgatactccaacaatttgcaatcaaccaattattttaaaatcaaataattttaaaattttgcatagaaactaaccaaaaaaaaaaggtaacagctggaaggttgagattggttacaaagacgaattatttattatattaagccccaaagctacttgatttgtcgaacaacctctggtctctctgatcatttcaagtctgaattttgttcatccccaacatgaataccattatatatccaagtctcttaagcaaaacccgaagattcagacaaatcctgggttttcttttgtttatctattcctgaaaattcacaactaaatcgaaacagtgtagtgtagtgtactacagatgttgcacacaaggtgttcgacgaaattccccaatactaaaaattgttttttctttttctttaaaccaaagccttatgtcacgtgacactcacgttataaaagccagatttttcttcgatacaattatgttattttctcgttgctcttttttcccgcttcacaatttctctctgaagcaagaaaagccctcgagagacacaagaaagcttaaagaatcttgagaatcgtcttcaatg

SEQ ID NO: 21422 - DNA, 3003 bp, Unknown; identical to SEQ ID NO: 21421
  misc_feature (1)..( 3003): 2750-1469P.txt file - cDNA_ID_1989229; gDNA_ID_1971898; Annot_ID_176937

SEQ ID NO: 21423 - DNA, 3000 bp, Unknown; identical to SEQ ID NO: 8833
  misc_feature (1)..( 3000): 2750-1469P.txt file - cDNA_ID_1989234; gDNA_ID_1971898; Annot_ID_58514

SEQ ID NO: 21424 - DNA, 3000 bp, Unknown; identical to SEQ ID NO: 8833
  misc_feature (1)..( 3000): 2750-1469P.txt file - cDNA_ID_1989235; gDNA_ID_1971898; Annot_ID_58513

SEQ ID NO: 21425 - DNA, 3003 bp, Unknown
  misc_feature (1)..( 3003): 2750-1469P.txt file - cDNA_ID_1989236; gDNA_ID_1971898; Annot_ID_58512
cttctataaacactagtcttgtttttcttctacactatgaactttatccaaagactcttgaagaacttgcattgcgactttataatgatccaaagataccgctccttcttcaactacctgaagagagtttttatacaactggtcaaaccattgaacccggtccgtaccatcgacaaaaccagtcaagccgttatcagcgaagtggaggcgtttgtagtcttttctccaccgaggtagaatataccgtaaagggatttcttcaacgccgttgaaattgagaacacatagagcatgtctgcataagtatccgtagaagttgaagcagctacaaatgcaacgtacttcgccaactgatctgttgtacagaacttcgaaatcgcggatttctcttctgctggattcgcctcggacccgttctttcacaaggaagatcacgaaaggtccatcgacatggacctgcgttgtgctgaaacatgagtacatttcttctacctctatttggaatttcttgaacatgtctctcgtgtagattctcgagagctgtgtctcgaaagaacactttgttttaagctccgcggtgttcaaggtttgagactctatgtcgctgagagtttcttccctgtgcttcttctgaagagctagctcgtacttatcgagaaactctttcaatggtgtttgcttgtgaacatacctctcgaaaaatggtttcagggtttctccaggatgagcagcggcgattcctgcaaaaaaagtgtctttgagataaaccggagcccatttagctctctcttcatacaaggaacggagccattcattctcgataaccccaaaattgtgaaccatgaacccccaagctgcttcaaactcaacaacttttaaggtttcgtaaactgctttcgtaaatgccttcctcacggcatcataattatgcagcccccctaatttctctggaattttcctcattatatgtgtcagactgaatctctgatgagatcttgggaacacttgagagatggcagcctctaaaggcttgcatctgtctgtgacaatagtttgaggagaacgcttcatgacactgagccatactttaagcaaccaatggtaagactccattgtctctccagcaagaaaaccacaactaagcaatgtagttttcccatggtgattcactccggtaaatgtcaccagtggaatctcgaattttcctgatatataagaactgtcgatgaagatgacatcgccaaagtaactgcaggaaactttagagaaagcatctgcccagaatacattccgtagttgaccttcatcattcacatccatcaagtaaaaaaagtttggatttgtcaattgcatacggcaaaagtagttgtaaatggctgcagaatctcctctcttaaggttcagcaaatcaggtgacccagtagaattctgaaacttcttgttaagagtcgagtttgggttcacattgctcccattatccaccacacaagctcggtacagcttaatcgtcttagcgtctgagactggactagatacacacttcctcttccttttaaccgatttatataacttacaaccgagtaaatggttatgatcaagtgtaacttcaactacccgccacctcttagaatcaacctgtctcattcttatcatagcaggacaaccagttcgagtttcctttctaacacgattcacatcgttaatcctcttaaaaccttgactactacaacaaagcaccgcaccatacttctctttactacgccgcttaaaccacgaattcttcactcttacacgaaacccaacttcactagcataacagttataatagttataagcatcatcatacgactcaaactccattccaaccgcaggtgcatcgaattcttttctctcatcaacaagtaaaccactctgttcatcaaaccctcccattgtttcttcttcactctttctttcttcgttttgacaaaatccaacatcaatctcatgctcactactacaaactagagcttcttctcctatccgtaaagtatctgacattggatcatctctttcacgaacctcgtcgttctctaaatatgcagatgcttggacctgtaataacaaaaagctataaactttgattctagcaaaccctatttactcaattgaggcatcaaacttgtgaaggagctgaacaaaaatgataatcaacccaatgaaatcaaatgtaacatcatcacaacccttgtgcgaatcgattcataatcttcacaaaatccagaattgaaaagaggagttttagagttaaacacatacatcttcatcaacggactcacttctctccattggaggtttggttcctcttccttcttcaattcgcgggtaaattttgatgaaagcacttgactttattcgattgaaggagaacactcgtgaaattgatcggtccgggatagatccggacgggtcttacacggaaagatccgacccgagagtgatcttgcgcgggtattgacctttgaaagcggttaggtagtttaacttcttcttctgacggtgaggtggtcttttggggctcgactggtgactctagcattttcaccaacatagagacaccttaggcttagggttttcacacacaggttcaaagcacgtgctgcaaacgtcgtcgttcgcacttaaacatatcatttttgtttttccttcacttaagacacttaaacgacaattacactgaaacggagggaatgctatgaaatgaaatccaaaattgcattacatagattccctgaaatgaaatctatgagtctatgacattagtaaaacgcacaaacttgtgaatgtgatatttatgagcttataaaacagcatatataaaaaaaaaatatatcaatttctagattttacccacaatcttaatttatgtcatcattaaccactaatttttcaatattttctctctctttcgaggcgcatatataaatacaggaaatacgcttttttacttaccaatcaaaaatg

SEQ ID NO: 21426 - DNA, 3000 bp, Unknown; identical to SEQ ID NO: 8826
  misc_feature (1)..( 3000): 2750-1469P.txt file - cDNA_ID_1989237; gDNA_ID_1971898; Annot_ID_58511

SEQ ID NO: 21427 - DNA, 3003 bp, Unknown
  misc_feature (1)..( 3003): 2750-1469P.txt file - cDNA_ID_1989239; gDNA_ID_1971898; Annot_ID_58509
gttattcagcatagttaattttcgcaaaagaaagaagccaaaattaattaaaagaagcagcaaatgttgtgtcccttttatgttttctatgcgaatggctcaatggagtaaattgctaattcacgtcatgaacacaaaaatgttgatatattaaacaagaagtccatttttgtacctcatatcaaaattttatttgtaaattttgtattaataattgtggatttgctatactatactatgaaatatttttctttatagacaagttatgttatacattaaattatttatttattaataagtacagtattttagtgtattgtcagagttcagtttctttaaagaaaacacaatattttttttttttgtcgtcaagaaaacacaatatttatgttaaacaaaaatgcatgatatttcaatagtttgtggaaaattatagaaaatatttcattttccttcttttagtttggtattaagaaggaaaaaaccaaaaacatttttttgataatgtatacataaattaaaattaaaataatgagaaaacaaaacaaggtccaaaataccttgtgaagaaaatggcgacggcgtttgccaacacgacttcaagctccaacctttacctccatcgctgccgtaaaaaccatcctcttccatctccgtcgttcttttcaccgttccggtcgtctccacttccttctcagacccttttcctcgtccccactccaaaacctgtacgacgcatcgcggtcgctcctctcggccctccaacgccgcctagtcccgacccacctccgcctaaaaacacgactgagctcacaagttcgtctttcccttcttacccttaaaacttcaatgtttcaactctgagttctgattttgtttactgccaattctatttttcaatctttcctaattcgatgaaattgcattacggaattcgaattaggagaatgaaggtggtttaactgctattgattcgtagataaagatgttaatcttagtcctcaagatcgattactgttcattgctaaagttttgatctttgtgacaatttatagacttttactcttgttaagcattaaggatttataaatctcctccttttacaacttgtgaatgtcttccaaaagttccaccattttcttttccctacaggtttagtcattggttgcaatacgagagcaatcttcttaacaatttggattcatagttgttgtttggtatcacattttgtgtaggtcttgtgggagtagcgtcgatgattcaagaccgtgtaaagatctttctttcagtactaatttggatctctctcttcttttgggcttcggctttacaaggaagaggcagcaaaggtaatggtaaagggaagaagggttcacgcttcaaatagtattagttagattggtgtggtgatgatgatgatgattgatgaaaactcctctacacgtttgtgtatatatacagaggaaatattcttccaagtaaagcaaatttcttgtcagactacagttttatactagaaactagattgttctcttcttacgatatctctagcttagagctatagagattactctactgtgatgaaactaaagtagtttgcatttaagtcaaaatgccaaatcaatatcattgtttattgaaagctgtttcagattgtaaatgactagatgtgtttggtgtgtgcttgattcagccaaacggtaaaccgcaccgtttctttgatttgaatgtttgttgtataaaatgggcctttagatatgttatataacttgtttgggcttcaacatactcttttattgggcctctctatataatataatatttccaaagttgtatttaattattatttgatttatatttaaaacagtggttgtttattcatgatatgaaaaaagaaataactggatttaggtaaaccttattcaatactgggacaatgaattaaccagctcatgattagttggacctgttttggttaaaggctggtagtaagtttagaaacagaaatttatgataagagcctaacattttgttctgaccacactgagtaatttaacaatctatctaaattaagattttatgctatgtttaatttatatttgttctgattatagcaaataaatttccatatctagagatcttcttcatacacaataaaaaaaactagtatttgaacttttgtatgtattaaaaattgcaagattttgtaagtacagattcaccaaggtgaggtgtgtgattaggaaactttgattagttgtcatgtgtcatcaacaggccatgaaaaggaaatctttgaaattcaaaaaacaataccttttgatgaaattattactatataaatactatatgtgactatgtgtggatatgcacaatcattcccactaatagtttaataaagtgtataatttttttcaaattaaaacagctaaacacacacaaccacattcaaaaaggggttaagcattgaagaatattctaagaaaatttgtttctcttcttacagaagtaaaagcgactctctctctcattaagcatcaaaggagtttcgtttttcttgctttgctgttacattcttcaggaaaaaggcgttacctttactctctctgcatcaacgaggaagcgtgtagagctaaaggagctgaatttgagagatttttttgttttgtttctgggtttgttcaaagatgcaaatttttagttgtttctgctgtggaaaaggatttgatcggtatgtatggagttttaatcttgattttcaacttgatttgctggtttatgggttttatctagtttctccattgttttgttcttcagaaatttgttcttgctttgatccgttttgctattcttctttattagggttttgagatttatatcatttctcgagcctattcatgttcaaaatttatttcttggtgtaaagtttggaactttcgaacaataatctactgtttgataagcttaagttgcagatttgataaacccaagaagaaagtaatg

SEQ ID NO: 21428 - DNA, 3003 bp, Unknown; identical to SEQ ID NO: 21427
  misc_feature (1)..( 3003): 2750-1469P.txt file - cDNA_ID_1989239; gDNA_ID_1971898; Annot_ID_176928

SEQ ID NO: 21429 - DNA, 3003 bp, Unknown
  misc_feature (1)..( 3003): 2750-1469P.txt file - cDNA_ID_1989240; gDNA_ID_1971898; Annot_ID_58507
tatttaatttggttaaatgtaaaggagaataaaacaaaaacactgagagggcacttaaaagccaacaacggtccaaagatggataaggtcggtccaaaagctaataattcgacaatactctggacacatgggcttttttggtcgtaaccggtcccatttctgttcttagagaaaatcagaaacggtttttaaataacaaagtagattgtagttgcaaaccgaaagcatggttcgtgcctttgcactattattttcatttcatccctttaattaatagcttgtcatcaaaatgaaaggcaaaacttttactaatttgtgttatttgtgagcgtacaaatagaggatccaaaccggttatatctatatttcagttctgataaataagatgaaagaataacttttcaatcggcatggaggaatcttttgatcgctttggaagcaatcttgatagttggcgtttttgttgtgacggcttgtttatggaaatgggctttgacatgcggggtaattgtagttgcttgacacatagcctacttgattatgatttttgaatttgtcattcgtggtcagagtcggtccaaagactaatcatgtttaaagctcaacaaaatttgatgtccatttacaacaaataaaaatagaaaattgttttaatattttcgattaccaaggatcgaaccaatcactttctaccttcaaagcacagaaaaccaatagattataagacgtttcataaaatttgatgtcttttaaaatatatataaaatttgctgtctaaagcatctatttgctgtttacaaaaaaaaaaaaaaaagcatctatttgctgggttttatgttccggccggccttcaagacaccgcaagcttgtggatagcgatggttttcatcatcatgctgtggtttatattcatctcaaagtaggctttgacatgcggggtaattgtagttgcttgacacatagcctacttgattatgatttttgaatttgtcattcgtggtcagagtcggtccaaagactaatcatgtttaaagctcaacaaaatttgatgtccatttacaacaaataaaaatagaaaactgttttaatattttcgattaccaaggatcgaaccaatcactttctaccttcaaagcacagaaaaccaatagattataagacgttccataaaatttgatgtcctttaaaatacatataaaatttgctgtctaaagcatctatttgctgtttacaaaaaaaaaaaaaaaaaaaagcatctattcgctgggttttatgttccggccggccttcaagacaccgcaagcttgtggatggcgatggttttcatcatcatgctgtggtttatattcatctcaaagtaggctgcaaaagagcgggagaacggtctattccactccaaacttagttactttatcgtatccatacatagaactttgaagtatgcttttaactatatgaactaacttataatttgaatttactacataaacaatcaaaatatggctgaaaccaacaaatcaatagatgccgttagttaaaccgttaatgtagctgactaggatgccacatggatagactttacaaaaacgaatctaaacaacttaaaagacgtcgtatctgtgacatctactgtctcttgaactattgtgttcaagggacagtagatgtcacaggttcgatatgtttagattcgtttagattcagtttacttctaagaaaaatataatatttttttttaaaaacatatatttcatcaagcaaacctgaaatagccaaaaagatttttttttaaaaagccaaaataaaaaaggaagaaaaagggttccataacaagaaaagagaagaaaattaaaaggctagtgactaaagatacattttcataataaaagaataaaagaatttaaaaaatgtatatgagcaaatcataagcaaaatataagtattaaacaatatcaaataggtttaaattaattttattacacagaataaaataattagtaatcatcaataatactaaaaacatatagtagtacaaataaaaacatagtagtacaaactcacggaggaaacgggtgtctaacgtaattaatttttcgattcaaaccaatgattcatcgcctaagatttttgtgccggtctagcgacacaacccacatatttttttcaaagttgatttataaagttctatgagttgtaaaacattattaccttagcaaagagagacctgcggaagaatctggatgttgtacaaatattcaaatttcctatattaccacctcgtttacaatttattaatggttatgatatatatgtttgtgactcagttgcttgttaagtatgaaccgtcaataattaaaaagtcattttagtagaaaaacaaaaaaaatgtataattgtataacaagttagcaacccacatatgttgcagagttgatttataaaaaaagattggggacagagttaccattagaagtttggatcgaaacaattgtttttttttgtttttgataaaatattgatcgacacaattgtttgacattcatttaatgttcttaacacaaaaccaaaatccatatgactatatttatattaattatgttgttagttttgttgaaataagttatccaaaaacaaatttcaagaataatttgaaagattttgggtctttctactttctaggaattgcaaggtcaaggcggttggtcttgtgtcatgattttcttcgttttaactattcaaagaaaacaaatattgataataaaataaccttgttgtgattatctagaaaaagggctgtagaagaaacaagaagcatctctgttttatgttcccaaatgaaccagaaactcttagaaacttctaacacctcttagaaaccaaccttttagcataaaccctaatcccatctttataaaccaaacacttcttgcctttttcttgcaaactcacaaaaaagaagacaagaagacaaaaattaagaaatttaccgatttgaaaacaatg

SEQ ID NO: 21430 - DNA, 3003 bp, Unknown; identical to SEQ ID NO: 21429
  misc_feature (1)..( 3003): 2750-1469P.txt file - cDNA_ID_1989240; gDNA_ID_1971898; Annot_ID_176926

SEQ ID NO: 21431 - DNA, 3000 bp, Unknown; identical to SEQ ID NO: 8819
  misc_feature (1)..( 3000): 2750-1469P.txt file - cDNA_ID_1989242; gDNA_ID_1971898; Annot_ID_58505

SEQ ID NO: 21432 - DNA, 3000 bp, Unknown; identical to SEQ ID NO: 8819
  misc_feature (1)..( 3000): 2750-1469P.txt file - cDNA_ID_1989242; gDNA_ID_1971898; Annot_ID_176921

SEQ ID NO: 21433 - DNA, 3000 bp, Unknown; identical to SEQ ID NO: 8817
  misc_feature (1)..( 3000): 2750-1469P.txt file - cDNA_ID_1989254; gDNA_ID_1971898; Annot_ID_58487

SEQ ID NO: 21434 - DNA, 3003 bp, Unknown
  misc_feature (1)..( 3003): 2750-1469P.txt file - cDNA_ID_1989254; gDNA_ID_2684104; Annot_ID_190342
atgcttagaatacggataaagtttaaacttcacagtgaaattcagttgagataataaagtcaacccgttatatttactcatgttcttcaaatcgactaacctttgtaccaaaaggactttcagggtggtcgatgtcaagcagcctccttccctatacaaggagaacacaaaaaaaaagtcaaaactaagtttctgatctccgaaagcaacatcgaagtacactatactctttgtcaagacgaatcatctacagtagatatcaaacaatatcaatatcaatttctcttctcatctcatactctccgtcgacgatcggcgcattactttatttactctgtttttcttatgtttttacgttgtttagtttaagagataagtcccgagcttatcactcacctttgtgggagaattgttcaatttcgatttgacttggcacgtgtgagacactcgcacatgcgaatctaaggttcagtaactggatgaaatttactgaactctaggaattttttaaaatcataactataggaagaaacaaaaaatgtggtcttaactacaagaattatcacatttttaacgataaattatacaagcaaagaaaaatctatcttgatatttttttagaaataagtatataaagaaccaataaaatccaactgctattttgtttaagtttctaattaatattcacaagctttgttgggcaatattgaagattaaaccaaaaaaataaaacgattttgtccataatcattctcgaccgaccactgtcaccattctaaaatatcattgttttgtatgcaaattgcataaatcaaatggctctttcacgtttaaaataattgtatttcggagaaagtgcatatcaagacattgcaatctgacaaagaaaaaaaagcgtgtagacttatctatctccctaggttaacaatccaatgcatgcgtgtccacctttaaatctccctacacaagcaaaattcagtaaaaagcttgtacgttgattacatatccaacgaaccatatccactttcaatttgttaatcatataaatttgaccctaaaatctatctcattctctcatcaatcttcttcctttaaatccctaaatcttcacgttacttttctatctacattttcactttcaatggctttgattatcacctgctccgctctacccacgatccgagcatcttccggatccggatcccttaacccggatcaaaaccgtaagaaatctgctgcttggtgggctcctctcttcggtttaccctccgatccagattacctcaacatcgaaagctcatgctccaccgtgaatccggataaaaccgatatttccgggtcgggtcaaaagtttcgtcgcggttgttttacggaggagaaagctaagcagttgaggaggaaaaccgcagaagcttccacgttccatgacgtaatgtatcactccgccattgcttctcgacttgcgtctgatatcaccggccgagtcgaggattgaaacggattcgggtcagatctggagacgaatcaattaatgaataattaatcttttttttcttaattcagtgttcttgtaggatgcagaccatcttctatcggtgctcctttttcatttgaaccgttggcttgtgtttggtctttgtgtgttgtaaactctagttccctttctgtttcttctgtaatcaaccgttggatttccacttgttatttttagacatgtgttccctagttagctcttttatcttatctcaaatttaagacattgtgttctctaaatctacatcagaacttgactttggtctgaaaatgtctaaatataacattttctcaacggttatctacttcagaacttgaattcggacagcttttctacttcacaacttgaattcggtcttgttttacaaattccacatagacgaactataatattttgtgacatttctcactgaaaagccaacactaattaaaaccactccagatcttattcttaacgatgatcgtgaatttggttgtgtcgaatcttttaatatagtcgtctcgttgtttcaatgtagtggtgatacatctttcctctctattaagatctttttataatgttcaatgaagaaccacaaaatgtaaagtgtctgtgatctattattcattcttgtaagtttttctctccacaattcacattttctagaatcaaacctcaaattagatgttaaaacattaaacctccaaactggttctctgcctccggtagtcaccagtatcagatgcgctcctccggtgacggcaatgcctttccgattttcctttagtaaaagccctgggccaatttgggatttggccaattattgaatataacattataaactttaaaaaacaaaacattaaaccaccaaacgaaattttaatttatttatttaagaatcatactttgttttactttattttcaaaatcatgctgacaaaaaaaaaacgtacagtaaaatacactactgatttacgatttttttttctaaataaattatttacaaatggtattgtgaattgttttgtcaattacgaaaatatagggtcgcttattgcaacatatgaaacgtataggaactaaattaaaaaatacaaataaaggtcttctccttcccgtctagatgtagaaatccctaaaacttgctactgttttgcatacggggcttgtacaaataaaaaccacccaattcctacgctttcctctacaaattgtccccttttttttttaacttttatactttcaattcatctttggttctgtagaattcccaggaatcagcattccactgtaagctactggtttctctaattaactgtagatcgatcgaacttttatagattcgggattgtttctcccaatatttctgtagaaattactacaaaaaaaattagattttcagctactctgagtctaccttgaatcgtttgaaatcgaaaaccctttcctttaatttcaaagagtcgcttaattagggtttaggatagatg

SEQ ID NO: 21435 - DNA, 3000 bp, Unknown; identical to SEQ ID NO: 8817
  misc_feature (1)..( 3000): 2750-1469P.txt file - cDNA_ID_1989254; gDNA_ID_1971898; Annot_ID_176899

SEQ ID NO: 21436 - DNA, 3000 bp, Unknown; identical to SEQ ID NO: 8843
  misc_feature (1)..( 3000): 2750-1469P.txt file - cDNA_ID_1989256; gDNA_ID_1971905; Annot_ID_58533

SEQ ID NO: 21437 - DNA, 3000 bp, Unknown; identical to SEQ ID NO: 8843
  misc_feature (1)..( 3000): 2750-1469P.txt file - cDNA_ID_1989256; gDNA_ID_2926146; Annot_ID_197757

SEQ ID NO: 21438 - DNA, 3000 bp, Unknown; identical to SEQ ID NO: 8843
  misc_feature (1)..( 3000): 2750-1469P.txt file - cDNA_ID_1989256; gDNA_ID_2926146; Annot_ID_139116

SEQ ID NO: 21439 - DNA, 3000 bp, Unknown; identical to SEQ ID NO: 8843
  misc_feature (1)..( 3000): 2750-1469P.txt file - cDNA_ID_1989256; gDNA_ID_1971905; Annot_ID_176972

SEQ ID NO: 21440 - DNA, 3000 bp, Unknown; identical to SEQ ID NO: 8908
  misc_feature (1)..( 3000): 2750-1469P.txt file - cDNA_ID_1989264; gDNA_ID_1971919; Annot_ID_58540

SEQ ID NO: 21441 - DNA, 3000 bp, Unknown; identical to SEQ ID NO: 8908
  misc_feature (1)..( 3000): 2750-1469P.txt file - cDNA_ID_1989264; gDNA_ID_2926265; Annot_ID_143307

SEQ ID NO: 21442 - DNA, 3000 bp, Unknown; identical to SEQ ID NO: 8908
  misc_feature (1)..( 3000): 2750-1469P.txt file - cDNA_ID_1989264; gDNA_ID_2926147; Annot_ID_139145

SEQ ID NO: 21443 - DNA, 3003 bp, Unknown
  misc_feature (1)..( 3003): 2750-1469P.txt file - cDNA_ID_1989265; gDNA_ID_1971919; Annot_ID_58539
tatcaattacagcagacgcaatgatataattgtgatgattaggatcttgggctgttgcgaaaactagcataccgccgtatacggtcttaagaaaagtggcatccacaataacaactttcctcataactttgaacccttcaatgcaagcacccaaagcaacgaataagtacttgaacttttgttgtgcatccacttccacatatgatattgtcccgggattcacctcctttaatacgtacagataagagtacaagtcggtgtagcttttttcaggactaccacgcacatcattaacgtgttgtcttttccctctccatgcggtagcatacgagcaatgcaaacccattcttccccgaacaatactcattatgcttttaggtggtggagtttgaaactcacctggataatcctcatgcaaaatatacgcgattaatcgtggtgtgctggtatgtttacaattgcctgagttcttattagaccgcttgcatgtgtgcatcttcctgtgaactttaacactaaaacaatctgaactctttacttttgcacatcgtaaatactattgacaacctgttgttttatattgccgacatcgtaacatgagtcgctttggatctgacgctatagttgcggtcgcaaaacaatacttatttgcagctctgttaaccaaatcttgcacggcctccttagaaacaaattcttggtgcaattcaatccccgttccatcttcccattccgtaacactctgacttttctcgctactctgacttccttcaccaacacatgaaagctcataatactcaattctaccatcaacaccattatcttcagcaacatccatccggctatccacatgctccctatcttcaataactacattctccatagcctcttcaaaaacccggttatccgcattctcaatagcctcttctacactattagcctcttcaataatcggttcatcattcacacaattacctcctgcagtttctcctctaaaaatcgtcactactccaccattctccatatcaaatgcattcaactcctcagaattaataccaactgaacttcttccctctacccttgaattttgttccaccctctcagattctttatttactacctccacgttcaaagttggtctaattcctttagcattcactaccgttagataacctaaaaagtcatcatcatctacaatagatgtatctctctgagatgtgcatagaatataactcaatttcaccttccttgaggtttcatctattccaatcttcttgcatatcttttctactaacatagagtatgttacctttaacgttctcaacaatacaccgcttaaagaattgtttgaaatccactcatgctcttttgaataatacccattgtcaaattgtatgaatgtgtgcttgttcttcatcgtctcctgtaattacaaataaattataaaaacacaattacgtaatcattcagatttagacataattgtacctatattataactcactaataccattcacctgtcctaattataaaacactattcttttttttttactaaatcactaatgacataattataaaacactattcttttttttctgtgtggagtagtgactattgaaaacaataattaatatacaattaacgggtttaaatcaatattaatatattatgatatattacaggtaaaattctaaaattaacaattaatatacaattatacaatcttaaacaataaacaaaataaataatattaactaaacaaatacaattaaaatttcagttataaaaatattgtaccatatatttaaattaaacaaaataatacgatatactatagatcatccttataaaaaaatcaattttcttatgaatgtacaactcaatgatgtaacattatgaaaaacaataattaacgagtctactaaattaaaaaataattttgactaatttttgatcatgtttaattctacaaacaccaatatttgaacaatcaaaacccattattaataatctgcacatgaatcgttgaccatatatacacacataataatcaatgtgcatataaagaataaagtaaatgtatgtattcaataatttaaaaacctggaacacagaattcatagtttctactagtttttcagtgtttaaattaaatgatgttgataaaacattttagttaattttctgaaacaacttctttaaaaatagagaaacctccagcataaatttagtttgaataaatttaaattttatgattttatttactccatttgtgtttgacgaacagtccaagtctagtataacacagactgatatataatttggttatctacaacttataatatgcatctactttgaagtaattaatcatatgtcaacacatactctctccatattattttaaatgatattttagagaaaaaatttagtttcatttaaagtgattttttttaatttttaaatgtatataatattttttgaccaataatattttatgatatattttaattattgattgaattagttataattaataatactttatatgaaggagataaaattaaatgaaaattttgtaatttctaaataaatgcgcacaaacaataaatttgtcaaaaaacaaacattggggaaaatggtacccacacccaccataagagagtaaatgggtcggatccaaaggacagtctcgtaactgacaaattcacgccacgtcataccaacaaactgttgctgatccaaacacacgccgtcatttagcccggaagcgcgtgacatttcacgcgccttctctctatctcacccaatcagatcgttttaatggttgtttgtttaatcgatcttcttcttcgtcaagtatctcaaaatcaaaaacaagtttgcttcattcatacttcaaattctctcttcacattctccactctctgcttatgttaacgtagagagagacggcgacgtagaaggagtaggaggaggaggcttcgtcgacaatgcgagaatg

SEQ ID NO: 21444 - DNA, 3003 bp, Unknown; identical to SEQ ID NO: 21443
  misc_feature (1)..( 3003): 2750-1469P.txt file - cDNA_ID_1989265; gDNA_ID_2926147; Annot_ID_197810

SEQ ID NO: 21445 - DNA, 3003 bp, Unknown; identical to SEQ ID NO: 21443
  misc_feature (1)..( 3003): 2750-1469P.txt file - cDNA_ID_1989265; gDNA_ID_2926265; Annot_ID_143306

SEQ ID NO: 21446 - DNA, 3003 bp, Unknown; identical to SEQ ID NO: 21443
  misc_feature (1)..( 3003): 2750-1469P.txt file - cDNA_ID_1989265; gDNA_ID_2926147; Annot_ID_139144

SEQ ID NO: 21447 - DNA, 3003 bp, Unknown; identical to SEQ ID NO: 21443
  misc_feature (1)..( 3003): 2750-1469P.txt file - cDNA_ID_1989265; gDNA_ID_1971919; Annot_ID_177170

SEQ ID NO: 21448 - DNA, 3003 bp, Unknown; identical to SEQ ID NO: 21443
  misc_feature (1)..( 3003): 2750-1469P.txt file - cDNA_ID_1989265; gDNA_ID_2926265; Annot_ID_204902

SEQ ID NO: 21449 - DNA, 3003 bp, Unknown
  misc_feature (1)..( 3003): 2750-1469P.txt file - cDNA_ID_1989267; gDNA_ID_1971919; Annot_ID_58534
cattggtctatgttaatgacataatcatcacatgaaacaatttggatgcatttgaaaatattttacaaaatctagctatcagttttcacttaaagacttgggtgagtaaatattgaagaataacttacaaattgattctatcaatcacaaatcgcaaacctgaatgctttcggttgaacaaatctcgtgcagttactagtgttcctcctctaccaaaatgaccaagatgatatagcatcctacgatatgaactaagaaacccagtcttggtgggatatccgaaatcaacaagatagtacttcccactaggcggatgtgggaaaaaggttcattcctcgcacaatgattcaaaacttttgtatcatgtgctctacaagatatactgacatatgcatatatgaatttcatatcgaagttacatatagcaagaacattcattatatgttctatctttctatatttatatttttctacagattgacttagacggcgaaccgggacataagttccatcaagtgctccaacacaatctctaaaaacaggccaatatcaatcatcattcttctaaacagggtttactctcgtaaattcaccttcttgtggctttagtgtatccactacaaactttaaaagagcactcaaaacatcatcaatcttttttttttttaccgtattcaatgaccgttgatatcttgtaactatatctcaaacagttttatcctgaccaaccacctcgaaaagtattagtgatttctacctatatagtgaagaagaccgtaagtattagttccaaacatttagacccattatatagaaacagacatagaatttggaaattttgaataaaccgatcaagctgagagtaactaagagaacacaaataaataagaaactcaaaatatttaagagatttcagtcagtgaataacgaaagtacctcggagtagagattcaacgttgtattagaagtaaccaacgacgggagatctagttgagctcaagtcaccggataatatttcgcaagattgcggcggcggagagagattggtttcaaagagtttgagatcgatgagtgtaagagagaaatgatgaaaaagaagtagaagaaatagagttaggtttgtttgtagtttctcaaacataataagggtataattgtcatttatcatatataatacaacttttaagcgttgaccgcagcattatgccgcacttacttgcatctgccgctgttgcagcaacctagataatcaaacgaacatcttattaaaaaaaaacagaagctgaaagcccaagcttatttaaagatgggccaataggggcctgcataaagttccaattttatttagaaaatatctatttaacatcatttatgaataaagtgtcctccgatgctatttgggtttggttaaagatggattttggaggttttccaaatgatgtcagattttgaagatgaacaatgaaataaatatatctaaagcttatacatctaggtctcttacccaacggcgatgaaataaagaatacatgtactaaaacgacgcatgcaaaataatacctgaaattttctttctacgttggaactcattgcaaaagatgaggaatattgcatagccatggattggatagagccataaagaatcggtacacattgcttttcatattttaatatcgttaaggcgtaatgtaataagtattagaaatggatttttaaaagtatttagatagttcgggtttaaattttattttattgctgattggactttgttttacaattatagagaaataattttgtgttaaattatagtattatacgacattcacacaattacatttacattaacatgtaccacgtctattttataatattgctccaaaacgaaagagtggtcttcacgacgagcgaggtttaaaatttgtagtcgtgcattgcaaaaagctgcgaaaaccgtgtgaactctcaaccaaaccaaatatgatatgaagaaattggttcttgtccattcggtggttagtgtgcatgcatgtcggtgaattttatatgttttccatttacgaccttttctctttatatcatatagatttttaggggaaaaaaaaatcatatagatttttaaaaaatcatgttcccaattaagacataatgtttagtagccaaattgagaaccaaccttttttctgtttattaaataatttaagtggatggattttacacatatattttaatgtcttacataaataaaatatcatgttattttttttgataatatcatgttttattgataaaatccatacatacttgatacttgcaaaaaatatcatgcacaaatttatctctataaatggttatctaccttttttttttttttttttttgaacacaatttacctaataatcttaataaatataagagaaatgtaacgcatacttttgttggacattgtttttggtcgagtctgattggttttttgttcagatctatcggatttatgtatttaagatctaataaacaaattataaaaaatttgattcgatttggttatcgattttattaataatgttaatataatccgacttactttggttagaaaaattaattcaaaagtaacaacaaaaaaaaattggataacaaaaccatctaaaatcctgctaattaattcacatctaataaccgaatccgaacctaaatgaccaaaccatttgtgtaaaaatctcaagcctagtccctatatttcaatagatttttttcttttttttttggtcaagatcaatagatttttttcatcaattcaatttattgcaaatttgcaataatagttggtaaatactataaatgtaaatggtcacgggataacaaaagagcaataataatataataattgcataagacgagtcaacatgaccaagaaacattgaagggttcgtaacttcgtatcatcttcctcctcctcctttgataaacaccaaaaaaaggcagagactttcgaaatcaagaacaatg

SEQ ID NO: 21450 - DNA, 3003 bp, Unknown; identical to SEQ ID NO: 21449
  misc_feature (1)..( 3003): 2750-1469P.txt file - cDNA_ID_1989267; gDNA_ID_2926147; Annot_ID_197800

SEQ ID NO: 21451 - DNA, 3003 bp, Unknown; identical to SEQ ID NO: 21449
  misc_feature (1)..( 3003): 2750-1469P.txt file - cDNA_ID_1989267; gDNA_ID_2926265; Annot_ID_143300

SEQ ID NO: 21452 - DNA, 3003 bp, Unknown; identical to SEQ ID NO: 21449
  misc_feature (1)..( 3003): 2750-1469P.txt file - cDNA_ID_1989267; gDNA_ID_2926147; Annot_ID_139138

SEQ ID NO: 21453 - DNA, 3003 bp, Unknown; identical to SEQ ID NO: 21449
  misc_feature (1)..( 3003): 2750-1469P.txt file - cDNA_ID_1989267; gDNA_ID_1971919; Annot_ID_177159

SEQ ID NO: 21454 - DNA, 3003 bp, Unknown; identical to SEQ ID NO: 21449
  misc_feature (1)..( 3003): 2750-1469P.txt file - cDNA_ID_1989267; gDNA_ID_2926265; Annot_ID_204892

SEQ ID NO: 21455 - DNA, 3003 bp, Unknown
  misc_feature (1)..( 3003): 2750-1469P.txt file - cDNA_ID_1989273; gDNA_ID_1971936; Annot_ID_58584
ttgacaacgtttatgagctagaattcagactcttaattaagccttaaaacctctttctaatttgcttgtcattgtctgttataggataacatctcataaagattacagaatgtttcttaaaccctaaaagccacaaggatttgtcaacttcagagtcttggaaaagaggtgttgtgacagagcaatgtaagacaaaataaattttattttaagataataattaacaaaatacttgaaaccattggtttataagactataacaatggttcattgaaaactataaagttaaccttagccatctggagcagtccatcataattaattgactcaggttcaatgtaatttattcagtaagaagataagcatgacgacaaattgtgttttttgataaaagttaaaatagaagatggaacatattgatgaacataactactgagtctctgctttggccttcttcgagattaagctccagaaagaactagttaaagctgaggatgtcatcagggaagctcttaacaaactgatagcctgcagtaaaagacataattcaatgaaagaagacaatttttccctcgagctcaaacacttaaatcaaacaaaagactaaacccatacctctagtttcccaatggtgatcacatgttcttcaacatcttctttatccaagtgcatgttcaactttagcaaactaatgtttgagaccaagttcttcggtttgataaccaaatcatcagttaccaaaaaccttgtgttttgcttcataaacccaaaactagtcaaatataaaactgatgttttattggtgaaaaacatgttctggttcttttccttcagagaattcggacgaggaggcatctttctagtgaacttaaagtcatactcattattagtttcaacgacacacttgaaactgcaatagatctcttgttgctcagtgacgacatcaagtaactgtttagggcaactataaaacgaaggaagcttggttttggaagaggatgaagcatcaattctcttgaagcttctgaataagtttccaatacaacctaaactgatattccctgcagagatgttccagacagattcaagtggcaaagctagaaaagtgaaaagaagatcaatgaagtctgctccacattcaacacagagaatcttgatgttcggttttctaacaaatgctttaaaagttatggtttggcctggtactgctccatctccagatccttgcaaagttggacttagaggtatacgagatctgatcatttgcaatgagctttgcttcttcagaaaagtgtcggttaaaggaaggtccgaagtaaagaaacattccagcaaagtcagtacctgttgatgacacaaacaaacactcaacaaaacatatatattcaaactacgaagaccaacgtaagatgatacagtaaaaaatacctcactgacaccgacatgaagaagtatttcactgagcttggaagtatctgcgtagcctaagcctctgagagtattcaaaacattatccatagagctcgcctccactttcagatcatctgttataatgaaagaagaagctttacagctgaaaaaaactccatcattatcctttctcaaaatccttccttgaacttgctcttcttcaagtcccttaatctcccgattcatcactcttttgacaaccttcgagtcaacaatttctccacattcacattcctccgtgttcgaaatgctataatgatgtctgcaggattctttaaagcctgagcaaacaaagtacttaacagccctagtgtcatcaattttcaacttcatatttctgaacttctcaagattcacactcctaggatacagtagaacttgcttacatgcttctgtctgaaaactctcaagatccatctctgaaacacttttgtaaagattgttgaaacatcctatacccacttgaggcgatttttgatgtttctcaagcaatctaacaatagttcccatgggaagagcgagaaaactaaagagaacatcaacaaaatccttaccagattcagccaagacaaccttgttcttcagttcatctatgagaagtctcacacttagcttttttgactttgtactctcagccattggagattgttaacagagaacgctaaggaagagaagaacaatacaaagagatagtaaagagaaaacgttttgaaagtttaaaccaagagaagaaggattgtgacttaaatagtgtttttaaaatttaataactttaaatgttatgaagttctattttaaaagaaattttgataactttaataaaaagaaaaataagaaataaacaaaataaataaatgaaagataataaactattgctagagagttttctataatcttgttgattagttactccataatcttgtaaagtttatcaaacaatctttctattattattattttggtagaaaacaatttttctattttaatgatacttattattactttattttgagaataaaagtgtaaaaaatcataaatcaataacaaaataatttaatttattaacaattataaattcttttattttagttggataaacacaaaaattttcttgattttataaaattttaaatatgataactccaaatttatgaagattttttacaaaacaaaaacattaaattttagcagaattttgataaaatcttaatgaataaccacagatttttcaatcacatataaaattatttaaattacaaaccaataaacacccctaaacttttgaattccccacgtcaacgtgactgtgcattccacgtggcggatgtgggccctatagttggaccatgactcggacggatgttgaaattcattgtcgttgccaattgcgtttgtctcactgaaactgtgaaaattttatctcttttatagataaagaatcttgcttttttcagttttcagtatgaagaagaattgaagagagtgtccgaggaaggagacctttggtttcagtttgtgagtcttgttgtaatg

SEQ ID NO: 21456 - DNA, 3000 bp, Unknown; identical to SEQ ID NO: 8936
  misc_feature (1)..( 3000): 2750-1469P.txt file - cDNA_ID_1989277; gDNA_ID_1971936; Annot_ID_58579

SEQ ID NO: 21457 - DNA, 3000 bp, Unknown; identical to SEQ ID NO: 8931
  misc_feature (1)..( 3000): 2750-1469P.txt file - cDNA_ID_1989278; gDNA_ID_1971936; Annot_ID_58578

SEQ ID NO: 21458 - DNA, 3000 bp, Unknown
  misc_feature (1)..( 3000): 2750-1469P.txt file - cDNA_ID_1989290; gDNA_ID_1971948; Annot_ID_58613
agggtttataactttcaagtcaagagcagcaaaaggaataacttcggggacaatccgaaattttttatcttttatttttaaaactgttgggctttaaattctaatcttgggctttttgggccctcttgttgtactagaacttttgttccgatcttttaatgaatcactgatcactccattaacaacaacacaatggaattttgttttgctaaaggttaaaagaattttttgtttctaaaacaaaaactatgtaggtcaattaattttcttttagcaaccggtagaactaaagaggtcaaagtcagaattttctcagataaagacctaacatgttagttacaaatagtctcattcctattgttggtaatgtaaacaagttatctttctttagttatagtacattttgggaaaatgaaagattaatcgatataaaaaacaaacaatgactacataagaaaaggagtgctattctatctatatctttagtttcaaaattctataatacgaccacggtgaaaagacaagacgaggatatagccacaagttgatgggattgaacaatgaacatccctgcaatatgattgcacatttctaaggtacaaagtagtggatttgaacatctctctataatttggtgaccttttataaaaagaaaaatagatttcacgttgacatggttactataatttaatatgctcacgcggtttgcctttgccctaaactactaaaggtctcataaattgtttcatggacaaggcgatggtataagtgggtgtgaagtaagacgaaaaaacttaacaaaacctataacgaaaataataaagatgaataaattataaataattaattagaaatattcgtctgtaacgattttatattggtcaatggtaatgaataatgtacataaacatgtattagtctattacatttgtaattaaacattattctcggccaatgagcttgagagacaaaatctttcgaaatgttgttgggtggccactatgttatatgttaatgtatcgagtatcgacaccagtaaagtttatatttttgtgcataaagttaatgataggtatgtctatttcagagtcatttagctgaactaaactgaattattaatagagaacgatctaaaaagagtagaaaactgagtttcgttggaattaaaatatttcgttttttttggatataaataataattcggttttcattttcaaaaaaatcgaataaaactgtaattgaaccaaatgtatactagtacaatttaaaaatctcggacaacgctatacacataactacatgcctgtaatactaatacatacctactaatctcaaagaaatgacacaacacatgagtggattagatggataagtattattctttcccataattatttaaatcgataagactttaaaccgtgagattgacactgccgaagaattatttgtccatgagaatgacagtttagaaaattcataacgatccataacaataaatatattaatcacaatgcttacctatgtttaatgtaaatgagtggatctaagcatcaaactattattccaaattttgttttcgcctatacaataatcaataatcattcaaaacgttgttcatagaagcaaccatttcttcctaaagcaagcaaacgttgttcatacaaattgcattattagtttaaagaagactttaggtcgtaattcataaacaaagatgctcgacgatgatgatggtactcttgcttctggacatcgtatttagtgagattgctagacaacatatatttcaagacaaacaaaacaatccaacgtattgtgatactcaaaagctaaaattagtctatatagcaaaagaattcaataacatttaaataaaaatttgggtaacgcaaacctaatcaattattgttcaaatagtattaataattcataatgcacgaactacaaaaaataatatatattatcccaagacgaacttgtcattttatgcttttttctgttaaaaacttcataaaataaaataaaaataaagtaaagtcacatcatttcagacaaaaggatgaatcagatattaaattgcataacattaaataaataataaagtatattgttgtcttaatttctttttatataatagaggaaaatacaaagtcttatttttccatcgagagcaaaatctgtcgttttcctctgagagcaggtctaatggcgaaccagtttcttcctcttctcattcgttttcttccaatgcctcttcttcactaccgttgctgtttctctggaaacgatgccgttctgtagtttctttcaggaaatgcagaaactggtttctctacaaacttcttcttcttcttctccttcgtttttcttctcctaaatctgccgatttgaatctcgcaacgacgccgttttaggtttcttatccctttccttattttaagttttgaataatccaagtaacggtttcttgtttatttagctaataatgttgtgttatcgactggctcaattttgatgggctgttaatttctctgtgaatgcgaggaaaataatctgtaaatttttccagattttctccgaaaatgtttaattttgacaacactggacaccaataaagcttaaatcttgcatgttttatgaggaaagattcgatttttacgactgggttatcttactctcttttttttttccaagttttttcatcataagaataattagtgttcgtggctaattatcattaaggttggtgggtcgttttagtcccaaaacttttagaagaatcgaagaaagaaagtttaaccttttccgttttattgactacttttgctcattctatttgatattttagttataatctccagaaaggtacggttttgtattgcttacaagaacaatgtttattaaggatatattgatcttacaatgtgtcttgtatcatcatttggcttcagattttatagacgaaattaagaaggaggtgaatttcagagtttgtcaatg

SEQ ID NO: 21459 - DNA, 3000 bp, Unknown
  misc_feature (1)..( 3000): 2750-1469P.txt file - cDNA_ID_1989293; gDNA_ID_1971948; Annot_ID_58605
tcctgatgtttacttgagtggtcctatcaaacaatatatcacagatagaggtggcaggtgtgtatctgctataactacaagaactgattctcgcatttattatgtcattggcttatcgggtatttataatattgtcttcaaacagaatccatctaaggtggggttgcagggagatactttatgataaatcagcagatggagaaacttatgtcactggactagcaatttctaaggtgaaatttagcttcagacgtaggattttagtggactgcgaaaatgtatacatacattctgaaggttgcagcttctgggtagagaaaaagcacaaaactttgatatgaaagtaaaggactttttttgttttttggtttgctttcaggctacgaacaagaagattgtgaaagctgatgtatatgttgcagcatgtgatgtgccgggaatcaaaaggttacttccaaaagaatggagggaatctcggtttttcaacgatatatatgaactcgagggagtacctgtggttacagtacagctcagatacaatggttgggtcacggagttacaagacattgaacttgctaggttggtaatctagaatcctatgttttgggatgatcgtgatggatctattctgttttggttttaagtctttgtttttgtgttttggaaaatcgtaggcagttgaaacgagcggttggcttagataatcttctctacactcctgatgctgatttctcgtgctttgcggatcttgcactagcttcgcctgcagattattacatcgaaggacaaggcactttacttcagtaagaaagaataacgtttttctttgtttacaaaatcgcatgcaggtctctcagtgtcttgaaactgaattctgttttcacaggtgcgttctaacaccaggagatccgtatatgcgaatgccaaatgataagatcatagagaaagtagcgatgcaggtaaagaacatggctaaattcaactcttgagaaaacttttgtctagctggtttgttgttgattctcaaatcttgttcaggtcactgagttgtttccatcgtcacgaggcctagaagtcacttggtcgtcggttgtaaaaatcgctcagtctctgtaccgtgaagcacccggaaaagatccattcagacccgatcagaagacgcccataaagaatttcttcctcgccggttcatacacaaagcaggtaacatttttcacttactatctttcagccagatccccgatagctacaaatgcaagcaagaacagcctccaaattgtgtctgagaaatccgaaagatcagtgagaattttgtttctggacttgttacaggattacatagatagtatggaaggagcaacattatcagggagacaagcttcgtcatacatctgtgatgctggtgaagaactagcagagctaaacaagaagctttcttcttctgcaactgcagttcctgatgagctaagtctggtctaatgatgaaaaatgtttgaaagtagttaccaatggctaattgatgaagatttgagacactatgggtacatgaagaagaagcatatgtagaaaccctttatatagtgttcataagagaaagtatttgtaatattacaccatcttttgaaatcaaagattcttacaaagtacatcaatttaagaaagtttactctcagaacttacaacattcaaaagaagagagtactacacaaagtttacaccttcaagcttcttcttcgatggctttctttgcagtttcgaggtcttcgtcaaggaatatgtcccaatggccatcccaagtgatgaagaactcagtgtcttcgtgatatttgactcggtgaacatcaccggcgggagtgaataggtaatcgccgtcaacgagatcagctctctccttcttgctcagattccacacacttttctttccctttatgactacaaggtcatggccgaatgtgtggtgatgcgccggttccacacttcccgctttgaatcttacaatcgccgacgtcggcgtctctctaacgatcttcatcgagcctcccggcatgatgtccactggagtgaactctctgttcttcgccaagcagcaaattacgcaagacgcggttgtttcatcgatcttcttggttgttgaatcgccggcggttgactttccaatctgagacatctcggagagagaattgtcgaggaaggaagagataactgagctccatggttcggatccggacgcaggacaaggagatttgaaaggagttttgatccaagcgtcgaagatttccaaggcggtttccggggatgttttgatgccggagaatgcgaggacattgcaattgcttattgatcgagcgttgacggcgtcttcgacggagagacaagtggctgcgtagacgcccgggaacttgttggcgaacatcgcaactccgacgccggtgccgcagcagactaagccgcgaacttcggaagacgatgaagcggagacgcggcgaccgacttcagatccagcagagtagtaagaggacactccggtatcctccacgtctatgccgagagagcggaggtgtgttaccatcgcgtccttgaggctcgctccaaagtcatcagctccggtgatgattttcaacggttgatcgacggcagaaacagctccggccatcttttcagagctttgaaaccttaagctgtgaccagaagaatcttaaattggaaattttcggaaaaaagagaaagacataagttacactactcttccacatttcaccctattaagttattttaacacaaaaggaccctccaattttaaatgaaataaggtactataaattaataaataaaagttttagggtggaaacaaaattataagggaacaacatgccgacaaaaaaaaaaaaaaaagggaacaacataaacatttttaatataaacatgcggcggagtcgtggcggcctttaaaataaaattgccgccgacgactattgtaagtcactcggctaagtaagaatg

SEQ ID NO: 21460 - DNA, 3000 bp, Unknown; identical to SEQ ID NO: 8947
  misc_feature (1)..( 3000): 2750-1469P.txt file - cDNA_ID_1989295; gDNA_ID_1971948; Annot_ID_58603

SEQ ID NO: 21461 - DNA, 3000 bp, Unknown; identical to SEQ ID NO: 8947
  misc_feature (1)..( 3000): 2750-1469P.txt file - cDNA_ID_1989295; gDNA_ID_1971948; Annot_ID_177304

SEQ ID NO: 21462 - DNA, 3000 bp, Unknown; identical to SEQ ID NO: 8942
  misc_feature (1)..( 3000): 2750-1469P.txt file - cDNA_ID_1989301; gDNA_ID_1971948; Annot_ID_58593

SEQ ID NO: 21463 - DNA, 3003 bp, Unknown
  misc_feature (1)..( 3003): 2750-1469P.txt file - cDNA_ID_1989302; gDNA_ID_1971948; Annot_ID_58591
atagcggtaaaaacagaggatcaaaaaacaattttttggaatcagcaccacagaggataaacgattctgttttcatagcatgtcagattctatacttgtttaccgttaaaacactttcatgagctcttcataaatctcaccttcagtggtgctgattgcagcctgcagctttaagtaatatggtgaaatctttctgcagcttctggccttctgctttggctatgtcatgcagcatgctagttcatccgaggaatatgtgctttcaaaagtatcttctgtggctgcacagctgatgaaaagaggctggtaagctgcggtgggcttcttctgcttctggtatctaaatttttaacacatgcacattagatgttggacgttagctttcacttctgatgctatgcatatgagaggattcatgaaaaggatgttgtcgttcacagacaattatgatcggtagcttctggaaaaatagacaaaattagttagctacttctgttttcttgcttgctttgttcctctaatggaacctctaatctgaacaaattactcttacaggcttgagtttactccagcccagaaggaagtcttttttttatcaggtatctacattgtttgtaatttttcggactttcatttttagtttctgtatcctatagtttgactagcattaggtgcatatatgtttctctctgatactggccatatgttctaagaaatttacctggtacttcaaaatctttttaactgtaccttaatatatggagaagaaaggatttagacgctaacctatatccttcatgtggtccagtccatataacacactgtttcattctttgacaaagcactcaagagaagtggctacagaaaaagcaatttcctctgtgaaaactccagcttcacatgctatggctcatcatctttacatacttatagccattacacaatccacatacggacgaggaatctctccccgcaaagctttcatgtcataggcagaagtttttgtgctatgtatgtcagtctttgaacaatcggtgaatccgtgattttacaacggaaaggttggagtctttattgtcaaataacgtactagaaagaaactcataaatatgtatgtagtaccttctactagtagtatgtaagtaatatctttctctttaacttcttcaacgtggatttttatatgatgattatatttaactaagaagaacgttgtacttgtatattattatactcaattagtcacgtagatcgaatcatcgtttcattttgaaaatgaaataagtactgtatattatattcacgtagctcgaatcatgagttcattttgaaataattgtttaccatgcataaaaaaggcaattggaatcccgtgggtaagtgacgacaataattttgacaaaataaataaacaagtgacgacaatatacatgtgcagtgtaaaagttttggtaaaaaagaaagttgtttctaattcactaatatagtagcacatagtatgaaacctgccaacaatacatgtttcatagaaattttgaggagtctcacatattcttttactcgtggaccgatattgaaaatcatcgaactcaaaagatcacacactagctatgttgtccaaaatgaaggaaacaaaaaaatcgagaaaaacaatgaaaccgccaagtacaaaaagaaaaagaaatcaagagaaatggtgacaacgcattgatattattaaagtaaagctgtaagtaaattcatgagatctccgttgaacacaagacccatgaacttttgtcaccttcttggcttcttctaggtgcatgtccccaaatcaaaaatcaattattattatttataacgattttttcttcttcttgttatttaattattatgattacttatgaatctgacgaaaaaataaagattgcttataaatcatatagtatatttttctttgataacacaaaatacatatatttgttcaaaatattagcatctagtcttaaaatagaaaagaaacaacacgatttatttactgtttttcaaataatgattttcgtaatattttttcatcaaataattaaaaaaattcttgttttgtcccaactgatagtcgttgatacttatcaactgctctggctatgtgctctggagatcatacaaaataaataagaaaaattgttagaaaaaaagaaaatctattgtccttgttattcaggagaatacttgtctacgacgaggtccacagtaactccgaagacatctagagtctagagtgatctagtgaatctataaagccgccaaatcgttaaatctttccttttaaacatttttgatttcttttacgtttgcgttacgaatcatcttctgcctctctctcaacgcaactcaatccaccctacacgtgttcctctcttttcccgtctaaatttctcagtctcgccgtgaattttgttcttctcttgttttccgggcgaatcaaaatccgtctcatttccaatcgcgtctccgttggtattttacatgaacgtttagcggaatctcgggtttagcttcggagctttgcatttgatcttcgtcgtctgtgttgtcctctctcggattttgttttttcgccgctgcaaatcagagaaatctattcctggaagtgataagatcgcttggaagcgtttcaggtttggaaatcggattcactgttttgtgtaatttttggttaaggacttaaggtggtgtttgattgttcggaaacacaattagtgacgattaagttcgacctaattttgtttagcatgctctgataagttaagaaaattggataaatttgccattctagattccgatttggttacaatgttagatgcttacgtggtttatagggaatcttttgctgattgtaacacagggagttgttggaatggagggtccggaaagatgagagattttgaatacgcagttattctttgatttcttaatagattttacacgtcattggtgaagaaaaagggaaaaagaaagatg

SEQ ID NO: 21464 - DNA, 3003 bp, Unknown; identical to SEQ ID NO: 21463
  misc_feature (1)..( 3003): 2750-1469P.txt file - cDNA_ID_1989302; gDNA_ID_1971948; Annot_ID_177290

SEQ ID NO: 21465 - DNA, 246 bp, Unknown; identical to SEQ ID NO: 8939
  misc_feature (1)..( 246): 2750-1469P.txt file - cDNA_ID_1989303; gDNA_ID_1971948; Annot_ID_58590

SEQ ID NO: 21466 - DNA, 3000 bp, Unknown; identical to SEQ ID NO: 8976
  misc_feature (1)..( 3000): 2750-1469P.txt file - cDNA_ID_1989304; gDNA_ID_1971952; Annot_ID_58640

SEQ ID NO: 21467 - DNA, 3000 bp, Unknown; identical to SEQ ID NO: 8967
  misc_feature (1)..( 3000): 2750-1469P.txt file - cDNA_ID_1989307; gDNA_ID_1971952; Annot_ID_58636

SEQ ID NO: 21468 - DNA, 3000 bp, Unknown; identical to SEQ ID NO: 8967
  misc_feature (1)..( 3000): 2750-1469P.txt file - cDNA_ID_1989307; gDNA_ID_1971952; Annot_ID_177361

SEQ ID NO: 21469 - DNA, 3000 bp, Unknown; identical to SEQ ID NO: 8965
  misc_feature (1)..( 3000): 2750-1469P.txt file - cDNA_ID_1989310; gDNA_ID_1971952; Annot_ID_58632

SEQ ID NO: 21470 - DNA, 3000 bp, Unknown; identical to SEQ ID NO: 8963
  misc_feature (1)..( 3000): 2750-1469P.txt file - cDNA_ID_1989315; gDNA_ID_1971952; Annot_ID_58625

SEQ ID NO: 21471 - DNA, 3000 bp, Unknown
  misc_feature (1)..( 3000): 2750-1469P.txt file - cDNA_ID_1989323; gDNA_ID_1971953; Annot_ID_58667
gaaagaagagtaacacggcgagaagtacggcgccggagttggtgagggcatgcatcgtttgagagagagtgtgaaaaaataatgaccgggacgtagtgtagttaaagcaggagagttgaccggcgtttaccggtcatcagttgacggaggaggttgggttgatgatgattaatgatgttggaatttgttggcagggggacacatgagcaacttttttacaggtagcatcagctttttaaggatcataattatcatatagatgcattaaagaaagagaaatgatagttttataatttctgtcctttggtttttttacaggtcctttaatatgactagcgtatatggtagaacaatggcttctctgtgctatcaaagaagatcacaaaatggtcttgatttttaccattaatatgtacagtgtacatgcttaggtaagtgatcaactgaatatgaatttgtaggcgtaacacaataagacttccattaacggaaaaagttttttattataattttggggacaaagtgagaatcaaacaaaggattgttttagcgtacaagaaaaaaaactctgctcacatataacaaagattgtacctttttgctatcatagtagagtttctaaatagctgagaagtactctttgctgagttttgggtcgggtttcattgacttctcacccggcttccatcctgctgggcagacttcatccgggttttcctggatgtactgtaatgcctgcaacattgaaaacgtattaagcataccggaaatcgagtgaaaggaaagagcggtttttggagttgtgtgtatttatttgtatctttacctggagggttctcattgtctcatcaacgcttcggccaataccaagattgttgatggtggaatgttggatcactccttccttgtcgattatgaaaagtcctctcagtgctattccctgttcttacacaaacaaagttcttgttttcatttatcccaaacacttcgaaagtttaaaggaaggtagccaagatttaaaggctaacaattacctgatcatggatgagcactccgaacgactttgagattgatttagtgacatctgaaataaggggatagttcagatcaccaagccctccagatttcctgtctgtttggacccatgcaaggtgagagaactacgaggacacacagaaataagaatgaatcaaaaatttgcaaacagataagaacatggtgatgtcaaccaaggatgaggaactgagtaaaatgagaacatagtaaatgtatagtgatacttaccacactatcgacagaaacacctaatacttcggtgttcaacttctcaaattctgaatgccggtcactgaaggcagtaatctctaaaagacataaggaaaaaatgagaaagattaggactcaaggatgagggaaccttggatattcaattttgatatacttctcgagcaatgctaacctgttgggcagacgaaagtaaagtccaatgggtagaaaaagagaatcacatacttctttccaatgtaatcagagagcttaacctgaaaccatacattcatcagttaccaattagtttccaatcacaataagacatatactcactaaataaaaaacactaaagactactcattcagcttcaaaactaaacttaatctcagattaactagaagcagcaactgtgattgataactgctgtaagtaccttgatgaactcttgatcaaacacagcctctgcctcaaaatcaggcgccttgtttccaaccagtggaagatcatcctataatcaccaaattaaaactcgttaacacatcaaatctaaggagaaagatcagtcaaattgacaatcagataaccatggtactataccaaaactacatagacctcatccgaacatactaatcagtcaatgagtatagctcatatgtcactcaatttcacttcaccagagaaattaacaaccctaaacgaaaatgtcactcaaatttctgaacttttcgagtaatctgcagaaacacggtcgcataacctataaatcgttaactatttccccaaaacctatagggctaacaagtaggaagagagtgaaatctataacaggctaatgaattcagatttcaatgacatcgaataagaaaagtatcgacatttagataaacttacggcctgggctttgacagcaaagctccgacgagaagtggagctgagggaagagcgtcgagcaaatccggagcggagagaagcagatgcggaaggagaagaaagggttcgaaggaaagaaacagatggagaggaaagtgaagactttgctggaaaaaccctagaagagggagaagagatgagagtagttgaagaagcaacagacgccattgctgctacacacactttgtgactctctgagtctgagctaccaaacactcttatctatctgtcaatcacctctctttgtagtggaagtatgaggtggagataagcctgacgacacccaaactcataaaacgacgtcgcgttactcaaaacgaggtcgtattactattgctgcaaatatgcgtcttcttcttctaccttgggtaactccgtctctccgttactttcttcctccgatcggtggttcagttctccaaagtatctaatctactcctgttgtttcaggtgcattgttgtgctctcttcacttggtttactttaaaaggcttcttcacttattttgcaaagttttgatttttagtggtttctctgttgtctcattaattctctcgatcttctcctttcaagtgttgacagttctgagagaagatataagttgaatcgcgtgaccggagacatggagactcaaaacaaattgatgaatgaaactaaaagacatgttaaatccagattgtgcagagtttctgggtattgttacattaatcttttacgaaattttctaatttctttgactatagttacactttttgttttgttttttgtatttgtgatcaaagttcgatgacggagatgatg

SEQ ID NO: 21472 - DNA, 3003 bp, Unknown
  misc_feature (1)..( 3003): 2750-1469P.txt file - cDNA_ID_1989324; gDNA_ID_1971953; Annot_ID_58666
acaaaaaattattgtattttctaatttttttttttaactttattttctttacgaatgaaagatgtgttttaataaagaacttacattatggggataaataataatagaaaaataaaaataatgaaagcctatatatatgtatccctctaatgatgtgtataattaggattagacatctcataactctcaacaagttgacttgttgacttagctcttcgtcaatgagagcgaacatgtttgttggaacacatcattagtggacaaatgaatgcagattaaaagaaaaattataatcaaattttctagaaaaacatatgacagatactttgagagataatagagtttttgtttgattgaatataacatattgtggtttgttttcacgtggtttagaaaagaaacaagagtgggcttttaaattgggcccacagagtggcagaagcagggctgagagagtaatgggtcctacaaaacgcccatgatcccaaaatttccaaagaaaatggagacaatcttctgtgtttatccgaaagctaccctcacgctttggattttcttcttcttttttttttctctctcttttcttttttaatactacttatttttctataaatttgtatatctagctataaaggtaatagaaaatggtaagttattttttccttccggtacaaaagatgaaaacatgcaatagtcggcaaaggtccacactccacacatttgtctgcacatctatccaatattcattcataggttcaaccacaactttatctactacatatatattttttattttattgaacgaatttatattcgttttccatttctgtcatatatcatagtagatgttgatagttgggtaatggagcaagtgaaagattgatggttggtagaccatagattcatgcattcataccataaggtatactgatggtgattgggtaaatttttgagtcagctattacaattgaaaagttcatcaaatgacaaaactattacaacttagatctttgacagccaaaagaaaaaaaaaaaaaaaagagaaaaaaaaaactaaattgttgttagaaattagaagtcagaagtaagaagactcccataggaatacagttctggcaaccaatttcttagttctttattgggcattcatatcttagttgggcctgactcatatatattttgaactttttgtacgcaattgtatctaacactatagtcttacattgttcatatatttaatgttttatattgattgctacctatatattttgatatgatgtagatccaactatttctaggttgaattgtcttttcgaacagattttgtttccggattcaccataaaaaaaaaaaaaaacttatgtgacagaaagtactatagaaagaatcgtgtttacaacaataaagagacttgacccaaacaaaaaacgtttacaacaataaagagttgaacaataatacggtacgattgtgtatgttgaatcatctcctccacttggacgtgtccatttgacaacggaaaaaagtgtggccgtgttatctttctttgtaacgtttacagtttcaattgtttagtttgatcaaataattaacttgtgaattttatggatgcaatatcttgaaaactaggaaatcatatctgatcatcctgctataaaaaaaataatacatgcattttaatattcatggtttcacatgaatacttcggtcatccatttttcaattacacgagtgtaaatctgtaatatcaatattcatttataattataacgggttgtgatttgtgaaattgtgggtatagataaaacttcaaaacctattgaaatgaatatctatatacttggaatagtagtagacacattttgtaatgagtaacttaagcacaccggttctcactcacactcgtctaatggagaaaaatggtatattatatacctcatataggaacatgatcatatgatttaggagtcataagcatgagattaacaagatattttggtccacattaggaatctactaaaggaactattttcttataacctaaaaatcttggtttggtaaaaagaacaaccttagattatttggtcttttatcgattcatgtaattgtgtatcaaatgattaaaatctaatgcatcctactcaaacacgtcatttaagaaaccctatatagtacaaacacgatccaatctccaaattaacccatagtatatcatagacgagcataatatttttggtcaaatataaaattagatgcactagttccctttatttaggcagatggactttcttctaatcgaaaataattgttctcaatgagccgtcaaactttgtgaaatatggatataaattcatgacatctacataatttttggtttaacatgtgaaattgaacttaggatctatttcattcgaattcttaccatatactaaccaaatataaataatgtttactgctaaatactatttatataagtttgttcttcactaaagaaatttgttgattagtttgtttttctaattgagaatctcttatttcaggaccgataaaaaggaagtgatttccggttttcgattcaattatttcggtttaagtcggtttacaaatcatccaccctgtaaatcacggagcaacatccataatccatacagatcaaaccacgtggacatgttacagtgttccttatcacagaagatgagtactcctgtcatctttccccttttcactttaacataacactctgtacactagtctgatcaaaaaacctcaaaacacagcaaccgccatttctttccaaattcccccaattcccattccaactttatcttctgaagtagaagaagaagccatagaaatgctttgaagtttctgtaagtgttcttactcactctaaaaacttcaattttggtctttgtgcttttttctaacagatcggtgaaattttctgaatctgctttttgtttttccaggtaaagagaaagatctacaattgttttgaatatg

SEQ ID NO: 21473 - DNA, 3003 bp, Unknown; identical to SEQ ID NO: 21472
  misc_feature (1)..( 3003): 2750-1469P.txt file - cDNA_ID_1989324; gDNA_ID_1971953; Annot_ID_177414

SEQ ID NO: 21474 - DNA, 3000 bp, Unknown; identical to SEQ ID NO: 8996
  misc_feature (1)..( 3000): 2750-1469P.txt file - cDNA_ID_1989325; gDNA_ID_1971953; Annot_ID_58665

SEQ ID NO: 21475 - DNA, 3000 bp, Unknown; identical to SEQ ID NO: 9009
  misc_feature (1)..( 3000): 2750-1469P.txt file - cDNA_ID_1989326; gDNA_ID_1971953; Annot_ID_58664

SEQ ID NO: 21476 - DNA, 3003 bp, Unknown
  misc_feature (1)..( 3003): 2750-1469P.txt file - cDNA_ID_1989327; gDNA_ID_1971953; Annot_ID_58663
atatttaatttacatttattgcagtttggacacattcccttatgctggaactaccactacctgtgagtctctctacatgggagttccatgtgttacaatggctggctcagtacatgctcataatgttggtgtcagtcttctcactaaagttggtaagctcttagcaaaatttttttttttttttttgcaaaaattgttgttagtcggacatcttttagctaattcagccatttcttgattcaggattaggacacctggttgccaaaaatgaggatgagtatgttcagctatctgttgatctagcctctgatgtcacagctctttctaaattgagaatgagtctccgggatctaatggctggatctcctgtttgtaatggtccttcctttgctgttggtcttgaatccgcatatcggaatatgtggaaaaagtactgcaaaggtgaagtgccgtccttaaggcgaatggaaatgctgcaaaaagaggtccatgatgatcccttaatctcaaaagacttgggaccatcaagagtcagcgttactggagaagccactccgtctctcaaggccaatggttctgctcctgtaccttcctctttaccaacccaatccccgcagctctcaaagagaatggactccactagctagataaccagcaaatcgagctgctgcgaaatgccggcagagagtcttgacccatctggaaaaggtgtgaaagaaagagtcgatgagcttttcctgctatttacttccaagacaataggaactagactttagattactgcttgtgtagtaaaaagaatagtaaaaccagctctttcttttgttgtatctctttctactcttagtttagctttacatgattcttgggaagtcgttaggtggtagtggatttggagtttttcttctcatttgagagatcaagttgttgtgtatcgattagggttttaaggctttttaggatgttttcatgtgttggattttgactcatatgatagtaaatatagttatagaaagcttttcggtgcctttacctatttcataatataattatctaaaactcctgcttaagcttaatcccataggtgagacccaatgaaagacttttgacttgtatgattatgttgccaactccatatctctctttaattaattaatatggagagagtaaaaaggcaagcaactaactactcttcaattcaacacttcttctgctccattgcttccaccagaaccctaaagaccttataaaacccaatcccaaatccctttgctcattcaccaccaaagcatccaactttctttgcttcctctttcaaagcaacacaaaatattaaatctcaagaaacaaagtaaagaaaaatgaagaacgaatctaccttcattgatgtccctgcagaatccagctcagccatgaaaggcaaagctcctctaatcggtgtagcaagagaccacactactagtggctcaggtggatacaacagaggactcgccatctttgacttcctcctccgtttagctgccattgttgcagctttagctgctgccgccacgatgggaacaagcgacgagactcttcccttcttcacacagttcttacagttcgaagctagctacgacgatctaccaactttccagtacgactcatagatgcttgattgatcaaacagatgcttgtgtttttcttgagaaacacgtcacctaattaggtcatattttttcttcaggttctttgtgattgccatggcccttgtaggaggatatctcgttctgtctcttccaatctccgtcgtcacaatccttcgccctctcgccaccgccccaagactcctcttgctcgttcttgacactgtatacactcaaaactcttcaaattatattgctttaaaataaaactttagtatcaagtaaaatactaagaattgtgttgggaacagggggtcctggcgttgaacacggcggctgcatcatcggcggcagcaatatcatatctagcacacagtggtaaccagaacacgaactggctccccatttgccaacagtttggagacttctgtcaaaaatccagcggagctgttgtctctgcctttgtctccgtcgtattcttcaccatcctcgttgtcatctccggcgtcgctctgaaaagacactaatcaaaaccttatatgtgtgttcatcattattgtaaaatttatgtcaccattgtgtaattattactcatccatggccttgtgaattgtgttgtattaatctttttaaaaaggaaaatgaaagtgtgattgtagctctgcttttctggaaaaaaattgaaatgagtttctcaattttttgtccaccaaagcctatgagattataaatgtctcctatatttgtctctacgaaaatacccggtaatgataatgttacagtgagtagcagagaaatatcttacgtggtgttatcttagtggacgttcacggagttgtcgttggtcataatgtttctgtcttcctttttttggtttaaggataaacgagccttcctggtgccacgtcaccttttcgtcttctgctacttcgtcttcttcactaaatgattcagtattttctcctcaatcttctccattttctcaccaaaccaaaatcgtgaaagaatattttcccgcttcatgtagatggcagctagactacaacgacctgggcttgtatcctcaaggtaaatcaaactcactacaattttcagatcattcccagaaatttattagtggaattaatcaaatttggggttttctccgtcgtccatcttcaccagtgttcaattttcgattccgtttatacactcgcttagctcaatcattagagtaggtgcagcttagtttaagtcaaacccagaaaagggaaacttagacgaatgattcaattttgtactttgttcacggtagatcattcttttgattttagtggctgcttaataactgaatctcgccttttgtagctctacttcaaaaccatgtcttccaaggatg

SEQ ID NO: 21477 - DNA, 3003 bp, Unknown
  misc_feature (1)..( 3003): 2750-1469P.txt file - cDNA_ID_1989328; gDNA_ID_1971953; Annot_ID_58661
cagaaacgtaccaggatctgtaggaggatactagatgaaaacatgaaagcaagtccagcaagtctgtgcaatcaagaaaaataaaatctgtaagatcacgacacacgagaatacactggcagatgtaacaacaagggtaattaaagagcatcaagtcttagaacttacactgtaccaagaaagcaatttgagcattccagaagaaatcagcatcggaaaaaatttagaaaagagcaaacaatgagtgagtttgaacaatgcaaaacccagaaaccctagctcacaaaattaaacaattcacgaagcacaaaataactataatctgagtaaatcaataccaatctctaatacgtatggaatatatgaacatagagcaagggagaaaagtaaaaggggaaaatcgacttgaatctgattcgattccgtcgggaaatgatacagttggaagataggtgattgattaccttcgatggtcatcgccatgtcggcgaatgaaaatgttctgattaccggagatcgagtcttgaatgatcgccggtgacgataaaagagaaggtgatgatttcgttgttccccttagagagatacagaaggagagagcccagagaggagtcgcgatttgagagcaaaatgaaaattagtgaccggtcaaaattggttttctcaccgttcatcgatttcatctttttggtttggttggtttattttggttataattggtttccaggattgtggttttgataatacagctagtagtcgattttaaaatatcacaaactaaatgacatgaaaaaaaaattacgatcaaaatttgggttgcaaggaccacataaaactcattcctaaatcatacgtaataaaaatgattttataactgaaatttttaaccaaagttcataccaatcatcaaaatatgtgaaatgctaaatatttttttcttttcattttttgttatttaaatgcaatcaactatgattgaaactgcatcaacgaaaaagtattattaaactattaagcaaccataagttgagttgattcgtttccataattttagttagagtacgtaaatctccatcataatacactatctatgctatcattgtttgttttttttttcttttttttgctaagaatgtaaatatcattagaaatgaaatgtttggtattacaagagacgtattacctaaattaaattaaccttggcaaaaagaaataaaaacaaggttaagataaagagtagttaatcaggagagattaatggatccaaagtagcataagttgtttccaatgctttctatgtcttcgagaagtaatggtattgcgcacctcacgatctatgctatcatggttggtgcgtttatgacatgctgctgctggtgacgattcaaaagtgtttatcagttgttcattatgatgccattgtgatgtaccattactaatttcttacttaaataaggtgttgttttttgttttgctccaaataataaggtgttgtttaaaaggggctctttcgttttggagtaaaagtctctctgagtagctgtatattatttaagtagcatagtccaattatttgacaatgaaaaaaagtgtatagtccaatgaataccaaatgaattgacgtcaccactagttgagacctgagacaagcaagtgatcgttaaatcaaggagaacgcaagtggacgaggccgacatgatcctaactattggactcccacttgtgaaacttacttgatccatttcccacttcataatttcgtaaaaaaattaagacaatgagaatgaatttatttatttatttttcggtagaacaatgatttttattttgtccaaataaaacaatcgtgaaaaattatgttttggacattatcaactttgtgagtaaaacaaattttgtagtttcttttaaccaatattttcgaagtcaacttttttctacgtgtgagtgtattgagtaaatgatagatatgtcaataataacataactcatcaatcaatctggcttcaatagaactagagaagttataacgtttttttttttttagacaagagggttttataactctagactagtttcatagtccatgaaaaaaacatcaaatctcctaaatggctggacataattcagatgattttgtatgaaataaaacataaaacatatattttcttgcatatctggagatttttgtttctttattacaatgactaattaatttaccttgttcctttttatttttgcaaaatgattactgttatctattttgtccgtttctaataaaataaaataacaatctgagctgtggaaagaaaaaaaaaggaaaagcgaggagagctaatctgagtcgttgcctctgtccactggctcggaccgacctcgtacctctttcatttgtcctcgagcttataatagaggctacgccgtcgccgccacctccgctccatccattcacggccaagcgacgactccaccgcttaggcttggcgtctgaggtatactgatcaacgctttctgttttcggaggagcgaggcggagatcagcttctcttatgtctactcaaacatatcattcttctttagccactcgatttcttctctagcggctccagaggtttcgtcgctacagagtcaagttcctcttttcaggttttgtggtaagtaatcgttaaaccctaagtatcggaccttgttgtttaatctgttcgtgtttactctcaattacatatgcattcttctgcttaatcgtttcttttagtttaatttctagggtttacatcccaaaggtctgatctttttgcatatttgtgtgaatcttagtttttttttttttttttggaattgaatgtgatgagttgggtttgatactgttaaagatcaaatctttagcttcgttgaagcttcatatttatgtcaacaatgcaaggtttatttttcttccacctttgatttgatatttataattgtttctttgaaggtgaacaagattttagttacaaaaaaatg

SEQ ID NO: 21478 - DNA, 3000 bp, Unknown; identical to SEQ ID NO: 8990
  misc_feature (1)..( 3000): 2750-1469P.txt file - cDNA_ID_1989330; gDNA_ID_1971953; Annot_ID_58659

SEQ ID NO: 21479 - DNA, 3000 bp, Unknown
  misc_feature (1)..( 3000): 2750-1469P.txt file - cDNA_ID_1989332; gDNA_ID_1971953; Annot_ID_58654
gaagtttttgcaattcatataaagacatttaaatattatgttcttatatgtaaattcatttaatatttgatattgacaattagttagttcatgttcagtttttacaattttatcataattaaatgattgtaaaaatgtttgtatcaccagagaaaaatctgaacattaataatttgtttctgcttaaaccctaaaagtaagcgaagatattgaagaacctgaaggcgagaattggcggagtaactgttggcaccatctccaccactcatacatagagctttcacaaacgcatattcatcatcacacttatcatcatcatacctgcatcgcgacatacatgcatatattgttacataaacagctgcatggatatatatcgatctatatttaaataactaaatcaaattaagaagcattaactctatatacagaatatttatgtgtgtgtgtgtgtgaatgtgttgcattaatgatacatgaattggagataagaacctcaaggaaggaatggtgttgatgaatcttggatccatttcaattatcgtacttattagtgattataagactaaaggagaattatcggaagatggaagatgttgtgtatggatgatgcatctcacacacttcaatttatagagagagggaacttcatcaaggtagcacattatttataaaaaaaacatgaaacatatgccaagtgtactagttgcaaagtcgttcagcttgagacccaaaaacaaacaacgtctgttaaaaattattggttctgaaataatgttatattattgactttaggctcggttttacaattgaaatgcacaatgatctcagatctgatcttaaaaaacgaattaagcgatagataaaatgagatgttatagtggtttgatgtgatagtcacgtacgtttttctttgctagtgatttcacaaaataaataaacgaaaattacgaaaaaaaacttttctttcgatctaaacagtaaaaaacaacgacattagtttgaataaggaatacaaactctaatcaaaccaacatgcctaaaatattcgaaatacttttaatgaactttcgttattaaaaatgtggtttttatttctaaggatgtcgaatccaagacaaacaaaaagaacaacaaacaaatgtttgaacttacgtgtatatattatatatgtatgaccccaaaaaatgacaaaaacaaaaagcacgatattttaattattgctggtgttgttcatgttgtaatgaaaaaagacaaaaaggtaatcgaagagaaaaccacttggtactagaagattcaaaatactaggatacatttgtacatgtaaaatcattacttcaattaaatatacattaaacacgaatattaacattttaaatgaacgagaaatcgcctagttgtgatatacaatggcgagtatcttcaagttattaaaagactaacaagtgcgaaggtcagaatctatgataaactagtgagtttcttctgctagtctcaaataataagtgtgaacagagtgtgtgctgacgaagattcgtttaatcaaaccgtgtgagattcaaagtaatctccattaataacattaacaacatcaaagtccttttcaattataaacagacagacgaccatacatgaacatgcattttttccctttttttttgtaatgcatgttcttatatggagcattgtcgtaaaatctgtggacgacgcttaatttatccccgatgtaaatgttccatgccacgtaattctaaaattatatggaacacgaaaaattgtttttctaacaaccacacattaatatcaaaaggagggtcctaggttagtgaatttgaagcaaaactgtttacgtatgacaactcaacaaatctatagttgtagaagctttatctaacaatccggcctacaatttaataatcggagatttacatatatcgaaaaaaatgagaaaatctgtctatgaacaatccaaactcatttaaaagagtggagaaaacaggccatttatgatcagaaaggactatttcaatttacgtaaaccatctcaaattacaaatagtactcgacaatttatgttttgcggtcgagaaaaactccgttgtccgtatcaacagttccatttccgagtagagagggatgagagaccatgtggaacacgaaagtctcatttaaatttatttatttctttggtagtactagtaactaatttctgcggcggccccatccaattgatggtacgccaccttttatcctagaaaatcggcaaagcatgcatgatgaatcatacgttcaaatttcctcgtacgataaaagattcttttataatctagtccatgtttcataaaccggagatattggatgggtggtcggacctctcctacaggccaaactgaatttcgaatttactaaaattttgtttttattagataagttaaagacaaaacaaaaaaatgttgccctaatcttgtatatcatgagattttccttaactatggaactttaaggttcacaagttagaagtagaagtgtagaactctgttattaatcaaaacaaaacaaaaaatgttgtaattctaatatccggttaaatgtaattcccggtatccagcgaacggaactgggaaccaaagtatttacgggttagtttggtttaaggataagtaaaaccgtttggttcaaaataaaattcgatttggttcgacactgttagtacttttttctcaaacagaaagtattaccatctccgttcgattagagtatctttcctccgtcaccggcaagggacctcgccgtcgtttagccggagtattaatttccgtttgggtaattcatctgaataattgattccaagtccagttgattacttgttcttagaattctagatcgattctctaaatttgtcttgtcactgattggattactgattcttgtttgaatgttgcgattttgggattccaatagaataagaatttgttggagctgatgagaatcagagtcatg

SEQ ID NO: 21480 - DNA, 3000 bp, Unknown; identical to SEQ ID NO: 8986
  misc_feature (1)..( 3000): 2750-1469P.txt file - cDNA_ID_1989334; gDNA_ID_1971953; Annot_ID_58652

SEQ ID NO: 21481 - DNA, 3000 bp, Unknown; identical to SEQ ID NO: 9003
  misc_feature (1)..( 3000): 2750-1469P.txt file - cDNA_ID_1989334; gDNA_ID_1971953; Annot_ID_177396

SEQ ID NO: 21482 - DNA, 3003 bp, Unknown
  misc_feature (1)..( 3003): 2750-1469P.txt file - cDNA_ID_1989335; gDNA_ID_1971953; Annot_ID_58651
gacttttatatatatgaagcgataaagaagagcctatttggtgttttctccaatgatgtgcataaaatatatataattaacaaattaaaaatacgttaactgagatctcagatactcaggtcattagtacaaagtacaaacgtctaatagaggccaattttgtcatccatattcaattcaaaccatatcatttgccataaccgtacccatatatagatatttgttagtctacaaaagactgtataaatcgttttatcttgtgttcaagccatcaactatgatatcaaattaccagatcactcatgctaaagaatccatcgaaatgtattaagtttgtcgaagttcgttactctatatggtggattttaaatatttgatttggttagataatttttagttataccgtcaaataaatttccaactatttagtcagcgaatttaaagatcaaacactaatcatcagtaatggtttgctgaaaatcgtcagaatttcttttactagtgagcaagttttaagatgaaataaaaggtgtgaaacgaaatagagaaaaggtagagagggaagagacaagcgtgagacacggagaagtggaactgatctctttacgttcctcgtacgtttaccaagttacactgctttccatatttctatattattattccctccatccctttcttcacatactttatgtaacttctttttaaaaaccaattatttgtattctaattgattgaatcaaatagtttctataagactataaataaacataattcgaattcaaattcggcagcgttgaaagatatatgttgaacaatacattaccacacttattagtagaatatatttatttctagagtctcaaaacataagccaaaaagccgaaagcacctttttatctttgtgggtttggtgcaatggatcatatatatggtacattagcatttttatcatctttctcttttatcatttttcttgtattgtcgggcttgcgtcaggcctgtacttatcttcatacaacattatttatgtacataaccagaattcaggccacaaacaatacgtgagctattcaggatcacgaggtccacgcgctcgctcaccttcctctttcctcaaaggctttagctaattgttaactagatggaaaacagtgctatggttgaattttaacatattggttactactatctcaataatattttgtaatacaaatgtcggtagatgaattgatataccaccttcatggatgatgaagatccacttttaaagcccaattttttgtttttcttcgatgccgaaatcaatatgggcacatgtggatcctactatagcagttcctcaatttgagttaaaaatctttgggttttaggcttttagcccaaggaaaaaaaaaaaaaaaagaaccaatttttattttttataatttaataagaaccaaattattcatcattatatacttctgacaacaaatatttactatgtatattatatagtgaagaagctgtgacatgaaacagattcaagccaatcgtctgattagctagagaatcactgtcataatctattagttgacaaagaatgaatgacactagtacagtagttaatatgagtgcggattctcgtaatctcaacgtatctacgtcaataagctcatttatacatcattaaattaaagtacaacattccaatttatgtttggtgggttcctttttatcaagacgtatacgattataccaaacctttatccataattatttttaaatgatacatttcgtaaatattaatattacgattattatttttaaacctaaaatctttgaattttataaaattttaaaattgataaaaaagatacgggattttttttgagttaattgattttctaataaagatattggattcttagtgttttttttattctataatttatttataacgcggaaataaaaagcaaaataattaattaagtgaggagagttttaatattttgatgtttatttctaaattcatctcttttttccacttctgttcagctctgatgaatcttcttcctctgttactttgatctctttctccatccttgtctctgtcgattctctgagatatcttctctcgagctttttcccgcgttatctctctcccactcctggtaatattttcttcttcttcttcttctagattgttcttccgttactagctcttgaatccatttccacggatctctgatcttcaatctctgttttcattctctctaatcagttgttgagcttgatatttttagctaacgtttttccgattcaaatttacgatttgtgtgttttccgataaccaaatcggatatcttcagctcaaactcgagctccgatttcgtctcatgttgtagatctcgacgacttcgtatttgtctatggtttgctgattgtattcagattgctagatactcaatatagagcttacttttacctcagctagggttcgtctttgttgtacctttagttgctgctttttgattcttgtatatatggattttgattgttcaatcgtaatttctggttcattgaaaatcgatttattagtattcgaaattggaactaagatttagagattgcgaatttgatacagaagtcatttcaaagtatcagagctataaaatggtgcttagctagtttctggtttccatttctggattttcattcaaatacgaaatctattcgtcaaaatggtgtcactagtgttctgtagaaatttcattacagacttttagttgttgcctagtatcaactcatatctcagcggtagatatgatgaatctactagacatatttttcaattatcgcctccttttacaagtttatcatgtcattattttgttgataactacatgaatgctggctgaaatattaatttgtctctttttcctcttaattggttcaggttggagcttgatgtctaaattgttattgaactgctggagtctgtcttgctttaagtagaaagagatg

SEQ ID NO: 21483 - DNA, 3003 bp, Unknown
  misc_feature (1)..( 3003): 2750-1469P.txt file - cDNA_ID_1989336; gDNA_ID_1971953; Annot_ID_58650
gtgttagtctgctagaaaaagcatgttggagtggatttattgaataaagtcacaaaattgttgaccaaaaaggaaaatattagtcattcaattatggacattagtacctttttccctctattcgacttatatatgttaagtactcttagttgattgcagttacagtttttacgttaagtactcttagttcattgcttgatataaatgctctccgaccgttttcccaaattttataagtttatttagttttagtgagtggttcttgtttgttgtggtccatgaatgtggcagaaaattgtttctaaattcgtgggtttaatttattggtggagcacatgatactgtcatgttcagatacatagcttttaatcatgtctagctactgatcagctttctgcaatgtgcttgttttaatctttagtgtccgctaaaatcttatactatttgatatttgttaatcatatctgtggttcttaagatatttatgtttattgttttatctctatgtgcgtgtcattatcactaagatcacgtgtagtgtctaaagggaaattccaatttatatgtctattgataatttgatattcattataacatggtagtacagtcgtgtttggactcacattcattctttgttttgtgttctgtgatggaataattatattgcagcttgacataagaggagatccatacgggtttctagcggcgcatccattggcaccgcttgtatcgttgcatcaccttgtttacttagacccaatgttccctaacaaaaacccgatcgagtcgttacagaccctaatgaaaccttataccttagacccgaatcgaatactccaacagattaattgtcatgatcgcaaacgtcaatggtctatatccatctcttggggatacaccattcagatatacacttacttcttgactgctacggagctgactacgccgttgcagaccttcaaaacttggcggtcttccagcgatggacctttcgtgtttaacactcggcccttgaaacctgacccctgtgagcgtccggtcacttatttcatggatggtgccgaggatgtacgggatagtgggacgaaaacttggtatagcataggggataagaactatggtcattgcggaaagattgagcatactcgattaactaaagtgaagaggatattggtgacttcaatgaagacggatcctgagtattggaacaaggtacttagtgtttgtatatttctcatattgaatttaacattttgggtgagtttaggttacatctttttttttattttttgcttttgttgataggcaccgaggagacagtgttgtgaggtgatggaaggaaaagtaggaaaaagaaaagagaaagaaatgttgttaaggattagaaaatgcagatctttggagaagatataaaaaaagcgttttaattagagagatttttgcacatacagatttagattcgatcattagttatttgtttctaaattcctcaattcctagtaccaagagaatgacgattttctctagtaatactggcactcttcgtttttcaacatgtaaacattactttgtataattagtctatatcaaataaatagttacaacatgaacgtaactatttatacacgagggtaaatttttaacaaatttaaaccgaaccaaaaagatttcagttaatcatagttttgttacaagcgaaatctgaaatattcaccctcaagtttgttacgtaattgtctaatctgtgtttttttgtgctagtgttataattgtttcctcgaatgttaagcaccacatagaagtatacacttttcttttattattttcgttcttcttccatttagaaacttttattaattctactgttaaatccaacgttattagtttattttctctgatgaagttctaattttttttgtttgttggaaaaagggttacttttctgatgaagttgccgatttgtttccaaccaaacctcagctaatatagttagggagacggataagaaattgcataaagggagaggctttgtaaacacgcaagtttacgtcaacttgacacatataaactcgtatataggaattgtgtaaaatgttaatcaatatatgtttatgaatatagtccttttatttccttaatctatagtcatgttatcatcatatcggcaagaaaattactattacaacatatgtttccgtgcttcgatttgtcgatcaggtaggcaaccaaaccgggccagattagtcacaaatgaaattaggctccactttggcaagttttttcacaattaaaaattagaaagtctaaccaaactaatagaaactgaaccaaacaaaaatgttcacgcaattacgtagcacttctctatgaaatactgtggataattcgatttgagctaatctatggtaagtcgtttctctcaaactgaattaagctaaaccaaaccgaaaataaaccgttgtagaacacccataataaacatatatatgttctctactcttatttggctatttttccatttgcagatacgtgtgacaacattccaaatataggcacatgatacaaattacaaagccagaaattataatttataaactatacataataaggtcagtagcctaattacatccatatatttagttgggcataataaggatagcctaattttggtgcatcccgccaaaaattcggacaaatggtgaatttcaaaccatgaatttctttgttatacatacattacgtgcactattacatcaaagaaaaatagtgacgtgcataaacgtattttcttcacataatctatatataatatatacagccatgtacatttttcaacatagaaaaatcatgtatacaaatacggtaggtgcaatactgataaactgccattcccattgcattagacgctagtcaatccaaaccttataacataaaaagttatagtccatttctttcatatccaatcgagtcaaaataatattcgagcaaaaaacaaaagaaatg

SEQ ID NO: 21484 - DNA, 3003 bp, Unknown; identical to SEQ ID NO: 21483
  misc_feature (1)..( 3003): 2750-1469P.txt file - cDNA_ID_1989336; gDNA_ID_1971953; Annot_ID_177393

SEQ ID NO: 21485 - DNA, 3003 bp, Unknown
  misc_feature (1)..( 3003): 2750-1469P.txt file - cDNA_ID_1989337; gDNA_ID_1971953; Annot_ID_58649
tctccacgtttccatcatattttctttttttgtttccctatttgttctttgaatcctcgaaatattttctaatcatcaattatagcctctatcttttggaatcttaatttatacccatttgatcattcgatgaaaagtttcttatcgaatgtttttgacagatttttatggttcagtagttttacaaggttataaatatttactttgctaaacgttttacatgtttgagatcctaacattagttccatattgtaaatatcaaacatgtataaatgttcgaatcgaaaacatgtacattagctgttattattttgtctcaataaattttgaatctggaagaattgataacatcctataaatgtggtgacaatatgcaaagattgaaaacaaatttctctctgtttatagattctatggtagcatataatataaatatataatatgatactaatagaatattgaatttcttcttttcttttcaaaaatagaatattgaatttcatcttgatattttttgataagctataggatgtttacacacgtcctctttggttaaagagagcagttctaatctcaccaagcttggaacagctataaagcacgacaatcgaactatactacgacacgttgcagtttgaagctgtcatgaaacagacctaccactagtaccgccacgtgacggtcatacccaaagaaacgaaacttgtaagaagagatcaccggcacgaacctaacacatcgcaaattcgaccggtctcgctagacacgttatgcatgttttttgttcgtttaatgaatgacgactcttcactttcgtttttgtattagtcaataattataagagttggccagttaggttgattacattaaatattcgattaggggagactaaaatatttgtactattttgtacacgtaaccttacattagatgtcttcgaaacttctttccatatgagtcatgacaaggaaaacttctttctatgcgttctcttacccaaaaaaaaggttctcatttttataattggagattccacatatatattattaattctcggcttagtaggattctaccgggtaatattgtaaactaaattttcaatattcaaaattattgttattgaaatctcaatggaatgactcaattaagataacaaaacattgaaccaatagatcacttgtgaatagttaacgacgattttgatattttgaagataaattaataataaataaataaataaaactgttacctatttaattgcgtctgctttttgacatttgcgtgcgtaaaatatttttatatttccgtggattcggcatgcacgatgacattttcctaacatgcaagcaaacgacacaattttttaaaaataattattcgatttgttttctacttaagaacttgggacggtgtaggacctaccccattctctgtaaattctattccatgatcaataatgtgaatctcttaggaatagatcaattgcttaaaccatctaattagcgacaattcttgcattgatcgataatatttggatatatagtgccggctttgaggtcctataagctcaaagcaaagtttaaaatgcgtgcacacaaaagaagcagacagatattttaacttttcgttgggccataaaagaagcccctaacaaatatgcacctaagtcaagcgacataagagatatgagacgatacagacccacaaggatgaagtaacaaacatcgatttggatcaagtttgttaaagataaacccaattcggagagagtccactcaatagtgaaatgcctacaatgggctcttattaagcaatggactctaagagacgtgccttttttcaatttaggcaactgtagtctattgggtataacaaatgctattctttgccatgtatattaaatactttactctttgctgcttctttaatttcttcttaaatggtttatctagtaaacgatggcaaggtatactcttttgagttattacgagagacagagttagttacatgagctagttcagtctttaattagcctttctttatgtacattatctcataaatctacatgtgaaaactttatttactctttgtggagagaaaataaattgtaaagcagcagcacaagatcgatttactgttgatttcacattttgaatgtagtactgggccttgagggacatagaaaagctaagattgcactgcagtactgcacccattcattttgtgactcggcccctccccattttgtacgtaaacaagaaaacgcgttcgtgattcactttaactttatggaaaaaaaacaatttggcgacttgcatcgacgtgcgcgtttatattatataaactgattttcaaaagaaggcatgattcatcaaagcatgtatattagcattcttaattatatctttgtttcaatcatgatccaaaagatgtgagttgatctattgttgttgtttccacgtatgttcgtctatatccaattttcagtgtattttattattctgctacatatttaattttagctcaaacacacattttaaccatattctccttggcaatttatttattagtcgatagcaatttggttgcaataatcttctgttatacttgaaaaacgatctattaacaaatatattcgaaagagtttcaaaacaatctattaacaagtattcgaaagtcgtcacatcgttgactaaagctgaggacaactctgtcatttttatcttattcacgtggctacctcttcttcttcgtctctcattttatgtgtaatcccacagagcttgtcactccaaaaaaggcaaaacaaaaaaaaaacagcttctaaaaataaaaaacaaaacaataatccagccaccgtaggggtaattccgtaaatttgtaacagaaactccattcccgcggcgtatgcagagggcaatcccgtaaacttaacccatctccggtgatgaataatatcaattccttcacgccggagtgattttccacaaaaaataagatatg

SEQ ID NO: 21486 - DNA, 3003 bp, Unknown; identical to SEQ ID NO: 21485
  misc_feature (1)..( 3003): 2750-1469P.txt file - cDNA_ID_1989337; gDNA_ID_1971953; Annot_ID_177392

SEQ ID NO: 21487 - DNA, 3000 bp, Unknown; identical to SEQ ID NO: 8982
  misc_feature (1)..( 3000): 2750-1469P.txt file - cDNA_ID_1989338; gDNA_ID_1971953; Annot_ID_58648

SEQ ID NO: 21488 - DNA, 3000 bp, Unknown; identical to SEQ ID NO: 8982
  misc_feature (1)..( 3000): 2750-1469P.txt file - cDNA_ID_1989338; gDNA_ID_1971953; Annot_ID_177389

SEQ ID NO: 21489 - DNA, 3000 bp, Unknown; identical to SEQ ID NO: 9021
  misc_feature (1)..( 3000): 2750-1469P.txt file - cDNA_ID_1989344; gDNA_ID_1971973; Annot_ID_58688

SEQ ID NO: 21490 - DNA, 3003 bp, Unknown
  misc_feature (1)..( 3003): 2750-1469P.txt file - cDNA_ID_1989354; gDNA_ID_1971973; Annot_ID_58674
tacacgcaagttatacatatgttttcacatatacgctctgcctcttccaaagtcacatccatctttcaatggctttctcttcagctcacctcaaccaccaccaacctttgatcaagcacggtggagccacggcggcgcctcctccgaccccgtcatgctcacatctcaacaccaccagcaaatcggagacagcagttgacgctctctccagtcttttccaccgtctccctcctttgctttcactccccaaccgtcgctccatcccttctcttccgatggtatctctctccgccggagatagacttgaatgggacgatcttatctccgccgtgactgatttcggctatttccaactcattaacgatgactccgatattcttttccctcctgggatcgctgaagcagccgagtctgactcactctcgctcttagagctcagtgaagagaagaaggaatcatcgtttccgaagaaatggccgctaggctacgaagccgatgctgaaacgccatcgttttgccttgacgccgactgttcaaccgactcgagcgagttaaatctgagttcgctccgtgagttcactcggactctagagaaagttggactgaagacggtagagatgctggcgaatgcacttgggtttggatatgattcaacccggtttaatactctgatgtgggttaaccaaggtgttcctgatgatgaaccggaggtaaccaacggattttatccttttgttgtttgtttacagtatcagataagggaacagaagtattgtttgctaaccgagtctggttgggtgtccgttttaccccgagttgactcggttcttgtgacgttgggtgacattgctcaggttagttctcttttgcttttgacaattgacagaacacatatatctcttttatttatctataattaattggttagttgtcttccttaaataattatcaaattatcatcctttgtaatggaactttattccactataccgttaactggctgttttaatgtattttaaacattatccaaaataaatgttttccaacgcatcgttcaaaaagagaacaagaatttggatatttccgatatttattgttgacaacaacaacaattgtggagcataaccggggaatgtgttttcacttttcgtttgaaacagatttatggcattgggaaagaaataagaatttggaaatttccgatatttaaatacttatacacatcacatcgcaattgtacttagtgtcctatagaattcaacaattcttttttttttaggtcaaaacctaacagctttctacaatatagttttcaacttttgaacagctaacaaacaacttaaaattggcaggtttggagaaatggagaggtcaaaagagtgaaatatcgaccagtgttgtgttcaggacaaaaagatggtccagtaaagtgtgtaacaatgacattgatgcttacacttcccatggacagtatggtttcatcattgaaggatatgatcagtgacggcgacaaagaagaagagtatgcagaggaggaggaagaagatggaggagcaagaagtgatgagagaagggcatttaggccttttagtttcaaggagtacgcatggagagtgtaccaagaacgtctcttcttcagggatccacttgacagatacagaatcaaatctttaaaagattgacgaaccgatgtttgatttgtttgtttctttcttgggttgaattggtactatagttcttgttgttactttttttcccccataaaatcttttgattttcagcggattgttagcattttagcattgagatatttttgtttttgttcgattcagttcagagaatgttctattttgatagtcactccatcattcaactaattttttcatatatactcatatcaaaactgtcactatttcaaaatcaaacttttaggttacaccaatgactctatcacactaaactcaactcctagattttatatagaagaatctatgactttgatgatgtactttaaaactgagtcttttgagatcataaccaaattctacttcataacttttgttttccaatgttgattatttgttataattagaaggtgacacaaacgcttatagcatcctgtttttgaaaatgaggaaatacagtgttggcttttaatctctcattgaggcagaatatcaatgaatgacttcaaatctacgtatacatgtttacttatttagtgatccatattggtgttgctctttaattttcttgtgagaatgaattatatacatcaaaattgattatatcatttaattcgagttaaaattataagtaatacaatcttcactaaacactaattaaatcgacgtaaatttcttatacgattttttcatgcaacacttaaatcgacataaatttaaatattttggtcttcataccctaattttgataagatataatagaaaatttcgtatatctttttttttttttggtaaaaagtttttttttttttgtttcatctccatatttagaaaatttatttcaaacttcgttctcgtttgtgttcatcttaatttttaaccatgattgagtcattgaccattgctcaaaacatacgcataaaattcccaaaaagtagtgtgtgtcgtgacaaaacccgacccgtcgatttacgcggtttgaaactcgacccgaatactatccgaacccgtaactttggcaaaagcacatcgtacagctcaggcacttgtagcacgtcgtctctcctttggtttctctccttatattcgacgagtgactccgattggatcgctatttcgtcatttctcactttccaaaaagaaaaaaacgaatctctctccaccatcatcacctttctccttcacttgcctcagatctggctgcgatttcaaatcttccttagtttctctcgcatcgctcggccgttgacggtcccgtcctttccgtggatctgattctggccccggattctctcgccgcgatctgaggtcaaacatg

SEQ ID NO: 21491 - DNA, 3000 bp, Unknown; identical to SEQ ID NO: 9015
  misc_feature (1)..( 3000): 2750-1469P.txt file - cDNA_ID_1989356; gDNA_ID_1971973; Annot_ID_58672

SEQ ID NO: 21492 - DNA, 3000 bp, Unknown; identical to SEQ ID NO: 9015
  misc_feature (1)..( 3000): 2750-1469P.txt file - cDNA_ID_1989356; gDNA_ID_1971973; Annot_ID_177492

SEQ ID NO: 21493 - DNA, 3000 bp, Unknown; identical to SEQ ID NO: 9014
  misc_feature (1)..( 3000): 2750-1469P.txt file - cDNA_ID_1989357; gDNA_ID_1971973; Annot_ID_58671

SEQ ID NO: 21494 - DNA, 3000 bp, Unknown; identical to SEQ ID NO: 9014
  misc_feature (1)..( 3000): 2750-1469P.txt file - cDNA_ID_1989357; gDNA_ID_1971973; Annot_ID_177490

SEQ ID NO: 21495 - DNA, 3003 bp, Unknown
  misc_feature (1)..( 3003): 2750-1469P.txt file - cDNA_ID_1989358; gDNA_ID_1971974; Annot_ID_58727
cagttcttccttctcacgttgcagtgtctctgggtctcgtttctcattctgatctcacaaatataattttgaaagtcaaagagggagggctaaccagatataacagctcacacctccacaaacacagctaacctgattaagagttatctcttgagccttcaagattatatccgcaaatcgatttttcaatagagcagccctgtaacgcttttctggaggtagttccttctcttttggagcactatttcctaaattattaatgggtcaagagtgagatgccaccctcagatattagagcacagatatttttctgctacacttctgagcttaccatcttgatgaccatctgccccctcaataagacttagcttccctctggatgcatcttccatctgattcaatccaccgacggaatctgcttttagaaagggaataagaaaaccaaggtttattaattaatatcaacaaaacttaacatcttttgcaccaaaagaggagtaatcactgattagagataatatgatcactatagaaaatagcaaacagcgacctgggagtaaaacaagcagaaaatgtaacaggtctatcactatcatactaggtgtgtaatatgagttgctatcagtaaggtcagtaagtttcactccaaaaaaactacagaagtaacattgagtattctagatggacggccacttctgacaagagggaagtaaaatggttccgagggttaagtacatataagaattgcaaacatcaaacgtctgcaaaagctccatagagaaaaagacaaatacaatgtagcaagattaaacaaaccactgtagttctctaacgccatacctttttctgttctgacagttgagatgtgagatatagggtgctcataattaccaatgtcaacatcctcgtcctccaattcactccctgcaagtaacgaggaggaaatgacagcttaatcatagagtaggacatgcgaattagctcaaacaacaaaaccagtgtatgctaaccatcacagtgttgcgtcaatgaatttcctggccctgacccatgtaaaagctacatcaagaaagttttcgctgtttatcagtcatgttaacaaatggatcaagaatgagatatagaaaggtgattacctctaacacacagggttcaccgtttgaatctttcttttgattttctcgcagaaactcatcaaagagatcccgcaactggaacaaggcatcatgactgagatcattgatgtcaatctctatctcatcatctccagatctctcttccttggagctgtgatctctcaggaaatttattatctgtacagggaattctgtcaaggaccccaaatctctgccaagctttactctatcctcatctgtcataacccgcttagcaggctctaagaggctgttacgtttcacagcattcatctttctcttcttagccacaggctcaggtatcgcaatatctttgtgagcaagagtagccaagttacttggttcagatttggttccggatgacttcttctcgatagttttccatctcacttcaaaaaacttgctgagagtatcagcgaagcgatacacattattatctgacgggttataagtcatagcattgcggaaagtaagacggacatcagcagaaaactctgaagggcttgaatacgtgccggaagttaacttgcttttaacagttcctaaatccataggatgtttgataatggtgaaataatcaggaatgttgagcttgacgacgtccacaggggtattaaagagccaacaatgctgctgcgacatcaatcgtttaaggaggctctcacattgcttcatccgaagcatagtggaagtggtgactggctctggtttggttgctgtgaaggggagcaccctttttccagggccagtagagcatcgtgacattccaaaactcttggggcgagacacattacttgcaggtgtactagtaacaatcttagatataggaagaaggtccccaacactcttctgaaaggaccgtagttgttccagctcctgacgaagcgtatgaatccactttctcctttctgatgatgacaagtcagacaagggtaaaactattctcgggacaccaaaagtttcatcatccttggaagcattggggctatcatcacagccgccgggagagtcaaaactgttacgattataatctcctgggaaaccaccgttcctcacagtcatgatatcgcccaccgaagtgcgaacctgcacaaatcaaaatatttaagtcagttttgagaaaccctaactatgaaaacctgaaagcaattcaattcttagagccctatagtattgctggaggagagcagtgaacactcaatatgcataaaaaaggaaattcggaactaaccaactcgaaacacttagcaagcgatcgaaccggagcagaagtaagagaaccgaggaacaagcgtaaatcttctccagcagaaacagattaacgctagagattggtgtagaagatgatgatgaagaagaagatagagtaaaaccctagagtggagacgaagaagacgaccgagaagtagagagagaacaaaatcgctctctgccctcccttctctagtgtcccgtccctaacgaatgctgcgtctaacgccgttttgctactgggcaggactcaatctggaccgtcggatctgatccctcgaattaaaatcgaatgcaaatacttcggtgcataaaaataatatcctgggcttataatgtaaagcccaatgaactttttaatgtgcctttattgggtctacggatgactcaacacggcacgctgtgaaagctcgaatcgcaggaacggcacgcgcttttttccttcgaaaacaatttcttctccttcttcttcaattgatggtttgatttacacatccttcttcttccagttccatgtcgcatacgtacacagattgacagcgaagctagttagctcagattttggatctcgaatttcagttaattcgatccggttatg

SEQ ID NO: 21496 - DNA, 3000 bp, Unknown; identical to SEQ ID NO: 9056
  misc_feature (1)..( 3000): 2750-1469P.txt file - cDNA_ID_1989359; gDNA_ID_1971974; Annot_ID_58726

SEQ ID NO: 21497 - DNA, 3003 bp, Unknown
  misc_feature (1)..( 3003): 2750-1469P.txt file - cDNA_ID_1989361; gDNA_ID_1971974; Annot_ID_58724
attcatgggtttttggtcaccgaaacagattcagacacgtcaacatgttcgcaaagtgcactcattatccctcgttgacttctatttaaaactgacgagtaattattactatcaatattgggctctcgtatatggtatattatcgggcccaacccaaaacatatttgggccggattagaaactagtgagaaaaagggaatgttactatgttagtattattgttgactgttagagtttttttcgctccgcctctctgaaactcgccgctagtaagcttcttcttcacttgtgctcttcttcgacgtaagttttctctctttccttctcaaaggtttctctctcgattgacaatcctaagtttcctcgctcttgtggcaattttaattttatttttctggatttggctaaccctaatttcgtctggaaacaatgatattcaacgaaatggcgatttgtgatttaaaaagttgctctgtttttggtatctaaaatttgtgtaggagatgaaccgtattggattgataaggggatcatcatccaaggatgtagtccggagaacgtttgcagcagcagctagtaaagccaagaaaggtggcaaaggaggtggagccagcgatgctcctaaaggttccagcttgaccaaagagatcaaatccaccactgttgttggtgccaatactctcaaagacggatctgatcccaagatcttgcctgattctgattaccctgattggctctggcatctcctcgataagcgaccagctctcagtgagcttaggaggaagaacgtcgagactcttccctacgatgatctcaaacgttttgtcaagctcgacacacggggtaaaatcaaggagaacaactccatcaaggccaaaaactgagagatgtaagatgttttcaactctctcactgttgctgttttctttgtatgtgggaactatgcttgctaataagtagattcttccagttagattacatttccaaggcgttattatgctcttgtatgttctcagacactcttagtatatccaagaaattgctgcttcatcttttctctgcatgattctctttgaaaagttggaataggtttattcttacttgctctaagtatattctttcagttatcttacttttccgagtcagtaacattatgcccttgtaagttcttgatccttaagactctttattagtgaatccaagaaattgctgcttgtgtgagtgaaactcttggctcttgtttaatctaccgaatgatatgtccagcaagtgtgtaatacaaatccttctccggatagaggagatgagttggtcggttcttaaagacactgcaggtgtaactgatccatttaacaatcagatttattgtttactgtatgggacctggctcattgatattgcatcactattctgttggtggataccaactcttgttgtctatctctttgtggggtttgataccttcaaaagaaaggtaaagcaaatgttgcatcattatctcccctttgtcttccattattgctcttctttgctttgattgttacttgtctcctgtgatttgcccagttacaatttcatattgctttgtgttaatactagttaggataagtttcaatttaaatcggttttgatttaggtcttattggtctgatattatggcttttctctctctctctctatggtattgtatctgacaagtgctgctacttatttgctttatggttatatcctcccatgcccatgaaaggtttaagagtttgaaaaggagacaccactcatcacatgcttttgtgggtataacaaaaaataaagctaacttttttctctgctcacatgcttattttcctcttttgacaccttaacaatatcttgctttgtttttgtttcgttttttgcatgttccttcttaactatatgtactaaatgtatgatttagatatgttatggatataattatccaaatctgtggtcatgattgatagaggccacgagggcggacattttaaatcgctgatccgaatttgttcttatagtctctctactataatgtaatgggacataggttgggtgtagttgcccatccttatttgttgtctgaataaactcttacctatatttatttatttatatataagtgcaacggtactactatttccagaaagaaattttgatggttcatgtttccttctactcttttattttgctcttaagaggctttatcgacatataatataaattcaaacactgctgcaattctaacggatataaatcatccaataaaatctcagaaataaaaacgagtaacgaattttgagatttgcaagaatctcaaaagatgtcatattaaaaaattcttcgatatccaattaaagactcgattatacggacttgctttggagaatccacaccaacactcaattcgattacctcgaaaacaaaagtagttcaacttttgataccatctcaaataatactaaacaagttcttgatatacatttattcccgatgggtgaaaaaggccacttttctccatgtgtctctatcattactatcaagtatcaaccctttttcactttatagaattaggcatttctcacgatcagttcctccttccaattattattctgtaacttttgaagtcatttctactccctaatgttacgcgttaaacatttatttataaaaaaagatctaagattttttccaattattccttcaaatttggtatttaattcgtgtaatgaagacaccagatttttccaagtacggttacatatataaactggggagttttctttgtttaggctgattaaagagacccaagtgcctcctacgctattcttcattttctccggtgaccaatccttttctttttcttctcctctccgtccttaaatagttatataggagcaggcattgttccttgatcaccaagaaatcgctttgacccctatctccttcttctgcaactctttttcagttttcctcaacacaatttctatg

SEQ ID NO: 21498 - DNA, 3003 bp, Unknown
  misc_feature (1)..( 3003): 2750-1469P.txt file - cDNA_ID_1989361; gDNA_ID_1972047; Annot_ID_178242
ttcatgggtttttggtcaccgaaacagattcagacacgtcaacatgttcgcaaagtgcactcattatccctcgttgacttctatttaaaactgacgagtaattattactatcaatattgggctctcgtatatggtatattatcgggcccaacccaaaacatatttgggccggattagaaactagtgagaaaaagggaatgttactatgttagtattattgttgactgttagagtttttttcgctccgcctctctgaaactcgccgctagtaagcttcttcttcacttgtgctcttcttcgacgtaagttttctctctttccttctcaaaggtttctctctcgattgacaatcctaagtttcctcgctcttgtggcaattttaattttatttttctggatttggctaaccctaatttcgtctggaaacaatgatattcaacgaaatggcgatttgtgatttaaaaagttgctctgtttttggtatctaaaatttgtgtaggagatgaaccgtattggattgataaggggatcatcatccaaggatgtagtccggagaacgtttgcagcagcagctagtaaagccaagaaaggtggcaaaggaggtggagccagcgatgctcctaaaggttccagcttgaccaaagagatcaaatccaccactgttgttggtgccaatactctcaaagacggatctgatcccaagatcttgcctgattctgattaccctgattggctctggcatctcctcgataagcgaccagctctcagtgagcttaggaggaagaacgtcgagactcttccctacgatgatctcaaacgttttgtcaagctcgacacacggggtaaaatcaaggagaacaactccatcaaggccaaaaactgagagatgtaagatgttttcaactctctcactgttgctgttttctttgtatgtgggaactatgcttgctaataagtagattcttccagttagattacatttccaaggcgttattatgctcttgtatgttctcagacactcttagtatatccaagaaattgctgcttcatcttttctctgcatgattctctttgaaaagttggaataggtttattcttacttgctctaagtatattctttcagttatcttacttttccgagtcagtaacattatgcccttgtaagttcttgatccttaagactctttattagtgaatccaagaaattgctgcttgtgtgagtgaaactcttggctcttgtttaatctaccgaatgatatgtccagcaagtgtgtaatacaaatccttctccggatagaggagatgagttggtcggttcttaaagacactgcaggtgtaactgatccatttaacaatcagatttattgtttactgtatgggacctggctcattgatattgcatcactattctgttggtggataccaactcttgttgtctatctctttgtggggtttgataccttcaaaagaaaggtaaagcaaatgttgcatcattatctcccctttgttcttccattattgctcttctttgctttgattgttacttgtctcctgtgatttgcccagttacaatttcatattgctttgtgttaatactagttaggataagtttcaatttaaatcggttttgatttaggtcttattggtctgatattatggcttttctctctctctctctatggtattgtatctgacaagtgctgctacttatttgctttatggttatatcctcccatgcccatgaaaggtttaagagtttgaaaaggagacaccactcatcacatgcttttgtgggtataacaaaaaataaagctaacttttttctctgctcacatgcttattttcctcttttgacaccttaacaatatcttgctttgtttttgtttcgttttttgcatgttccttcttaactatatgtactaaatgtatgatttagatatgttatggatataattatccaaatctgtggtcatgattgatagaggccacgagggcggacattttaaatcgctgatccgaatttgttcttatagtctctctactataatgtaatgggacataggttgggtgtagttgcccatccttatttgttgtctgaataaactcttacctatatttatttatttatatataagtgcaacggtactactatttccagaaagaaattttgatggttcatgtttccttctactcttttattttgctcttaagaggctttatcgacatataatataaattcaaacactgctgcaattctaacggatataaatcatccaataaaatctcagaaataaaaacgagtaacgaattttgagatttgcaagaatctcaaaagatgtcatattaaaaaattcttcgatatccaattaaagactcgattatacggacttgctttggagaatccacaccaacactcaattcgattacctcgaaaacaaaagtagttcaacttttgataccatctcaaataatactaaacaagttcttgatatacatttattcccgatgggtgaaaaaggccacttttctccatgtgtctctatcattactatcaagtatcaaccctttttcactttatagaattaggcatttctcacgatcagttcctccttccaattattattctgtaacttttgaagtcatttctactccctaatgttacgcgttaaacatttatttataaaaaaagatctaagattttttccaattattccttcaaatttggtatttaattcgtgtaatgaagacaccagatttttccaagtacggttacatatataaactggggagttttctttgtttaggctgattaaagagacccaagtgcctcctacgctattcttcattttctccggtgaccaatccttttctttttcttctcctctccgtccttaaatagttatataggagcaggcattgttccttgatcaccaagaaatcgctttgacccctatctccttcttctgcaactctttttcagttttcctcaacacaatttctatg

SEQ ID NO: 21499 - DNA, 3003 bp, Unknown
  misc_feature (1)..( 3003): 2750-1469P.txt file - cDNA_ID_1989364; gDNA_ID_1971974; Annot_ID_58717
acattaaccaggtcgggatcaacgtgctcacccaaaagcacgttctgcttctgatatcagacctagaaaacatcgaaaaagagctctacatcctggaatcgctctacacagaagcatggcagcagtcattcgagattctttgggttccagttcaagatttctggacagaagctgacgatgccaagttcgaggcccttcacatgaacatgaggtggtacgttcttggagagcctcggaaattaagacgagccgcgataaggtttgtgagggaatggtggggtttcaagaacaggcctatactcgttgcacttgatcccaaaggtcaagttatgtcaaccaacgcctttcctatggtctggatctggcaaccctttgctcacccttttaccaccgcaagggaacgtgatctatggagcgaacaggagtggaatcttgagttcttgattgatggcactgatcctcattccttaaaccaggtttcttgattgaataaaaaaacagagtactaataaatttttctttctcttgtgttacacgtaacctgaaaatctgtgtgtgtttcaaatgttttttatcagcttgttgatggaaaatacatatgtctctacggaggagaagatatgcaatggatcaaaaacttcacgagtctctggcgtaatgtagcgaaggccgcaaacattcaacttgagatggtttatgtcgggaaaagaaaccctaagaatggaatccagccgataatcaacacaatccgggaggaaaatctcagccatactttgccggacttgttccagatctggtttttctggaccagggtcgagagcatgtgggaatcgaagcagaggatgctgaaagcccacggaatcaaggggagagaagggtttaaagaagaggaaaaggaccttgttctgcaagaagtggttgctatgttaggttatggaggagaaggagatggatggggactggtgagtaaagcatcggacatgatggttcgagccaaagggaacttgttttctaggggtttggctgaatttaacgaatgggaagtcaacatccccacaaagggttttcttacagcgctcaatgatcatctcttaatgcgtctcccaccacatcactgcacaaggttcatgcttcctgagactgctggaattatacctaatgaggttgagtgcaccgagtgccgtaggactatggaaaagtattacttgtaccaatgctgccttgagtaagatcccataatactggggaacaagttgatttggaagccaacaacttgttcctataaaaccaaataagtttgcgtcttttttttcctccttgttgtgagtttctctactcttcatgttgttgttgttgttctgctctactaaaagcagagagtctttgtaataaaatttgtgtgtttgagatttcgaaataataaaggtttatttatcggaagcttctagaacaatgaactgattgaacattgcttctttgttgatttcttgatccttaagctcctagaacactagtgaactaatacacaagtaacacaagtgaccgtgacatttttttaatgtgacagtaatatcttttgacatttagccttttgaaatgaaattacttaatgctagtaaaatataggcaaagtaaaaggatggatcaatcaatcaaaagatgaacagtcttttgagtccaaatcacatatcgtaatatatctaatagaaagttaaaagtgttagtctacattattgaaaaaataaaccatgagactgattgctgtattacaaagggggaatacaactttaaacgacaaatcagcggttcctagcctgtagttaatgtaaaagttaaatcttccaaaccatcaaatactttttaaatattgcatatatcggattcgatttcgaagaagctcttatacgtatttctaatgatgagatattaaaatttgttgcgtatagaaacaacaaatttaatcctacctataaacgttatgctaaagttaatagaaaaaaaaaaaaacatgcatagaataaacccaaagcataacaatcttatttttagaaaagtgattgtctttagataaatatatccttggttactcttttattgctttttttagccttatccaagatatatcattgagcttaagaaattctttagttttacccaaaagagagcaaagaatcttaacttcacacccttttgttcacttcactcttgatgctattttctgaggcatgcatgagataaaatcaatgtaaagtaacttaaagtaaatgacagaagccataaattataatattctatggcatgaggtgaagtaacataagaatataagcaaagtagcaaacaaaatgtgtcttatcttttaatgtcctttagtaacataaaaatgcgagaattaattagtagtccagtgatcatcattatgatggagaaaagtgaggaattcgtctccaaacctcccaagaaaatgacaaaaatctgtatattttaggatctaaatttctagttggcaatgaagttaatatcattagtagcaatattaaaatagtgtagtttttgatccacttttagtcttatatgaatttgaattcagtaatacacacataaagaaagagtactagctctaaagatttacgagtaaaactcgcaacatttcagtgaaccattttcttcccattatgatttagttcttatttactatatatattcgtgtaaagtaggcctatactttattgtgctaacgatattcacgtggacgggaactatatatctcattaaaacttctataataagccaccaaaaaaagaaaagcaaaaaagaaacaagattatataattgatattctttgtatgtttaatttaattgttgcagaagcaaagaagtcgattctcaatttccaaccgtaactaagggggagaaacgagtatttaaggctaacctcacatagcaaaactacaaaccaataaagacagcctcttcttctaacaaaagcaaactgaaccaagaatg

SEQ ID NO: 21500 - DNA, 3003 bp, Unknown
  misc_feature (1)..( 3003): 2750-1469P.txt file - cDNA_ID_1989365; gDNA_ID_1971974; Annot_ID_58716
taatcagtttcatcctctctattacagtacccttcctttgtcaatagtcttagttggggtcggggatggaccatgggacatgatgcaggaatttgatgataacatacctgcccgagctttcgataacttccaggtaagcttctttttttcatatcatgacattgaagattgcttcttttcttcagtttggaaccatttttctaacatgtttgctctgtttctagtttgtgaacttcacagagatcatgtcaaagaacaaagaccagtctcggaaggagacagagtttgcgctgtctgctctcatggagatccctccacagtacaaagcaacgatagagcttaaccttttagggtaagggacccaaatcaaaactctgataggtgtagctgcgagaaactgctatattgttaaacaaaatgctcacctttctctttcccttacatttttgcagggtaagaaatggaaatatcccacagagaatcccacttccgccaccggtgcagagtggatcatcattctctagttcccggataccgaattttgaaccgagtgtacctccttatccatttgagagcaagcaaatgagtagtgcagacgatattcaggtaattagtagaaacttaggaatctgtttgaaatgttaagtgaaataagagctttggaactttttgttgttaaactcgtttgtgttattttccccttgaacagctatgtccgatatgtctgagcaacccgaaaaacatggcgtttggttgtggccatcagacttgttgtgaatgcggaccagatcttaaagtgtgtcctatttgtcgtgcgccgatccagaccagaatcaagctttactaacaacaccattgacatgcagctttgaccagcccaaatcccatttcttccagagattttcagatctttctgtagaaaattaaagtgttcttttgttctttgattgaattcctaaactttatcttgttcataaaatttctttgattggattgtaagaattatgtatttgtctgttggctttctttgatttttcaagattcgattaaaccaaagttgattgcttaaacactttaattttgatttgttttgtcgacataagcaatgagaaataaatggatgaatagcccaatagaagcccattagcctgaaattgggctacaagcaaacataccaaataaatagtagggaagagcagaaataatcacaccactcatcagttatccattcctttctttttacataaattttgtcactttttctacaaacgattcttcgcttctgtgaaatttgataaagcgaaagtttttttcttatggattctcttcgattcaacctccaacaatctccatttcaattgaaacctagaattctccgaccaagaatcaccaacatatcaaaccgaatcgatgaaaccgatcctcgaccatcatcctcggccggtaggatccaaaggttagtacttaacaacgaaggtcggaccaaactaaacgccgatcctgaccgtgaattctattcatatccacggttcgtgaaccacgtagatgatagtttcatatcctccttaaccgaactatacagaaaccggttgagacccggttcgactgtacttgacttgatgagctcatgggtcagccatcttccagaagaagtgaagtacgagaaagtagtagggcatggtcttaacgcacaggagcttgctcgtaaccctagactcgattacttcttcgtcaaggatcttaatgaagatcagaagttcgagttcgaagacaagtatttcgacgctgttttgtgttctgttggtgtacagtatctacaacaacccgaaaaggtacgttaccgtaaaccaaaaccgatttcggttatgtcaagaagattcctaaaccgggtctttattatataaaccgcaggtgtttgcagaagtgtatagagtgttgaaaccgggaggagtgttgatagtgagttttagcaaccggatgttttatgagaaagcaattagggtttggcgtgatggaaccgaatacagtcggatccaattggtggttcagtactttcagtctattgaagggtttactcagccggagatcatccggcaacagcctggagctcagatatcggttttgactcggcttatgggttttatcggtttagcttctacgcccgatccttttaatgctgtcattgcttataaaaatttcaaacctatttatgagtaacacgcacataaaaaaaagtgtataagaattggatgggaagtttttgaagaaaaggaaaaaacctctcaaccaagtccagctggagaaacttacaatacaaatttttaaaaagtggagaatgaaattacagatttcaatcaaattggaagaacctgtattacacaagaaataattgacagaaagattacacactttggaaaatataattaatatatagttttcaattagcatgcattgtatgtgattcgttttgttcgaagattcatggacaatatccaagcaaggtagccttgtccctcttcaaacgagtatcacgagttgcttactttatggtttagattctataataacagtatatatattagaaggaagtcttttatattaaaacaaaaatccattgtatatgtacactatctatgttccatgcatgtgtcttcttaaatagctatgaagtcccttattttactatgtacatactaaatttagttatgtttatcaggataactcgttgtaccatcagtatataaactttgaaatattaaatgtttctcactactagtattagactgttgcagttgcgttagagacgtttcatatttagaaataatattatccaagacctgaaattcttattattatgaaaattatgaaatatcgataagggaaaaactgtatggaagtgtaaaagacaccaaaacagatattgaaccaaaggtgaagcaaagaagttgattcaaagttgccactttatttaaccttttgcaccagtatatatacacacacatg

SEQ ID NO: 21501 - DNA, 3003 bp, Unknown; identical to SEQ ID NO: 21500
  misc_feature (1)..( 3003): 2750-1469P.txt file - cDNA_ID_1989365; gDNA_ID_1971974; Annot_ID_177573

SEQ ID NO: 21502 - DNA, 3003 bp, Unknown
  misc_feature (1)..( 3003): 2750-1469P.txt file - cDNA_ID_1989366; gDNA_ID_1971974; Annot_ID_58715
atacccattttcaaggacaccttagaaagtttcgagttttctattaggtaattgcatgttgaatctgttacgttcttcttgtgattccccttttttctggcccaaagaggataagattctaaaaatctgaatctttgtatgcaggtgtattgatcttgaagccttaaagtttgtgtctttttgttaatttgaataaagtttgatgggaggagggaattccaaagaagagtcgtcatcaccatcttcatcatcatgggcttctcatcaaagttatcctcaatatggacctgatagctacaactatcctcctccacccacttatgctcccgctccatctcctgctcctgctcctgctccggtgcctgctccatctccggcttccagttatggccctcagtatagtcaagagggttatgcatcacagcctaataatcctccaccacccacttatgctcccgctccatctccggcttccagttatggccatcagtatagtcaagagggctatgcatcagcagcatcacagcctaattatcctccacctccttcacagagtcaagttgctgacaggaagaaatttgatcggaggtattccaaaatatcggataactactcttctttactgcaggttagtttaagacaatgcatatgctatacacttggattttcccctcaaaggttctttggaaactgaatctagcatgtgtctgaattgattccaggtgtccgaggctctaggccgtgcaggtcttgaatcttctaatctaatcgttggtattgatttcaccaagagcaatgaatggacaggtttgttatattattcttattcttacgttttgaatgtaaaggagaagccaaactaattggttttggtactgcaggggccaagtccttcaataggaaaagcttgcatcacttgagcaataccccgaatccatacgagcaagcaattactatcattggaagaaccttagccgcctttgacgaggataacttaattccttgttatggttttggagacggtatgcactgttttctctcttctcgattctcataagaatgtatatcaatcggatcatcattgacttgctttcatctctttgcagcatcaactcatgatcaagacgtgtttagtttctatccagagggaagattctgtaatggatttgaggaagtattggctcgttatagagaaattgtacctcagcttaagctcgcaggtttatttcctgctctgacctgcactggccaattctatatctccttgtgaaacgcaagttataaacttaaaactgtgtttttttttcctgcgaacttatgtatttcaggaccaacttcttttgccccgatcattgaaatggcaatgacagtggttgagcagagtagtggccaatatcatgtgttagtgattatagctgatggccaggtactgattaatattttgactgcctaagctgtgtatgatcttctggttttgtgtctagggatatcaaagtggacccattttgttgtttcaggtcacaagaagtgtcgataccgaacacgggcggctaagtccgcaagaacagaagacagtagatgcaattgtgaaagcaaggtgcgaatatttcaatcttttgactaatgtttcttccattttaaagttctttactttgagtgtaatgttataaagtgttatggtatgtaatcagtttcatcctctctattacagtacccttcctttgtcaatagtcttagttggggtcggggatggaccatgggacatgatgcaggaatttgatgataacatacctgcccgagctttcgataacttccaggtaagcttctttttttcatatcatgacattgaagattgcttcttttcttcagtttggaaccatttttctaacatgtttgctctgtttctagtttgtgaacttcacagagatcatgtcaaagaacaaagaccagtctcggaaggagacagagtttgcgctgtctgctctcatggagatccctccacagtacaaagcaacgatagagcttaaccttttagggtaagggacccaaatcaaaactctgataggtgtagctgcgagaaactgctatattgttaaacaaaatgctcacctttctctttcccttacatttttgcagggtaagaaatggaaatatcccacagagaatcccacttccgccaccggtgcagagtggatcatcattctctagttcccggataccgaattttgaaccgagtgtacctccttatccatttgagagcaagcaaatgagtagtgcagacgatattcaggtaattagtagaaacttaggaatctgtttgaaatgttaagtgaaataagagctttggaactttttgttgttaaactcgtttgtgttattttccccttgaacagctatgtccgatatgtctgagcaacccgaaaaacatggcgtttggttgtggccatcagacttgttgtgaatgcggaccagatcttaaagtgtgtcctatttgtcgtgcgccgatccagaccagaatcaagctttactaacaacaccattgacatgcagctttgaccagcccaaatcccatttcttccagagattttcagatctttctgtagaaaattaaagtgttcttttgttctttgattgaattcctaaactttatcttgttcataaaatttctttgattggattgtaagaattatgtatttgtctgttggctttctttgatttttcaagattcgattaaaccaaagttgattgcttaaacactttaattttgatttgttttgtcgacataagcaatgagaaataaatggatgaatagcccaatagaagcccattagcctgaaattgggctacaagcaaacataccaaataaatagtagggaagagcagaaataatcacaccactcatcagttatccattcctttctttttacataaattttgtcactttttctacaaacgattcttcgcttctgtgaaatttgataaagcgaaagtttttttcttatg

SEQ ID NO: 21503 - DNA, 3003 bp, Unknown
  misc_feature (1)..( 3003): 2750-1469P.txt file - cDNA_ID_1989366; gDNA_ID_1971974; Annot_ID_177572
tcctcctccacccacttatgctcccgctccatctcctgctcctgctcctgctccggtgcctgctccatctccggcttccagttatggccctcagtatagtcaagagggttatgcatcacagcctaataatcctccaccacccacttatgctcccgctccatctccggcttccagttatggccatcagtatagtcaagagggctatgcatcagcagcatcacagcctaattatcctccacctccttcacagagtcaagttgctgacaggaagaaatttgatcggaggtattccaaaatatcggataactactcttctttactgcaggttagtttaagacaatgcatatgctatacacttggattttcccctcaaaggttctttggaaactgaatctagcatgtgtctgaattgattccaggtgtccgaggctctaggccgtgcaggtcttgaatcttctaatctaatcgttggtattgatttcaccaagagcaatgaatggacaggtttgttatattattcttattcttacgttttgaatgtaaaggagaagccaaactaattggttttggtactgcaggggccaagtccttcaataggaaaagcttgcatcacttgagcaataccccgaatccatacgagcaagcaattactatcattggaagaaccttagccgcctttgacgaggataacttaattccttgttatggttttggagacggtatgcactgttttctctcttctcgattctcataagaatgtatatcaatcggatcatcattgacttgctttcatctctttgcagcatcaactcatgatcaagacgtgtttagtttctatccagagggaagattctgtaatggatttgaggaagtattggctcgttatagagaaattgtacctcagcttaagctcgcaggtttatttcctgctctgacctgcactggccaattctatatctccttgtgaaacgcaagttataaacttaaaactgtgtttttttttcctgcgaacttatgtatttcaggaccaacttcttttgccccgatcattgaaatggcaatgacagtggttgagcagagtagtggccaatatcatgtgttagtgattatagctgatggccaggtactgattaatattttgactgcctaagctgtgtatgatcttctggttttgtgtctagggatatcaaagtggacccattttgttgtttcaggtcacaagaagtgtcgataccgaacacgggcggctaagtccgcaagaacagaagacagtagatgcaattgtgaaagcaaggtgcgaatatttcaatcttttgactaatgtttcttccattttaaagttctttactttgagtgtaatgttataaagtgttatggtatgtaatcagtttcatcctctctattacagtacccttcctttgtcaatagtcttagttggggtcggggatggaccatgggacatgatgcaggaatttgatgataacatacctgcccgagctttcgataacttccaggtaagcttctttttttcatatcatgacattgaagattgcttcttttcttcagtttggaaccatttttctaacatgtttgctctgtttctagtttgtgaacttcacagagatcatgtcaaagaacaaagaccagtctcggaaggagacagagtttgcgctgtctgctctcatggagatccctccacagtacaaagcaacgatagagcttaaccttttagggtaagggacccaaatcaaaactctgataggtgtagctgcgagaaactgctatattgttaaacaaaatgctcacctttctctttcccttacatttttgcagggtaagaaatggaaatatcccacagagaatcccacttccgccaccggtgcagagtggatcatcattctctagttcccggataccgaattttgaaccgagtgtacctccttatccatttgagagcaagcaaatgagtagtgcagacgatattcaggtaattagtagaaacttaggaatctgtttgaaatgttaagtgaaataagagctttggaactttttgttgttaaactcgtttgtgttattttccccttgaacagctatgtccgatatgtctgagcaacccgaaaaacatggcgtttggttgtggccatcagacttgttgtgaatgcggaccagatcttaaagtgtgtcctatttgtcgtgcgccgatccagaccagaatcaagctttactaacaacaccattgacatgcagctttgaccagcccaaatcccatttcttccagagattttcagatctttctgtagaaaattaaagtgttcttttgttctttgattgaattcctaaactttatcttgttcataaaatttctttgattggattgtaagaattatgtatttgtctgttggctttctttgatttttcaagattcgattaaaccaaagttgattgcttaaacactttaattttgatttgttttgtcgacataagcaatgagaaataaatggatgaatagcccaatagaagcccattagcctgaaattgggctacaagcaaacataccaaataaatagtagggaagagcagaaataatcacaccactcatcagttatccattcctttctttttacataaattttgtcactttttctacaaacgattcttcgcttctgtgaaatttgataaagcgaaagtttttttcttatggattctcttcgattcaacctccaacaatctccatttcaattgaaacctagaattctccgaccaagaatcaccaacatatcaaaccgaatcgatgaaaccgatcctcgaccatcatcctcggccggtaggatccaaaggttagtacttaacaacgaaggtcggaccaaactaaacgccgatcctgaccgtgaattctattcatatccacggttcgtgaaccacgtagatgatagtttcatatcctccttaaccgaactatacagaaaccggttgagacccggttcgactgtacttgacttgatg

SEQ ID NO: 21504 - DNA, 3003 bp, Unknown
  misc_feature (1)..( 3003): 2750-1469P.txt file - cDNA_ID_1989367; gDNA_ID_1971974; Annot_ID_58714
gtttggatgcattttcaatattaatattatgatttcactgaatttcaggctcatcttttttcattagattccaaatcatttgtttattagtttgaattgtgtaaaacatttttcacgcttcatggctctaattctgagattttgtgtagctgaatcgtttgcaaaatgaaggatactacggtggggtaaggttgctaatggcgatatgtaaagtattccgtaactattgcaaagagaatgacattcaacttcaccaagccaacttctctctttcttatgataccaatatccctaggcaggtactgatcattttccttcccctttctctctatgtttttttcttttctctgccaccaacgcttatcttttcaactttgatgctccttccagacagggctttcgggttctagtgccatcgtatccgctgcccttaactgccttctcgacttctacaatgtcaggcatttgatcaaagtacaagtccgccctaacattgttctcagtgctgagaaagaacttggcattgttgctggtcttcaggacagggttgctcaggtctatggtggtcttgttcacatggtcagtgtctcccctcctatctcatacattgccgttggttccatcggttttatgactttttatcatcttcttcactttgcaggattttagcaaggagcacatggataaattggggcatgggatttacactcctatggatatcagtctcctccctcctctgcatctcatctatgctgagaatccgagcgactcagggaaggtacttacacttattcaatgattctggtttatgcatcaatcaagtgaaattcctcaaaaagcatttatgacactagaactcagatctttggggcataactcagtagaatttagaagtatctctctgttagatgtttcataatattagcattgccttctaatgcaggtacatagtatggttcggcaaagatggttagacggtgatgagtttataatctcatcaatgaaagaagtcggaagtctagcagaagaaggtcgaactgcattactcaacaaggaccattccaaacttgtggaactcatgaaccttaatttcgacattcggaggtaaatataattccagacaaaactcgaacctatacacaacttaagattaaactccaagctcacatgatgttgaaatagatgggaatacacacatataatagtgatgtctttttttcccgataggcggatgtttggggatgaatgcttaggagcaatgaacatagagatggtggaagtagcaaggagggttggtgcagcctcaaagttcactggaagtggaggagcagtggtggttttctgccctgaaggtccatctcaggtgaaacttctggaagaagaatgcaggaaagcgggatttacgcttcagccggtaaaaattgcgccttcatgtttgaatgattctgacattcagaccttatgaaagccttgatcaagtcttcttattcacacgatagagccattttccagagaaataaacatgtgagctttaattgggtggttgttctgtttctttttcttgcccatttttgttgtttgttccttggcttatactaatatgtttgttttgtttctttttccacattaaggtccaattttttatattatattaaaagaactaaagaacagatgatcaaaattgaagtagtaatgatatttatttgccatatttgtgctcttttttgttttgttgaaactgtatatacagaagttggcagatatagtgtggagaaaaaaaaagaaatatagaattcagagatcattatttggcagaaaatgaagagaaatcgtgccagacatgttcaatttctaatctatactattactagtaccctacttgatgaaatctgaacaaaacatgtgtgtgtttcagaatcacgaattcgaattgctactagtgttttttacaatcttaatggaaataaaatggttatttgatcgagtaataaatattaaaattttgaaatcggtctggacttggacttggacttggacatggtgggccaataataaacaaatccaactaatcttttccagatttcatgattgaaacgtaaagtgaaagattaaacaagagaaaaaaggttagatagctttctgaacaaaaggagagaatttggggatatagatagaatccgccatttaagatcccttccctttgacctgttgagtgttgacaacctgaaaagaaacaaaaaaagaagaagaccgcttcatcttctcaacaccacctctgtcttattgctctcttttcttcttcgtcgacttctctcacacatacaaaaggtttgggattttttttggtagaatctttttaagttatctatcgaaatcagtttgatctgttttgtttttccctcttctcttctgggttgttggtgaataaatctacttttcatcttaattaggacaaatctctctaattaaaacgcctcagattttgtcttcagttgttttgttttaaaccctaagttacttgtaagttaaatgaaatctacaattcttaatttcttgtttccaaaattgtgaaaaaatccaaacatatatagaatagacacgtaacggctcaaagtcggtaattggaggtaacgtgattgaatcttcttcatcaatcataaatcttctctcttaagaattaagacgccgcctcattacacctgttccataatcatcgtcaatatattcattctgcaaaactattcttcttcttctttcaaagtcgtaattgctctctctcacccctaggttcttaagtcatacccattttcaaggacaccttagaaagtttcgagttttctattaggtaattgcatgttgaatctgttacgttcttcttgtgattccccttttttctggcccaaagaggataagattctaaaaatctgaatctttgtatgcaggtgtattgatcttgaagccttaaagtttgtgtctttttgttaatttgaataaagtttgatg

SEQ ID NO: 21505 - DNA, 3003 bp, Unknown; identical to SEQ ID NO: 21504
  misc_feature (1)..( 3003): 2750-1469P.txt file - cDNA_ID_1989367; gDNA_ID_1971974; Annot_ID_177571

SEQ ID NO: 21506 - DNA, 3003 bp, Unknown
  misc_feature (1)..( 3003): 2750-1469P.txt file - cDNA_ID_1989373; gDNA_ID_1971974; Annot_ID_58705
gatgaacaaaaatatcaacatttttcgcataaataataaactaagagcttctatatacaaaattcaagacatttttggatttggtttgacttggactcgtttggctctgctgtacaaatatactccagctagtgcagtcgcggtacctgtttatttaacaagtgattatatattgcttcaataaaatgaacaagtgtaacaaatcctttactaatatatactactagtagttgtttacctatagagttaagaggtgagactggagttttgaagaaaagaatggatgatgtaataaccaccacacgcttcacgcagttccctacagagtgtgttactggagacaccatctccaatatcatatacgatacctacaacaacaaccccaatttttatgtgttgattagaagcctaacactaaccgactttacaaaattcagtacagtttttctgaaacggaggaactagacggaccaacctgttggtagctatgcaagcaaacaccagcaagtagagacatgatgcaaaactcttttaccgacaaaccctggcttgtctgtcaagcaaccacatacaaacacacattagttctttctcttttagatcatctagctatatcggtttatgcttttccacttactgctacttgtaaatgcgaaggagtaaccttgaacccatcgatgaggattgctaaaggaaccagtaagataaaggagataatggttattatagagaaaaggttgatgttgtccaaagcgtcctgtttcaatatacaaacattaatagatttcgattactagtttctttcttgagatcataaggataacttatattcaaactcttttacctttccaaccatgaattttttactgaggacattgcgtgattgattcgtcacattagaagccattgcactgcagaaaccaatcctggtttatcccaataccatgaattaatcaaatcaattaaaacttcatcaaaagtttatcaagaatactattttttttgttcttgttcttgttgttcataccaattgaaagaagcttctgtgaaagatgctaaagagactccagcgacaataggtaacaacgaacaaacaatccacagactcggccactggacattaatcaaaatttcaaagattatgtctgaaaatataactctcttgtataatctaaggttatagattaagtctgaaacagagcgtatctttgttttgcttacctcaccgagcaagagaacagaaagcaagacggtgaagaaaggctccattgctttgatagtgtgggtgaaagagacatttactcttcctaagctcacatttgttaacaagttccctaacgtgtgagctactgctagttgtacgatcaccgtaaactggagaggattacaattgaatgaatctctctgtttttagggtttgacggaatcaatatttgatttacctgagaaggagaaaatttggggcgtggatggagtttaaggagccacattatagcaatcatcaacgttccacaccctaattgaaatgctgttacagtcgctggatatggataaaccctaagtacctggatcgatgaatgaacaagtttcatacttgtatgaagactgataataggttcgagtactgcttcttgcattgaaatggactgtttaattaaatgaagcaaagaaggaacctgtttgttgaaaatgttgtagtagatattgagaaggtaccaaactccaaacatgcctcctagcttcaaccctttaaccaaacttccagattccaaatctcctccttccacattctccggaactgtagctgacttgagcttgaagccattaaatctaaggttcggtctccaaggataagagttagaagatgaaaaagctctgcttcttctgctcaacgctgattcaggagtagacttggcaaggaacaatggagatggaagtcttggatttggatttagaaatgtgagagcgaacataattttttcctcttatcagatgctccaagatgtgcataaatcctccggcatttgttggaatttctcacaagtaaccgactcttgctaactttttcttcttcctctattggtaagagttatgttacatgagtctacctcctcattttcatgtaagaagaaaaaagtttgttttgtttttggatatactgcaaacttgatattagtattatttagaagagttgtctttattatgtgacttttctctcgttctactatctgaatgtttttgagtatgataaaaataactcacatgccgatgccgacatttttttcaatataacattggctcgattttatttatctttcctcataagagccagtggtatttgccggtattgtttcttctcatgttctccattccatgtgtgttctgtaaataatgttatggaaatgatttgacatacttggtcactcatttctttacaaaggggccgtggttttcttcgtttataataatatcaaaaagttggtaacgctataaataattatttaaaataaagtttacgtacgaacatgacaaattactgaccacaacaccaattgatttttagtgtggaatttgaaaatgtcaggggagaattgtatggatgatatgaaaggggccgcgttgaaacatgtggatgttgtattgtatgctcctgagtccacccttttctttccgtgttatttcatactattacaaataaggttggtcccattgctttgatcacattattgattataccatttacttattatgtcagtgttggtacaggtcattgatcacaatttgggctttaaacggagaggatggaaactgaattctaaatacatttcggcccatttagggtccataaccttctacgccaatcagaaggtacgtcgacatgagcaacttggtcaattttatgacataaataaaataaaaataaaaaaataaaaatcgatctgaggggttttagaaagaaaagaagaaattcgggagtcggagaaattgtcgggtggatcgatg

SEQ ID NO: 21507 - DNA, 3000 bp, Unknown; identical to SEQ ID NO: 9043
  misc_feature (1)..( 3000): 2750-1469P.txt file - cDNA_ID_1989374; gDNA_ID_1971974; Annot_ID_58704

SEQ ID NO: 21508 - DNA, 3000 bp, Unknown; identical to SEQ ID NO: 9042
  misc_feature (1)..( 3000): 2750-1469P.txt file - cDNA_ID_1989375; gDNA_ID_1971974; Annot_ID_58703

SEQ ID NO: 21509 - DNA, 3000 bp, Unknown; identical to SEQ ID NO: 9042
  misc_feature (1)..( 3000): 2750-1469P.txt file - cDNA_ID_1989375; gDNA_ID_1971974; Annot_ID_177557

SEQ ID NO: 21510 - DNA, 3003 bp, Unknown
  misc_feature (1)..( 3003): 2750-1469P.txt file - cDNA_ID_1989376; gDNA_ID_1971974; Annot_ID_58701
agaccgttgggtgtgtgcgtacgtgtcactgacatactgacagttggacggtgaaaactttgttacctaaagaattaaagaggagcatcgacgtggcggcctttgagcccggcgcacgtgattcttcgcagcatcgcacgtgcatgggctcaagcaaagtgcttctaaaggcagcaaacataagagggaaaaaggcgtcaacgccgctgcttattacagattttgaaaaccacgacaaataatacagttaatttgagaaactgtttatttagtctacgtaaagttatgcgcaagtacataaaatccatattaaatttttagaactcctaaatactcctactaatctcgttgacatatatgatcattctacatataaaaatatccaagtggctcacataaagttcagtttttactatatatgagactaatttaaagagagtaatttggagtgtcatgttactataaattgtaaattgttcaaaagagggggtcttttagttcgtttatcaattgtttatatagaaaaaaaaaaaaaaaagaataaagaacgaattgcataggaatgcacatgatcaggggccgagttcccataagttgattctctctgtcttcgggactcatcaaacacaaagttacgatatttcctgtaaacccgtttccaactaattactgtattatgtaattttgtattgttttatacccggtacccacttgaggattttaatctgaattgtttaagaaattttaactgtaaatttcataaaattactactcattagttgtacttaaaaaaataataatttttatctttcggaggatatttatctactaaattcacatgatatataggtatatgttcatatgtgtagaatattgatgctttaagagagcttttgtagctgctctaactggattaaaatattcatgtcagaccattatacatattagtctgtatagtgtatgctcatgagaccagagagagagagagagaaatgattttcaaaagataaacatagaaaagagaagctctaattaatcgaagatataatataatgtgtatttatagatcagatcacatctttcttcttcttcttcttcttcttctttcttgatctttttggttgttacgagcttcttcttctctttctcttctcaagctcattagaacatcaatttaaaacagaaacttttactatagaccacgataacaaatctgggtttttgttgttgttctctccatgcagagaagagtttcaaaaaggaatacaggatctgtggcttttgagtaggttaattaattagtcgacaagaaaacaaaggtatgtaaccatttgatcattctccattgcttgttgtctcgcttagatccttatcatatttaaatgctaaaatggatgattttttttgagacttttttatatatatatatatatttataactaaactttgatagataatctagtttagttagtagttgcacaaaatacattttgaattctccgttaaataggcgtttcaatttataagaataagatttatgataattttcgggttcaaacttacatattacacgttttgttatatgttacacctagttaaacatatagtgtttcatctagctatgcataagagtgtctcaccataaatcaaatgggcagtttgtgtttttttttctttatatagactacacagaatatatagtgtgcactatcttacgtttgtccggtgtgtcaatgttgatttttgcatcaagttctccttcgacaaaacaaaatgacgatatatatctatctatatatatatatacaaactgtattggcttcgtactatatacatacgtcagtcttattaattctacaacgcagatcaaaatttgaattttgactaggctttaatgtgtacgattaccttatacaagtgaaaaagggtcaatcgtacgtttacccttaaatttctttttgttagtaacatatcgaaaaataaaccgttttatatatattttcaaaatacttattcttcttgttaatgctgtcacatattataaatcattacaatgttttgacaaataaaagaaaaatcattattacaaatctaatcgttttaaaatcctagggaatcctactagattattattactattgtagaccttgtttcttttgtcacattaattaataacaataaaataatatatatttttaaaaatatttttgttttgttttgcattgtatattatttagctgtagatttgtaatgggccacgtaattgggccatgctaagacccggcaaacccatgtgagatatatgatctcccgcactatagtccacgttatctcactgatatctcattattttaacaataagaccgtctcttaattttattacaagttttcttttactcttgtagccttaaattttaggctgaaaattaaagttttgaaaaaagctatagggagggactatgtaaaataaaaaaatgtacgttaccatcagattttaccataaagagccaaaaataaaatatgcaaaactccactaaaaataatattaattcccctagccaacaaaaaagattcagattcatatcccacgcgctcgttcaaatcctctcattcgccacctgatcaaaccaatctcaatttgaaaattgaaatagacaaaatcgtgacattgggacataaaaaagcactaggacaaaattctagtcgacgcaaaaaaaattcgaaaaacgtgagtcagcgtatgtggtttacacgcgccaaagtgggagcgtgagtggggtttgaatgcacctgaaactgtctggtcaataagttaaagtgcatgggaaaaatcttggttgctgtttcctatatatctctctttttaccatcaacatgttacatatatatatggacaaaaatctgtatatgtgaatgcatataggagtgtgatgtatttatataagttagtaagctttgttctctttctctatttttttggcaggtatataaaattttaaaatg

SEQ ID NO: 21511 - DNA, 3000 bp, Unknown; identical to SEQ ID NO: 9039
  misc_feature (1)..( 3000): 2750-1469P.txt file - cDNA_ID_1989377; gDNA_ID_1971974; Annot_ID_58700

SEQ ID NO: 21512 - DNA, 3000 bp, Unknown; identical to SEQ ID NO: 9035
  misc_feature (1)..( 3000): 2750-1469P.txt file - cDNA_ID_1989378; gDNA_ID_1971974; Annot_ID_58696

SEQ ID NO: 21513 - DNA, 3000 bp, Unknown; identical to SEQ ID NO: 9035
  misc_feature (1)..( 3000): 2750-1469P.txt file - cDNA_ID_1989378; gDNA_ID_1971974; Annot_ID_177546

SEQ ID NO: 21514 - DNA, 3003 bp, Unknown
  misc_feature (1)..( 3003): 2750-1469P.txt file - cDNA_ID_1989380; gDNA_ID_1971984; Annot_ID_58754
atcacaagtgaaaatttacagctactcctgagttttaataagcttcatatgttgattcgctatgttttttcatttacattttattgttgaaaatagcacaatcaattacaaaaactaacagttagtttacaatcatctgtgcatggtttcagttctgtcagaagggaatcaaggttaccgtcgtttgtcctggtccaatagaaacctggaatggtacaggaacatcaacttcggaagacagcaagtctcctgaggttggtacttattatgattgtgattatttgattaagttgtgagcagcaagtacttctcccattgcttgattcattatttccttgtagatacacgtagaatcatattctttgtcaacatttggagattctaacttcagctccttgctcaacttgatttctctcaagcatctattctctttgctacgcagaaacgtgtgtcatctgaacgatgtgcagagctgactataatcgctgcatctcataacttgaaggaagcttggatttcatatcaggtacatctttataaatattgcatatgtgatactcggtttagatgtctgatatataagtttctttttcactgtttttcagccagtactactcgtgatgtatctagtgcagtacatgccttcccttggcttctggctcatggacaaggtactttgctcatccattaattttcttcaaaagttaccggtatgagatgtcgttttgtttccattataatgtgacaaacacatctgacaaagagaaaacaggggcagttattactctgttgaaagcagtcttttgattaaaatgaacggcttgcaggttggaggaaagcgtgtggaggtcgcggaaaagaaaggcaacacatactcgtgggatttactgttcgggaagaagactaaaacaaactgaagctgattctctagaagatacacatagatgtggttggttgagccttagtccgtaaatgtggttggtgtttgtttgctagtttgattgttaaataactaccaaagcgtcgaaaaatgttttgttgccttgtgaggtgctcaataagtaagaaaagatgtgatcttctgtgatttagctactcgtacacacaaacaaacacaaatttaacatcatccgagtgtagagaaatcaaaacccttcaaattgagtagtttctctgcgcacaaaggttttcagatgcagctacgaggtaaccccagctgtgtattcatccaacaggcttttgatcccactggacttcagttcctacaaaagaagaaccgaaaagaaagctatatgatgcatacattgaagactaacgaaagcttctggagtttgacttgctgccagaaactcacagacaatactcctgccaaagctgcagaaggctgattagctggttttgcaacacgaatagctacaacaccgttcattctttccttctcttcagaataaaagtttcggtaaacttgaacacctgcagatagaacatcatttcaggttagaacaaagtccacatagcaaaagagacgctttccaaacgttctatgttatggtaaagatcttcaaaccttcttctatactttcaactccaggaagaactttggcaagaccctccactttcagcatttctgagaatgaagtataacggtgaacgtcctgccctcatcaaaatggttagtaacaagaggtatagtgtttgcctcacaaggaagaattgacagagatacaagattgatgactacctgaacttcaagcagcaagcatttattgaacaaaagaaaatctcctgaactaattctgtgagtaaaccaattttgaagtcaataagacaatctaaagctattggaatcagcaaaacagaaaacccggaaaagcaagcacaagagatgaatgtgaattaacatttgcacaaagataaaaacatcagacctcatgtagtctcccactgcgcatcttccttcaacagttttcaaaccatctgacaaattgagaggcacccggaaataaaagtgagattgagcaaatataattgtaatactacaatcaagtaaccagaaaatgtacctttcaattgggtgaagtaaggctcttggacatgaagctcaaagttcacctccttcaacatctgaaacaaagaaccttttctgtgtaaaaattccaaaaactaacttttcccactctgttttgatgcaataatagttgagaactaaagttttcatatagacttacatttattaagtcatatcccaagccatgaatcagtttgctgtatttttccaagttagaatttttatcaccctcggaagctagacattcagacaaagccgttgctagaagcttgtacaccgcagatttttctgttaattgaaacatttatgagaaaatttcagttatttctctccagcattcaagtttcataatttgcttcctaattagcaaaacgtacctgttgaatctgtagcttccccaaggagatgaagacaaaaatctctggtcaggtcaagatcgaaacttggaacagattcgtttaaatgagatctcagactaaaacggagaagtgattccatgcattctcggagatccaccgacttcgttcccggcgacattggttgctccattttcgtcaaaaacgccaacgttaagcctcttaattaagaaatattcgtgtaaaacaccctcaagtttgtagatattacaagatgttctaacccaatctgaaattggacagtaacaccttgatgtcgttttaaaacggaagatcagagatcagacgttgtcgtttgaagacggaagatcagagcgataagtcaggtatctagaaggtgacacgtgaggagcacgtgaagcttgcgtgtagacagtcacagtcacagatggcatattctcagaaatcctcattgttgactaatgtacctctgataagtcccacttaccattttctcctgaactctgtagaaagatccgaattgaatatttcggacccgaaacctgacccgctttgatg

SEQ ID NO: 21515 - DNA, 3003 bp, Unknown
  misc_feature (1)..( 3003): 2750-1469P.txt file - cDNA_ID_1989381; gDNA_ID_1971984; Annot_ID_58752
gcgatcactgtagcatcacaaaagttccaattagcatagccaaatgctaaacatttgacgatagcatattaaaacagtataacgttaaaaactccattagttaatctctactagtaagatccttcaagcacaataaaatcaagaaaagaacgcacatttattatagctgcaaaagtaatcctgcccaaaaagcctgctggtgaaaggaggaggtacaatagccggagtcaaaagactatttctaccttttttctctttcaatccaaaagggaaacaataatgcagaaagtttgagcaaggaacttaacctgtcatagacgctcaagaatgctccacatatgtcacatagacgcaacttttggtctgtctgagaagatataggaacaataagtgaggttagaagatgaaaccaatgtgtagatacattaaacaggggatgcgaagatgttatacttttggtccaaatagtaacttttatgaaagcaatcaaacgggtttactcaaataaactattactctttacctaaacgttaatatatgactgttgtcattcctatattcaacggtactttccaaaacaaactgataaatatagaaggaatgtgaatctttaaggcatcattgggaggagtgatggtaacttacgatgcgcacatcaacagcggtgtacttcgttgaatctgctggaggttctcgtctaactgtaagctgaaacaaatttaggcccaacaattattagtgactaataaaagtagggggaaaagaaaaagaaataagaaagagaacacaccttcttaagagcttcagcctcttccagggctttctgggcttcatcaaccattccttgttcacctaaaatatcaaataaccatacaatctatataaaacttcgtgaagtccagtgtttccttaacatagatatagtaacatacaacgggaagaaatttccttatcttaggtatatacagtttaagcaatttataggttaggaaatcttagattagccagtagaaattcccagccggcagggaatactagaccgtggatatttaagcagtttcaactttccactacaatgagctctaaattaagatgaccatagacaaataaccaaacacaaattagggttatttcccttaccaagatcttctgccttcttcagtttctcatttatcatttcttgagtgcgaggatccggtggaggtaattcggaagatggtggttgagctggaacgggctgtggcaaggatgctctatctttgttgaaggcttccaacagcaacaccgcctacatgaaaaaacaagacaaaggactttctagttgacataggtaaagtaaaaaagcaaaaatgctcattaagccaatagcgaaagcaaattcacctgttggtcagctctcttggtcctcatctcttcgactaactcaagagctctaatcttaagatccattttgccttcaagatctgcaaagtgacatcagaactttgaaagactaccaataaccagtcaagaattatttgcaaaaacaaagccgaaacagcaaagtaatatttgctgggcaatattcttttaatttttaccgtggatatctgcttccttcatcttctctttgattttctccgataactcgagaatttcaggcgactgcagttaaacaatgtaatgatgataaacaaacctgagtgttgcaaacttagaagacacataaaccaaatttcaaaatcaaataatcacctgagtgacttcagagacagaaatggcaatggcagctttggcgtcctcttcttgaagacgcttaagggccctaccaatcttcctatcacactcaacgataagcctgtctatggcatcttccaattccctgtcgtagttatcaacaccttttgcccttgcttctcggtatctaagggcgagttaaagcaacacaggagtggaaagagaacaacatgccactgtagaatcaaactaaacataacaatgacaccaacttttttttgtaactaatctgcataggctagtcttatatgcactatccattcatttaacgtattatctcaagcaaaaaccaggaagaagagcaaaaacatgagcaaaaaacagatatcaacccaattagtaagtatgttcaaatgtcaaattcaattgaaagaggccatggaagtaggcggccttcatggtaaccgtataaggtaaatactaaacttactgtaaacaaaggatactctttccgaagctgcaaagagtgcacctttgggcatggtcccatatccattttctgataacaacagaaatgtaaaaggagcatcagttattaggcaaaccaaagtagccatgcactaaattactagacagatactcatagaaaacagtgaagcgatacaagtttcagaattcagatatactctataagatacaaaactgcacactgtatcaagtaaccaaataccagttatcaattcgagctaaagcagaaacacaaaagattagctcaaaagtgaaattagggtttttttattcaaagagacaactaagtaataaactgaaaaaatataaaggtaagcaccgtcaattggaagagatcgtgagggcagagaccagacaagtaaagacgacacacatcacggtcgtagtatttgcgattcacctcctgaacgtcgccgtttcggttagctcccatgagcacatcaagctgcttccttatagcgtccatagtcgttctctctctctctctctctctctctctctctctctctctctctctctctctctctttcctcgtcctctctgcaaacagagatttggggttttttgatcgaaagacaacacaatgataggaacaatggcattcggatgtaataagattttggtatataagattaattgcatacaggtccctatatattaataatttatgttctactcctacatttatttctgtcaacatattttgcccacgggtaagaagacttggtctctcgctggttgcttcaatccgagaaaatg

SEQ ID NO: 21516 - DNA, 3000 bp, Unknown; identical to SEQ ID NO: 9107
  misc_feature (1)..( 3000): 2750-1469P.txt file - cDNA_ID_1989382; gDNA_ID_1971984; Annot_ID_58751

SEQ ID NO: 21517 - DNA, 3000 bp, Unknown; identical to SEQ ID NO: 9097
  misc_feature (1)..( 3000): 2750-1469P.txt file - cDNA_ID_1989384; gDNA_ID_1971984; Annot_ID_58749

SEQ ID NO: 21518 - DNA, 3000 bp, Unknown; identical to SEQ ID NO: 9099
  misc_feature (1)..( 3000): 2750-1469P.txt file - cDNA_ID_1989389; gDNA_ID_1971984; Annot_ID_58743

SEQ ID NO: 21519 - DNA, 3000 bp, Unknown; identical to SEQ ID NO: 9099
  misc_feature (1)..( 3000): 2750-1469P.txt file - cDNA_ID_1989389; gDNA_ID_1971984; Annot_ID_177688

SEQ ID NO: 21520 - DNA, 3000 bp, Unknown; identical to SEQ ID NO: 9094
  misc_feature (1)..( 3000): 2750-1469P.txt file - cDNA_ID_1989391; gDNA_ID_1971984; Annot_ID_58741

SEQ ID NO: 21521 - DNA, 3003 bp, Unknown
  misc_feature (1)..( 3003): 2750-1469P.txt file - cDNA_ID_1989396; gDNA_ID_1971984; Annot_ID_58733
agtttaaccggctcggtgttagggttccgactttcttcatctctccttggattgagcctggcacaggtgaacataattactagtcataggcattaatcaaatttagtggtcttatattttctaatcaagatattaatgtttaaatcaaagtaaatgacaattttggtaaaatgtgtagttattcatgggccaaatgggccgtacccaaggtcacaatatgagcattcgtcaattcccgcaacggtcaagacaattttcaaactcaaagatttcttgtcaaagagagattcatgggctggcacttttgaatctgttattacgagagactcaccaagacaagattgccctggtaattacatttttttctttcatcttctctatcaatttaggtaggataatatcgactaaaacttcagttttttttctttaaatagaaacattatcaactccgattaaactaagagggacaatggcaaaagaaaatgcacaattaagcgaatttcaagaagatctcgttataatggctgcgggattaaaaggagactacaaaaacgaagaattaatccacaagctatgtaaagaaacttgcgttgcagatgcatccaaatacgttacaaatgcgtttgagaagtttctggaagagtcaagaaaggcaagagatagaggatgtgatgagaacgacatcgtttattgcgttgatgatgatgatgatcatgttgtgataccaccacaatcacattcagaagcatcaaatgctgctgctcaaccaaaaacgcaaacgtcttttttcaataagttattctcttgctttattcgccatgattgaaagagactaagagaataaatgttataataataatttgtagtcacttctcttgtgtgtgggtggaatttatttaagacaaaaaaaaagaaaaccttactagtctcttgcatatttaatttcgttgtataagaacttccacaattatttgcacatttgatattcttgtataaaaattatatgttagatgagatctactctaactagttatttgtttttcattttttcttgtcaacagctatattaaattgactaaaatgaactaataatgagagatattatttacatatgtaattatatgcgattagattcaaatttttcataccatgactgaaataaacatttaaagatttcgtgtgttcctttccactatcgttcttaccccgactcatcatgtacaattattgaatttgaattttcaagcataactcccataagacttttgatcaattctaagtctctgattcattgtagcatcacaaccctgtcacgattcaggttgagaagaaagtgcagttgtcacccctcctagagtccatattacgttaagaaacttgtgttgcagatgcttcctattacattacaaatgcgtttgagaagtttctagaggagtctagaaagcaagtgaaagaggatatgataaggacgacatcgttttttgcgtgtatgatgatgatgatgatcatgtcatactagcacaatcacattcgaacaacttgtagtaatttgtctgtgtatgtggaaattatttttgtcgtagaagaacttacacgattatttgtatatttaatcgtctttttttgttgttgttgtaaaagttgtatatttaatcttcttgtgtataaaagcaattatatcttagatgagatctactttaattattcgattggtgagtagattataccaaaagactaaaaactaattaaagtcactaaaggcaaccaatctagctactgggtcccaaattttaattgtaatgattataagaaatactgtactaactaacaccgtatgtatgcaacattctgtcataataccacatattattagttacgctatttaaacattagttagtacacagtaatcaacgaatgtatggttagttttttccctgaggaaaaactctatttaaaacgactcatgcggagacgtgctatagactatggttttagcaataataattggtcaacacctaattcaatctactccattgttattttcatagatagagagattaataagtaataatattcaatgtatatcgccaataaccttattaattttcttataataatggactaatggtagaaccgtagaaatagttatgagaagcacttgtatctatataaactttcattttggagaacgtttttcatatgcactaaataaaagatgagtaatttcttctgccacctcaccgaacgtgagagtaaacaaatgtgacgatatccaaaattcaccgtctatgttttatttatatgcaaagatcactgagttgattcgaatgtatatgattgatagtatatagaaaaatagttttttaatcttgaggcagagtttttaaggtgacaacaaaaaatgaaacaaggtgtattcaatcaaatatttaagtgtttttgtgttaaaataatagatctaatgttattaattatagatttttaaaagttttatgaaatctaatgttattaaatttgtgattttaaaatctacattaatttttttttattaaaaatattttaaaaattagatttaataattttaagagacttaaatgaattttagtgaatttccttaattaaaaaatacagaattttaagtctcatgattttaggtaaattttgagaaaattttataataaatcataacaacttccttaaattcacccaaattcttcaaaattatataaaaatttaaaataacttaaatcattcaaaatagaagattgaatacactcccgggcccaagagttttgcaaacaatcatatacatgtaaaagtttaagactataccatttatgtgatttactaatcatataaaataaattaaatacacatcgtttagttaccagtatataataaggctaccatttagacggacacagctaattatgagagatagacagagagggaaaacaactacacaagtcaaaatttctgttctaaaaaagtaaaagaagtatg

SEQ ID NO: 21522 - DNA, 3003 bp, Unknown; identical to SEQ ID NO: 21521
  misc_feature (1)..( 3003): 2750-1469P.txt file - cDNA_ID_1989396; gDNA_ID_1972049; Annot_ID_178344

SEQ ID NO: 21523 - DNA, 3003 bp, Unknown; identical to SEQ ID NO: 21521
  misc_feature (1)..( 3003): 2750-1469P.txt file - cDNA_ID_1989396; gDNA_ID_1971984; Annot_ID_177679

SEQ ID NO: 21524 - DNA, 3000 bp, Unknown; identical to SEQ ID NO: 9088
  misc_feature (1)..( 3000): 2750-1469P.txt file - cDNA_ID_1989400; gDNA_ID_1971984; Annot_ID_58728

SEQ ID NO: 21525 - DNA, 3003 bp, Unknown
  misc_feature (1)..( 3003): 2750-1469P.txt file - cDNA_ID_1989401; gDNA_ID_1971785; Annot_ID_57996
tattagtttctgttaatgttatcaatgtttttataatttcacttactagaggttttgatgcttaatttataaaagtgtgcaaattaaaattttagtggaatcctttaaacaaatcgaaaatattaataattcattatatccaattgttgtatgttatttacttttgtcattctttgatagtataagaatttatgacttttctggtattttagaagaaaaaataatcacatgattttttttaatcacatgtttggtgctacgtataatttatatgaattatttaccgtcacataaattatagtaaagttttgttttgtaatctattttagaaagacaaaaacttcataattattaagatctctcttatgtatttttaggtctacaaatctttgtaatgtaaaacaacatttaataattaaaaaaaaaaaacatttaagtaggaattagtaatgaaataaattattatgtaacagtcgtgatgattctatcccaaaaaagaattaaaaaaaaatggtagtgatcaatatctggaatagagatttgtcttattttaatggagaaagaggcgaggcagagactggtgaggccattcctcgagaactacacttatgctttcccccataaatccatttcttgtctatctctctacttttcttcttttcatttatttaatagttaatacggctttgctttttagttgaaaacagtaaaaaccgaaataaaatgtgtttcgtcggccgatggagattgagaaagttagttaaaccaatgatgccgacacaaaacaaaaagttaatccgatgatactattttcactactgtatcaatcgattcgtcggctacgtggtatgttacgaatcttaagagttattttaatcccacaatgttgaatgatatgcaaactattgttaaaatgtcacttaattgttatattaacctgaccgaatagctataaccaagtcttcgtcaaggctgcgtggccggttttgggaacgtatgaaaattctttaattcttatattattaaattaaagaatttatttcttgttgctatttatttatttagtgttgtaaatagtgttgcatcaactatgtaaatgatgctatatcatcacattaaacttgtgtcatctttagtgtttcataagagagttttgagtgtaaactcacatcaaaattgtgttttagtgtcccatctgcttttgagcctaaaaatagaggttttgattggctaagtcctattccatttttatcctaattaaacataaaaacaataccaaagcaatataagaaaaaatcattttcacttttttatactgtcatcttgcactgctacagtttaacgttttaattatttatgtattgtttactgtaccgttaaagacttataccgctttgagttaccaatatgatttgcattttggttgaatactagaaaatgatattttctatgtatgaaaatgatattttctgtgtacgaaaatgatattttagtttgttcttatcattaacatttatttgtctgttataatatttatatttagagttcaatgttcagacttcagagtataatgccaaaaagaagccaggtgaggaatgcatctgaaatacaaatttggatctcgtgaatcattcacatcaatacagcgattaatttgtgatataatttacgattatattatttgtatagtgaaacaaaataatgtgatggtagtacttgtagacaatgtgcaactccggaatcgagatgttacatgcatgtatgaatatcgatcttggaaccttcttcatttttaataatttttcatgccctaccttaattacgcttgtcgggagtccaaaatccaaactccaaactaagattttgcatctcgttgtatcttgttaaattcagttttattgtcacggacacggagtatatattttatgcatggacaaacattttcttgaatacttcaaaagatgttacttgttagtaaaaatatggtaagggctaaataaacgtagaaattgagcatagagaggaaattagtttgggaagcgagaatcacgcttcaatttagagaccgaaatgtatggagccacgttttggaacatatcacctcctttgattttctttgtttttattaattcaatcttttttatttttgacattaacaataaacaatctattggtcatcgcattaattctcaaacaacgtaatataaagatatctggtccatgtgagcataatttttcaagatattgttataaagactagttttcaatatttattttgatgccccaaaaaaactacttgtatccaagaacaatacttaattagttaatagtttaatgatgatggcaaaatatatacacaatacacttgcctattagtgtttgcaaatattgatgataaaagaaattagtgtttgtcatgtttcatataagatagatgatagatcactacaatactcatacacacataattcttaatcacacatatacctgttgtttatgtaattattaaaaagaagagaatttactctattccactacttttcttcaaaggtttttcatttctatcacttttgtttattatttttgaatctatcatatttgtatgatagaaataagacgatttcattattctcattttcataatataatattatatattgaatgtatagttgttaaaaaaaagattatctattgagaaagagaaaaaaaagatgttacaacagtattaataaaaatgatatatgtaaacaaaaagaggataatgtgatagatccaaaagatttagggaacaaaatagtaaaaacaaaaagaaatttgtaatttgtagtagttttgttaattttccttaaaccgcaaaatcatattctactatttatatcctcgtttagtgttcacaaaacttatcaagaaccataagctaaagagggttcggttctttaaacccctccatctctctctccttcattacactgtagagtgttaaagtaccactctatagccatg

SEQ ID NO: 21526 - DNA, 3003 bp, Unknown; identical to SEQ ID NO: 21525
  misc_feature (1)..( 3003): 2750-1469P.txt file - cDNA_ID_1989401; gDNA_ID_1971785; Annot_ID_175459

SEQ ID NO: 21527 - DNA, 3000 bp, Unknown; identical to SEQ ID NO: 8366
  misc_feature (1)..( 3000): 2750-1469P.txt file - cDNA_ID_1989410; gDNA_ID_1971785; Annot_ID_57981

SEQ ID NO: 21528 - DNA, 3000 bp, Unknown; identical to SEQ ID NO: 15026
  misc_feature (1)..( 3000): 2750-1469P.txt file - cDNA_ID_1989410; gDNA_ID_2684254; Annot_ID_193084

SEQ ID NO: 21529 - DNA, 3000 bp, Unknown; identical to SEQ ID NO: 15026
  misc_feature (1)..( 3000): 2750-1469P.txt file - cDNA_ID_1989410; gDNA_ID_2684254; Annot_ID_138084

SEQ ID NO: 21530 - DNA, 3000 bp, Unknown; identical to SEQ ID NO: 8366
  misc_feature (1)..( 3000): 2750-1469P.txt file - cDNA_ID_1989410; gDNA_ID_1971785; Annot_ID_175433

SEQ ID NO: 21531 - DNA, 1123 bp, Unknown; identical to SEQ ID NO: 8363
  misc_feature (1)..( 1123): 2750-1469P.txt file - cDNA_ID_1989414; gDNA_ID_1971785; Annot_ID_57977

SEQ ID NO: 21532 - DNA, 877 bp, Unknown
  misc_feature (1)..( 877): 2750-1469P.txt file - cDNA_ID_1989415; gDNA_ID_1971786; Annot_ID_58018
ttcagaaaactcattactaaattctgatactacattttcattgagatgatgtttttgctacagatcataggaatttgcaatacatgttgctatgcgatgcgacggcgcctagagaaatctagagatctcctctgtttcagtgctttggctgcctgggggaatttgaatgtgattcactgaagctgtattttaagtatttgactcatattagacttgttccaagtaaaatagcaacaaggcaacaatggtcatctagttatttaaaaagtggttgacgatcattaagacattttcaaaattctcatctaaaatggtaaacaaccatgaaagattcgactcccaatagagagtttcaagttctctctttctctttctctcctttcctagttttttcttgtagcaaaaggtaaaccttatgcttcttcttcctctgttgcgagtttcccttttggtactttgcttaaatatcaaacaaccttttcaaaaaggatcttcctttcgagggttagaaaggagttgattgtttctaacttttcatgtttgaaatccgtatccctatgttatatctcgttgacttatgaaaattctaggtttagggaacataatgtctcagttgttcgtgtttgacaatttaattgcttgagtaataaagagagataagatcattgatcttaccattttactctcttctctttgtcttagataggcaaatcttgttttcaaaactgtttgttgtctatattatcttacactttcataagtaggagatagaagcttaaggtgctatcaaaccctttttttataccttttgtcacattttgtcttctgtactattacagttaagttagctcgtgtgagaaaagggtgtaatataatg

SEQ ID NO: 21533 - DNA, 3000 bp, Unknown
  misc_feature (1)..( 3000): 2750-1469P.txt file - cDNA_ID_1989416; gDNA_ID_1971786; Annot_ID_58017
aagcagccagatcaagaatttctttcccaggtagatactaaaattaaagtacatcatttcagtttttactaaccttagcttagaccgtatatatggatcatttgtttaaatggtccagcatcaaaaccactcctttggaaaatgttctgttttatgatatagaaaactttaacaggtatcaatggtttcaagactgcaccacgaaaatgttgtagcacttatggcctattgtgttgatggccctctccgtgttcttgcttatgaatttgccacttatggaactcttcatgatgttcttcacggtgagtgtggttaacgtaaaccattgctcggataccggatcactcactcaataaaaactaacatacaagagggaaaaaactatgcaatgtggtgtttctttggtgcaggtcaaacaggtgtcataggagcactacaaggtcctgttatgacgtggcaacgaagagtcaaaatagctcttggtgcagccagaggacttgagtacttgcataagaaggtgaaccctcaggttatccaccgagatatcaaagctagcaacatacttctgtttgatgatgatattgccaaaattggtgattttgatttgtatgatcaagcccctaacatggctggtcgccttcactcatgtcgtatggcactaggagcatctcgttctcactgtccagagtaattccttttaaatatgttctctatcttgaacagtttgtttgattcagattaatctagaggctatatatagacgtcttctttgaacattttgagttatttatttcagacatgcaatgacaggaatattgaccacaaagagcgatgtctacagttttggcgttgttctgttggagctccttacgggtcgtaaaccagtagatcgtaccttaccgcgtggacaacaaaatttagtgacatgggtattgttaagcgtaatcttctttgtttctgataatggtttgcttgcaatgacaagagaagcttttaagatcagtctgtaaaaataagtaaaaaaaacttcaagaaatcttggagtaaattaaaacccttcttaggcatatagaaatgtaacttaggacgttaaagttaacaagaaagtagctggaatttgtgcaaatggataaaacttttatcataaaagtgaaatattgctgctcaatgataaacatgttgtgtgttgtctcaggcaacccctaaactaagcaaagacaaagtgaagcaatgcgttgatgcaagactacttggagagtaccctcccaaagctgttgccaaggtattaatcgcataacattgttttcctcacattgtttcattgcagcaaaaatgatttaacttagaagactagtttatctgctggcattagaatcaaagtagcgatatttgttgtccgcattcatctctctgacaactgaaacatttcatgagcctgatttcatttgctatatgcatatggtctgatacaatgatcagctagctgcggtgtctgcacgctgtgtgcattatgatccagattttagaccagacatgagcattgtggtgaaggcacttcaacctcttttaaactcttctcttcctctcctcagactccacattggaatccttattgaccaaatattcaatcccccatatctcatctacgactacttcatgatgattatcaaagtgtattattcactttgaagtatatttatgtaattttttgggaccttatctcattaaatcttcattttaagacccacttttcgacatttgtgtatgtctatattttatcattattatgttttatgtattttgtgatgtagtttgcaatacacatcaaaataaataagcaccaaattttgtttgttcaaggtaaagtcatgagttaaaaaaaaaaaaaactcgtttctaaattctgatactacattttaattcagagattataataggaatttgcaatacacatcaagatatataaaaattaacagaatttactcactgttgttagtgagattataataggaatttgcaatacacatcaaactaaataaaaagtaacagaatttactccaaattgaaacagaatttactgtgcgagacaacaaaaaatttattataacagaatctaatccaaattgaaacatcaataaaatgattttttttttttttcaattttttgtttgatactttttaaaaataacatttaagtcctcgtcaatgcacgcatcaaatttgtattatacggtattatctaataatatttcgtattaaatacgtatataattttgattttgaaaagttgagatatatagttttggaacataatgggcccattaattctaattatttcataactaatttaaaaatatgctgaagtaagtcccccgtcaaggacataaaaccataaccgttagatcaaagatttacgtcctgcaaattcatctccaccgtcgttagtttcaccaatttcattatttctcttatttaatattcttttcttaataataaatctctctcttcttccgatatgcagagagcattatatgcacacagtagcaaagctctctccaagtttctgactcacttcacctgcttcatcgattcgccattgaagctcttacgcatttatcatcggcaaaacttcttggagttatcggaaaagtttcttcatcaacggtggttgaagtatctgatccctctcgctatgttaaactagattcgaacgtttgttcccaaagccgagattcgcatttcggcttctcatttcgaggtaatggtttctctggatctgatttgtgatctatcgatttctcctttagtgattttaggatttttgggggtttttgtgtgtgtaaacttaaatctgaagtttccgattgattttgttttggatttcagatttcgtttatggaatctctggatcttatgttgtgtgtgggattatacttccctatattgtaactatcgaaagaaaactgcatctacggtgattgcggagaggagaaaaaaatg

SEQ ID NO: 21534 - DNA, 3003 bp, Unknown
  misc_feature (1)..( 3003): 2750-1469P.txt file - cDNA_ID_1989418; gDNA_ID_1971786; Annot_ID_58014
tttgggataatctcttttagggttttggagcaatagaagtcatatgttattatgttgtcagattttgtttcttcttattgtgtgggcctcatttttttattttatttttgggtctcacgtttttttattttatttgtttttattttatttttacaaaataaaattaattttaaatgctaaaaatatcagaaaaaatcagaccaagggtttttggttactatacacaaaatttgtgtcaatctagttctctaatcaaatagagagttattctagttgttattaactacatttgtgtcaatttaggtaattttctgttaaataaatggtagaatttctgtcattcaccgtaatctaacaagttttctgtaaacttttatattttagtaattaaaaattataagaaaaattaaagaaaagttatactcaaagatgcgatcgtatatattaattactaaaattgcagtggttagtcaaataaactaaaaattacaacggtttataaaacaaaaccaaatgatttgtcaaataagccaaatattggaacggttcagttaaacagttgtaattttattgaaatatatattagtaactaaaaattataatttataaaattttcgccaagagacgtgactatagataattaaatgttataaagttttatagaataaaccaaagttacaatagtttgtccagtaaagtaaatattgcaataattcaactaaatggttataatagttcgtttatgaaaagttacgataaaaagttgcagccatagaaaaaatttattttggattgcaattttctaaaaaaactcaattgtaatatatttttgtagtttatatatattttcatcgaaagacggtgatataaagacacaatacacaatacaaatatatttattgagattgttatattatatagattttctttctatttagatttgagtgatatatcttacatctagaaaatggccaaaatcaacctcaactctatctatagagtctttttagaaccctaactcttatttcttttattcacacaattttaattacaaacctcaattatgtaactgttagccaacctcccttcaccgcctcgtgacttccttggattctcgatctgatatttacaatgatccctctgatagccctttcgtcgtgtcaatttcaacgtctttgctttgaattagctgaagatatatattgttttttgccctaaggctttaatttgtttattgttaggtcggggcggtcgatgaagcaaacaattatggaaaaatgtagatgttagatctctcgaatcctaacagagagaatctgctaacaagaaaggcaaaatatctcttatatatagacagatgctacaccaagagcttgaagtcaatatgatcgaactgatgaaactaaggaagcagaataaacaagcattaaagatatgtcaaagaagtggaaattgtgtcatgtttctcataaattattggggttgaatccccactccttcaccttaattatcacttcttaagtttcttaaacgtagatgtacagtactccctccgttttatttcgaatgtcgttttaattttcaaattttattttaaaataagtcgttttgtatttttaatgtagatatttggtaagattttcagttttatccttactatttcaatgtattgtccaatgaaaaaaatagtatgatatatatattaatcaaaagtaaagcaataatttaattgttttcttaatatgcttgaagaaatcttaaactacatttataatgaaagggaggagtagctactttctagtttcatactatttaagtatcaacaataatggatgtgatcccccaaaaaagtatcatcaataatagaacgaatgatagagggaaaattgcattataaaagtcttgttttcttattgatttgggattctattattttactatcaaaagcattgtatttttcatttttttaatcgagagtgaaacatgcatccatcttggagtgtttttaatgggactctggctctgtcgtttatcacttccaaacttaaaaacaaaaataaagaattaacacaaaaatccttttctatgggtagttacaactatctttcatcttttatgtttgtttcgacaaaattcctttgtttcataaaaagtgttgttttggtatttcttttttcacacatttttttatgaaacacagggacaaaactgaaatttagtataaaatctgtatcaaaaaaacctaaacgacatttttgtcaattgaaaaatacaatgcatttaatatacaaacctttatatagattttttcttatttaaaaatgtgggatatttaattttggtaagtttagttaataaggataagtatatagaattaaaagtgtttgacaagatggatagtagaatttaataaatgaaaacaataaaaaagatgagaataattgtaggcttgatatacataagcatcaaaactctcttttaatatataagaggatacattatgagtcggaaataaaagtgaaataaaatgtttaatatcactaaattaagatatcaaaggaaaaaaaaaacatgatgaaatagctattttgatcatatttctagaaataaaaagacatatatctgttcataataatcatatggactatatatgggataaataattttaaactaaaaacatagataacgttttatctgtttctaaaaattgttaaggaaggttcttttcattttgttaattatggaaatttcgttatccaaaacaaaaaaaatcaatcaatctagaaaataataagtagagaagaagggagaaggaggaagcaaagagatagtggcgtgttcccctctccatattcagccgccactttttctcttcttctcctctaatctcgttcttgtatatatatatatatatatataaacacattaccataaacttatactctcttttgatccatctattgattttgattctctgttttatccggaagtctaaattggatg

SEQ ID NO: 21535 - DNA, 3000 bp, Unknown
  misc_feature (1)..( 3000): 2750-1469P.txt file - cDNA_ID_1989420; gDNA_ID_1971786; Annot_ID_58011
aaacactcacaccttatatcaagaccaaacactcacattcacccaagaaaaataaagaccaaacactcacaagttttattaagacagcaacaaagccaacattacaaagtcataaaagtcacaaatactacattgtcattacaagcttggcgaagacaacaagataaatagacttacactattaagcaacaccaaattcatttctttttgccttaccaagcatcatgtaaagaatgaaaatgctgatcaaacaaagccacaaaaaacatattttcaaacacactttccacttgcagatttcttgtttactcaacattgcttcttcttttagttcatgtatcatcacatttagctcatttgcctcggatttggctttgttaagctcatttgcaatgatcacaaattttggtaaaacatcttcaacctcttcgtatacagcatcctcaacccatttaaacaaatgactctgttacacaatcaaaccaaatccgatatgattagctgctaagttacataacataaacacaaactcaaactcaaactcaaactcaaacttacatctcttttgtttgtccacgtctttggatctcttttcgtttcacaacgaaaaaaaggtctgcccggattatcaacactcttcgatgtgaagattgtcacatcatctccacaccaacacttcaccggaaaaccacggttttggataacacccgatgacgctgaacttgaactcattgcgtaggaagatccaattttcgaaatcgatttcaattctgtcgtagaagaagagaactgagaaattttgtttttttagggcttgtgatttcttcgatttctgatcgaattgggggaaaacatagcaagtcgttttgaaaaaacgacgtcgtttactaaaaacgaaactgtgtcgtttgcaaattaagtctctgttaacgcctaattaaccctgtcaattaagtctgttaacccagataacggcaagactaaaatggcgcggtcaacacaagtttaagatttattagaaaagtcaacaaaagttcgatgtttttttcgtttcatctaaaattcgggatttaaatcaacgttttagcaaaattcgggattttaatgaaatttttcccttttttaaagcaacatgcatttgtcatttgtgcatggttattacttgcttcaaaatatcaaaaataataaaccaccatatattcttcaaaatttataatttaatttgaaattatcttaataagaaaaaactaaaaaatatttaaatcaagttgctaaaaatacattataaaaaaagaaaaacaagttctccaaaaattccaatatacaaaagttaataatattagtatacgagtggcatattcagtttagattttaatttaatgcacatcttatctctcccaaatttatgactacgtggtagagccggcccttagcataaacaagggaagcagctgtttagagcctctacttgatattctattgtctcatatttttgtacgtaaatgtttgtgtattttgtaagatatttatcaagtttttcttacatattaaatttagccatataattatttaagggatcatgtgaatccaatgttatttgtttcttatactgaagtacgtgtggatgtatgaagtagtttaaacaaaaaaaacttacataatttgtcgtgtaattataagggtaaacatatacatatagattcataattttagcaatcataatatctagttagcatctcttattcattcgtaacaactaaattatacagctaaatttgacaaaatagtattatttttttctataaaaattttaaagtatattttggtcctttctctcgtattttttaaagagaggaacatttcatagttttgtcgaccggatttttccggtgaattgccgtcccgattgactcggattcccaaacgacatcttctggcttcgttagtggaaatggccgccctcgtccagcgacatctgatttcttctagaagttggctcgcttttatctttccttgtcgtggatcggttcttcttccgatctctttatgcttttatatttcaataattgtttggatatgagttggtatttatctatcatgatggatccatctaatttgtctcttttgtgcaacttgtgggttgcatgaatcgtttcaatttcacaaaattgaagagatttcagtctaaaacttaatttgcatatgttcaagagattacatcttaggttaaaggatcgaaagtatctcgatgcatattacaattccctttctgctgtaccttttaactagagttttgttcaaaattttccggtaacacaaaagggatttcgtgcgattgtttatcgtcgatatcttcttcgcgggaattggagctcaacagcggtggttgatgtcggtacacttccgatgactcttcaacacgtgttgcaatcataatttcagtttgacacgtatttttggatagagtacaaacgctaaaattccttcgctttcggtgtaaaattagtgaattcttattgagttttactctctgttctttataattttaatagatttttaggtattgtaaccttatgtttaataaaatattcttgaaaaaaaaattatattttggtccggcactgctacgtggcaaagtttccacaaaattttccacgtggcaatccgacatgtacccttgtcgtaactttagtccgttcatctcaaccaaactcttaatcaacggccgagattcatcacaaggcgcgtgtcaggggcgcgggaaagtgtggaactcatgagaccacaggtggagagcctgagtgcaactcacgacacctttaaccaaccaaaacacgccacgttatctctcactgttaaattctctcctgtaaaagaactggcaaatctccctcaacaaagaacttagccttaaaggatttgtataacaaatattatcgtaatcgcttaaggctcaagtcacacaagttcattgattccacctttctaattacgaggatg

SEQ ID NO: 21536 - DNA, 3000 bp, Unknown; identical to SEQ ID NO: 21535
  misc_feature (1)..( 3000): 2750-1469P.txt file - cDNA_ID_1989420; gDNA_ID_1971786; Annot_ID_175486

SEQ ID NO: 21537 - DNA, 3000 bp, Unknown
  misc_feature (1)..( 3000): 2750-1469P.txt file - cDNA_ID_1989423; gDNA_ID_1971786; Annot_ID_58005
actatacttaaaagtttacataccaaagcaaacatttactttctagttaaaatattgtaagttacatgggtgataggtctatgtaaaaatttctctaataagctcattctgccatataaaaaaaacattttgagtttacgcaatcaataaatgtatatcacaaacttggaactggagaaatgagttggagaaagataaaatgctccttaacacatggcattgcaagtgaagggatatggatcaatggggtttattattacttaggtgacatgtctaagaccatgactgctactgcttttgtgatagtttgctttaatgttaggtctgagaaattcgagtttatttatccagagggctatcatgaagctataatggtaaattaggtttggtttattatgatgataacgttgatgataccgttgagttgcgtgtgtgtgttctagaagactaggagaaacatgaacagtcaaaatatgcttacactttgagggatgataaattctaggatcattacgtttccatcgttggagtgattgctactggtgaaattattttatcgatggcggattatacatctaaacaatctttcctacttcaatcccgataaaaacactctccaacgtgttgaaatttaaagttttgaataatatcatgtagtgttctgactacacgtttttgtagacgattgttgtagattatattgctttgtagaccatgtagagtatgttaacgttaacgacccaaacctcctcaagtcaaacatctatagttttccatacatgaggacaaaagaatcagaagaggaagaataacttcaatttttacatccttcagtacgtgtttcaaaacaccattcactcattgtggcgggaaagaaacaacaggaggtatggggaacaaccatcaccaactgcaacactagtcaagatgatcgataagaacatccgaaaccggctcagcacacttcaaaggggaggtaattcaaagtatgaagaaggcatagtcctttggtttgcaacaagaagaaatcatgtctagaaattccaaatttcttgtaaataattttgaaaagtttttacattcacttgtaatacccagtaactttttcttttgagtataatttaacatcatattcaaaaaaaaaaaataacttcaatttttaccaatttaacatcattttatctttttttttttttttttcttttttaaagatttttctgaacatgaggttttaaggataaattacggccataacataaaacaatcccaaatttttggttggacaaattagtttttttttctagtatttgttttgtagatgagtttgtatgctatattgctataaaagataaaagtgaaatctctaaaaaaaaaagaagaagagattggctacttagttaataatagatatacacactaacataaggattaagagtttatttacagaacaatagtcagtgaattaaaagaagttaggaaagttagggtccaaaagagaaataaagcaaatatatacagaggaagctgcaagaagaaaaagggataaggcaaaaaggatttgcttttacgaacagagagcgagccagagagagtgagtaagagagaatgacgagcgtgagtgggtgtggttcagtgagtctgataactaaccgcagtgcgttcttgggaaacggacttcaacaccgtgccgttttccttaaaccatggtcgtcttcttcgcttcagtctcggtccatggttgtcgaagccaaaaccaaaaccagcagcgaagacagaatcgcccgccactctcgtatccgtaagaaggtgttctctttcttctcgcttttaatttcatctccaatgtctctaatattctcttgaagatagtgtttaatgtagaattgcgatgaaatttgggtgtttcattagagttcgaagaacacattgtaacgataattgaaatcgtaattcgtaaccacttctattcaattttaagcttatgtttgggttttgcatttattcaaagttgattgtaatttgacaatgaaattagaaatgtgattcatcagtttttcttgatgttggtgctattgtggcatgtttgatgtgtctctatttgttaccttgagttctgtctcattaccgttactcgatgcacacataggttaatggtacaacggagaggccaaggctatgtgttttccgatcaaacaagcatctttatgttcaagtgattgatgataccaagatgcacaccttagcttcagcttccactaagcagaaaccaatctctgaagagttcgactacacctctggaccaaccattgtaagttcatctttgtaatcaactttggtaacacacttagcacgagtcacttggcactcaatttgatgatatgcttcggtttggtattgtgtaggaggtagcgaagaaagttggggaagtgatagcaaaatcttgcttggagaaaggtatcacaaaggtagcctttgaccgtggtggttacccttaccatggacgtattgaggctcttgctgctgcagcacgtgaacacggtcttcagttttaaccgtcgttttctttccttgtttctttccgatgaacagcagtgtatgaatgtagagaacccattttccccaattgaaatgttgagatttttctataactattctacagcctaaaccaaggccctgaacaaaacatttatccaaacatttcactaaagtatcactaggtgcataagaactctgcaacttcagtgaattaagcaagagtgtttccagaacaactacaaatttcaaagaaacgtctctgaatcgctttaaagatttttgcatttaatatttttcttacatatatatatttttaaccaatgaaaaaatagagaaaccttgaacaaaaagacaaaacagaaaaagaattctccgaccaaaaaatatcaaaatggtaaaccaaaagggcaaagaaagaaactgtagcgccaatctaaagatttcccgcgtcatcggcaggaaatg

SEQ ID NO: 21538 - DNA, 3000 bp, Unknown; identical to SEQ ID NO: 8395
  misc_feature (1)..( 3000): 2750-1469P.txt file - cDNA_ID_1989431; gDNA_ID_1971789; Annot_ID_58032

SEQ ID NO: 21539 - DNA, 3000 bp, Unknown; identical to SEQ ID NO: 8395
  misc_feature (1)..( 3000): 2750-1469P.txt file - cDNA_ID_1989431; gDNA_ID_2926198; Annot_ID_141392

SEQ ID NO: 21540 - DNA, 3003 bp, Unknown
  misc_feature (1)..( 3003): 2750-1469P.txt file - cDNA_ID_1989432; gDNA_ID_1971789; Annot_ID_58031
ccaaaagtggcaaaagaaaacattagttgactagtgtgacacacaacacacacaaaaaagtaataatatatataatagcagagttttctctcctctaaaagtgtccacgtcactacatctttttaatgtggagcccacatgtttttactcgccttcacattttttctatgcgtgaaatagatttagtgatgtttatggggccacgatttggtcaaaaagcccatgagccaaagaaccaaatagacttagtgatgtgtatcgggccaagatttagtcaaaaaacctatgaaccgaaaggacctaagaaaacccagttaaaattgcaaacccttgatttcattttctcctattcgatcgacgcaattcagaggacgacgaaagagaaaaagagtgtttcagtcactgccctgttgatgcacgaatttcaacaaagtatatttgtaagttctttgataagggaaaaacattctcatcgcgttgaaggtcgggagttaggtcgttcttgcgataaacatagagtttattagttttatagctgcaccttgtaaaaggctgcctacgtacccttagaaaagggatcaagccatacgtagttcatattataataagtgagctaggtcatcgttggaggtaggtcgtatattgagataggcagtttagagatgaggtggcaggttggtgacgagctggcaggtaggcgaagagctggacgaacttagttacgaggcgaactggttgatagacaacgagttagacgaactgagtatttgagtgacgagctggtagccaggggccaagctcgacgaaatgtagtagagagacgagtcggacaaatcgagttgtctggtgaaaatctagacgagctgggagacgagataggcggactgtgtagtcaatggacgaactgacagctaggcgaggagatagatgagttaacttgagggacgagctgctgactaggtgaggaattggacgaactgactagctgacagctaggcgaggagatggtcgttgagtcatgtggagcttgaagacgatctgaagaacttaaagacgagctgtagagcttaaagacgagctgaggagcttgaggaccagctgaggagcttgatgacgagctgtggagcttgaagacgagctgaggaacttgaggacgagctgagtagcttgaggacgagcagaggagcttgagaacgagctaaggagattgaggacgagctgaggagcttgatggcgatctgagtaccttgaggacgagctgaggagctagagaacgagctgaggagcttgaagacgttttaatatggatttcttcctccttttttccatgcctctctatttatagaaaaactaagctcactacataaaaggtataatatggtactttaaccttgatcattgtgacgttggtctccaccatattggcatagcagctaacggaggccagcaatctacatgtatgtcatgctattattatgtagaggaaggactgaagagggaaaaacctatatgagccaacttgaatgggctaaagacaccaccatggctgaaacgtgttggaaacaaatcaaaacttcactaaatgggattagagtggcgagaaaaagattgtacatgatatcacttcgcaacatgaaaccccccgacgtgtgccatccaagagatttggacaacacatgtgagaaatgttttttctacaaacaaatgtttaagtttatttttatggtataacttaaacaaaacatttagagagttggaaactgtttttaaaaaattccctataatgtttgagcagtgaactatcacaaagactcaaaacaaagttattactcttatttcttttgctttaatgtgtgtctttccttgctgttgtaaggaaatttatatttacaataaaatcaaacttttaattaattatctaagcatatcgtactttcaatgttaatattgttataatccaactctttttggctaattcgcgaagagacgttgaaaagtgaaatcttcccaaaaccaaagagtagtttctaagattttaacagagacacaaagagaaaaaacaaatgggcgggttcatattgggccaaaattaacaatggcaacgatgtgtaaaataacttcgtcgttagtctctgttcttcgctatcctctgcagcaaccgcttaatacgagagagagagagagatttccattgtatttttaatttaaaataaaatatataaaaacaagaccaatgtaacaaatgcattgcttagatatatataactctaaaaaatattcttacaagatagtaagtttggtctattgtcctataaattctagcatataactggtaacaatatgaaaaaaaaatgtaaaactatacatagattacaaaaatgtagaaatcaaaaaataagattagcaaataacaaagatattcaccttttaatcaaagatcagtaaaaaaaatcgaagttataattacatactaacaaaaccaaaaacaaaccaccaacgcgcgtgtctcctccctagttaattaaaggcaaaaggaagacgagtaacacgtggcaaatactctatctgtagccgtcataaaaaaaattgtgggaccctacaccctataaatcaagaactactggttgttcgccagcgaattaactaaaatatttaataaacataagaaatgacaagtttagccctctttccataggcataacatggtggctaatttgggaatttcagcagcattcggagtcaaaataacgatagcgcgtgtcggtgaaatcgcggtatacgcgcgtcgatagccgccaggagaatcctttttttacacaatcaaagagagagatcccgtaaatgttttatactctgatttctagggtttgcttttgattctctttcgcgttccagataaataaatccttttgtggaataatttcgtgatttcgtttgtgggttatccgaattttgtctgaatttgagtttttgagaaggaaaggtttgttttttcgggggatg

SEQ ID NO: 21541 - DNA, 3003 bp, Unknown; identical to SEQ ID NO: 21540
  misc_feature (1)..( 3003): 2750-1469P.txt file - cDNA_ID_1989432; gDNA_ID_2926198; Annot_ID_141391

SEQ ID NO: 21542 - DNA, 3000 bp, Unknown; identical to SEQ ID NO: 8384
  misc_feature (1)..( 3000): 2750-1469P.txt file - cDNA_ID_1989435; gDNA_ID_1971789; Annot_ID_58025

SEQ ID NO: 21543 - DNA, 3000 bp, Unknown; identical to SEQ ID NO: 8384
  misc_feature (1)..( 3000): 2750-1469P.txt file - cDNA_ID_1989435; gDNA_ID_2926198; Annot_ID_141385

SEQ ID NO: 21544 - DNA, 3000 bp, Unknown; identical to SEQ ID NO: 8383
  misc_feature (1)..( 3000): 2750-1469P.txt file - cDNA_ID_1989436; gDNA_ID_1971789; Annot_ID_58024

SEQ ID NO: 21545 - DNA, 3000 bp, Unknown; identical to SEQ ID NO: 8383
  misc_feature (1)..( 3000): 2750-1469P.txt file - cDNA_ID_1989436; gDNA_ID_1971789; Annot_ID_175514

SEQ ID NO: 21546 - DNA, 3000 bp, Unknown; identical to SEQ ID NO: 8383
  misc_feature (1)..( 3000): 2750-1469P.txt file - cDNA_ID_1989436; gDNA_ID_2926198; Annot_ID_141384

SEQ ID NO: 21547 - DNA, 3000 bp, Unknown; identical to SEQ ID NO: 8383
  misc_feature (1)..( 3000): 2750-1469P.txt file - cDNA_ID_1989436; gDNA_ID_2926198; Annot_ID_201625

SEQ ID NO: 21548 - DNA, 3000 bp, Unknown; identical to SEQ ID NO: 8381
  misc_feature (1)..( 3000): 2750-1469P.txt file - cDNA_ID_1989439; gDNA_ID_1971789; Annot_ID_58021

SEQ ID NO: 21549 - DNA, 3000 bp, Unknown; identical to SEQ ID NO: 8381
  misc_feature (1)..( 3000): 2750-1469P.txt file - cDNA_ID_1989439; gDNA_ID_1971789; Annot_ID_175511

SEQ ID NO: 21550 - DNA, 3000 bp, Unknown; identical to SEQ ID NO: 8381
  misc_feature (1)..( 3000): 2750-1469P.txt file - cDNA_ID_1989439; gDNA_ID_2926198; Annot_ID_141381

SEQ ID NO: 21551 - DNA, 3000 bp, Unknown; identical to SEQ ID NO: 8381
  misc_feature (1)..( 3000): 2750-1469P.txt file - cDNA_ID_1989439; gDNA_ID_2926198; Annot_ID_201622

SEQ ID NO: 21552 - DNA, 2058 bp, Unknown; identical to SEQ ID NO: 8411
  misc_feature (1)..( 2058): 2750-1469P.txt file - cDNA_ID_1989441; gDNA_ID_1971791; Annot_ID_58043

SEQ ID NO: 21553 - DNA, 2283 bp, Unknown; identical to SEQ ID NO: 8403
  misc_feature (1)..( 2283): 2750-1469P.txt file - cDNA_ID_1989441; gDNA_ID_1971791; Annot_ID_175573

SEQ ID NO: 21554 - DNA, 3000 bp, Unknown
  misc_feature (1)..( 3000): 2750-1469P.txt file - cDNA_ID_1989441; gDNA_ID_2926197; Annot_ID_141340
ggttcttaagattaaactgaatatctacatgtatatctcagtggttccgttttttttaaagtaaaacatacaaatattacgtatataattcagctttactttggttcatattctttttttctttgggttcgtattctttctcatacaaaagtttacatcaacaattatatcatttaataggattagaaagaaaacaaataaagtagacctataggtatggttgcacatattgattagtgattaatatagttttgtagtattttgcaatgaaacatcttaattgactcccatcattaattagtgaccaaccaaaagaaattgaccttttgatttagaagaaagagaaggaaagcgtgtgtgtggttacttgcttgcaactttgctaacgcaatcaaatcttttaacccatacactatactcatacttttcttcgttgcatctattctcatttcatttcacacaataatatggagtacaatattattttaatcacatcgatcatagattcatgataatattgccaaacaaaatgtaagcttaaaaacttttaatgttaaaatgtccaaagaaaagctcgacgtgagtcaaagcaagttgtttttattccaaaaccatggtccagttacgaccccataataggatacatacaaacttgaaaagttataaaaaaattcaagaaaaaaagatattcacaagacatattctcttcatatttcaaccaaattcgagaatttgaagtcgaacaattccacacgtaatatccctctagacctctggtttcttctttccttcctataggtctcgccgtagtgatctaagctttatgaaaacatttgaatttcgagattcgtgtaaatacataaataaataacaaaagatgcaaccaattatatagcaaacgatattattaataaagattattaaattataacacaccaagaaaaattattaaagtatatcctagcatttactaatagaagagtctaattttaattttgttattgctcaaacacagtatataattttagagatttctttggtttacgtcaaaaaagtctgtctcaattttaatattttagtcggtcatcagtatcgtccaaacaatcattttacttttgttatgataaaatacggaattcctcccctaatgacaatcaaattcgaattcaaaagagctaaacaacatatttctaacaaataatatgctcatgcatgctaatatttactgtaacatttaaaaaaattaaggatggtaaacataatctgcttaccaaatgatggagatactcaagagtccagctgtaatacatcttgcatgcaatatcttgatattagcctccttttgttcacccactctcttctcttcttcttctcatttatttatatgttaaactctctcccactatatatatctctcccccttcttctctcttcctcacattcctcaccaaaccctctccaaaacacacccacacgtacgcacacacacaaagacaatgtctcctttcaaaatattcttcttcacgactcttctcgtggcggcgttttcagtgtcggctgctgatttcaacactgacgtcaacgtagcttggggaaatggccgtgggaagatactcaacaacggccagcttcttactctctccttagacaaatcctctggttccggttttcaatccaaaacagagtatttgtttggaaagattgatatgcagattaagcttgttcctggtaactctgcaggaacagtcacaactttttacgtgagtttatatattttctttaggagttttaagtgattttggatttggtttttatattgagacttcatcttgacatttttgtgtatttgcagctaaaatccgaaggatccacttgggatgagattgattttgagttcttgggtaatatgagtggagatccttatactttacacactaatgtttacactcaaggtaaaggtgacaaagagcaacaattccatctctggttcgacccaaccgccaatttccacacttactcaatcctctggaaccctcaaagaatcatgtaaagacaacaatctcacctttcttgctacacacgttaataaaccctaactaggttttcgatttttcttacccatctcttatctgttctgttttctatcagattgaccgtcgatgacacacccattagagagtttaaaaactatgagtctctcggtgtcttgtttccaaagaacaagccgatgaggatgtacgcgagtttatggaacgcagacgattgggcaacaagaggcggtcttgttaaaactgattggtctaaagctccattcatggcttcttacagaaacattaagattgactcgaaaccaaactccaattggtacactcaagaaatggattcaacaagccaagctagactcaaatgggttcagaagaattacatgatctacaattattgtactgaccataggaggtttccacagggagctcctaaggaatgcacaacaagctcatagaatctcaaattatattctatttatttatctacacttcctctctttcttttatgtgaaaattgtgaatgctctgtttatagcttgtctattatgtccgagaatttctttttctgtttttgattcttttcgttgtatatctttgtccaataaaggaaatgatgtgtctttactcttatagatatgtataaaaagatgtccctgttttatttgttaaaaaaaattgtttatgataatgatagttctttcttcttcttcttctttttttctcataaaaaaaaaatgatagtttcatttgctttatatatatacataattaatttacttacattgtaagaaatatgataaacgtgttgaatgcttctttttcaaatccaattattgaaaaaggtcaaaatatcaaattttatttattatagaatgtatcaaaaacttacaataaaaaactctctacctgagttttatctcaattttattaaccaatcgcatgctttcatagaatg

SEQ ID NO: 21555 - DNA, 3000 bp, Unknown
  misc_feature (1)..( 3000): 2750-1469P.txt file - cDNA_ID_1989441; gDNA_ID_2926197; Annot_ID_201557
catattgattagtgattaatatagttttgtagtattttgcaatgaaacatcttaattgactcccatcattaattagtgaccaaccaaaagaaattgaccttttgatttagaagaaagagaaggaaagcgtgtgtgtggttacttgcttgcaactttgctaacgcaatcaaatcttttaacccatacactatactcatacttttcttcgttgcatctattctcatttcatttcacacaataatatggagtacaatattattttaatcacatcgatcatagattcatgataatattgccaaacaaaatgtaagcttaaaaacttttaatgttaaaatgtccaaagaaaagctcgacgtgagtcaaagcaagttgtttttattccaaaaccatggtccagttacgaccccataataggatacatacaaacttgaaaagttataaaaaaattcaagaaaaaaagatattcacaagacatattctcttcatatttcaaccaaattcgagaatttgaagtcgaacaattccacacgtaatatccctctagacctctggtttcttctttccttcctataggtctcgccgtagtgatctaagctttatgaaaacatttgaatttcgagattcgtgtaaatacataaataaataacaaaagatgcaaccaattatatagcaaacgatattattaataaagattattaaattataacacaccaagaaaaattattaaagtatatcctagcatttactaatagaagagtctaattttaattttgttattgctcaaacacagtatataattttagagatttctttggtttacgtcaaaaaagtctgtctcaattttaatattttagtcggtcatcagtatcgtccaaacaatcattttacttttgttatgataaaatacggaattcctcccctaatgacaatcaaattcgaattcaaaagagctaaacaacatatttctaacaaataatatgctcatgcatgctaatatttactgtaacatttaaaaaaattaaggatggtaaacataatctgcttaccaaatgatggagatactcaagagtccagctgtaatacatcttgcatgcaatatcttgatattagcctccttttgttcacccactctcttctcttcttcttctcatttatttatatgttaaactctctcccactatatatatctctcccccttcttctctcttcctcacattcctcaccaaaccctctccaaaacacacccacacgtacgcacacacacaaagacaatgtctcctttcaaaatattcttcttcacgactcttctcgtggcggcgttttcagtgtcggctgctgatttcaacactgacgtcaacgtagcttggggaaatggccgtgggaagatactcaacaacggccagcttcttactctctccttagacaaatcctctggttccggttttcaatccaaaacagagtatttgtttggaaagattgatatgcagattaagcttgttcctggtaactctgcaggaacagtcacaactttttacgtgagtttatatattttctttaggagttttaagtgattttggatttggtttttatattgagacttcatcttgacatttttgtgtatttgcagctaaaatccgaaggatccacttgggatgagattgattttgagttcttgggtaatatgagtggagatccttatactttacacactaatgtttacactcaaggtaaaggtgacaaagagcaacaattccatctctggttcgacccaaccgccaatttccacacttactcaatcctctggaaccctcaaagaatcatgtaaagacaacaatctcacctttcttgctacacacgttaataaaccctaactaggttttcgatttttcttacccatctcttatctgttctgttttctatcagattgaccgtcgatgacacacccattagagagtttaaaaactatgagtctctcggtgtcttgtttccaaagaacaagccgatgaggatgtacgcgagtttatggaacgcagacgattgggcaacaagaggcggtcttgttaaaactgattggtctaaagctccattcatggcttcttacagaaacattaagattgactcgaaaccaaactccaattggtacactcaagaaatggattcaacaagccaagctagactcaaatgggttcagaagaattacatgatctacaattattgtactgaccataggaggtttccacagggagctcctaaggaatgcacaacaagctcatagaatctcaaattatattctatttatttatctacacttcctctctttcttttatgtgaaaattgtgaatgctctgtttatagcttgtctattatgtccgagaatttctttttctgtttttgattcttttcgttgtatatctttgtccaataaaggaaatgatgtgtctttactcttatagatatgtataaaaagatgtccctgttttatttgttaaaaaaaattgtttatgataatgatagttctttcttcttcttcttctttttttctcataaaaaaaaaatgatagtttcatttgctttatatatatacataattaatttacttacattgtaagaaatatgataaacgtgttgaatgcttctttttcaaatccaattattgaaaaaggtcaaaatatcaaattttatttattatagaatgtatcaaaaacttacaataaaaaactctctacctgagttttatctcaattttattaaccaatcgcatgctttcatagaatgagatattatgaaacgacgtcgtttagggtaagaacattacgtcacacgtttattttaatattattttatcatcgccctctttgtaatttcgacttctcttcttcgtcagatctgaatcttaatttcccccaaatcaaagcttttgacctaaatccgtttcccgggaaaaataaatcaacaaaccatcaccggaatcttcaatatctctccggtgaagaaaaaatg

SEQ ID NO: 21556 - DNA, 3003 bp, Unknown
  misc_feature (1)..( 3003): 2750-1469P.txt file - cDNA_ID_1989445; gDNA_ID_1971791; Annot_ID_58038
tagactgtaattggttgtatattatgtctatactaatatactgttttttgctcacatatgtatacagtttttcatttctacagtagaaatgctttaattttgtttttattacttaaaccagtcgacatatggtaatttttggtgtcaactctgatagttgtcaaaatgaaaaaaggcaaaaaaacaaaacaaaaaactgatcttcgcaaacctatgaaggagttttggcatttttaattttttctgcattaagaaaaaaatattgatacttgagacttttttttcttcaaatttccaagtatttgcctcaactcaaaggacctcaaaggtctaaaaagaaacggtagggtcaagttcaatacacaaattcacaatcgaattcaaatatattgaaaataaaatgagaccaaaaaggccggtcattttcaaacaattgcagagtacaaatattttatgttaataagatgttttttcttgggcattacaaactttattttgttgataaaataacaacaaacaaaacaacaccaattgattaatacataaagtttgatgggaaatggatgaaccaagtgattaagatctgtccacgcgggaagtgttggattcatatgattcacagtttccctatcaaccactgaaaaccatattgcttcatcaatctcactacgtgggttttttattgcctttctctcatttgcattttgagcccaaccaagtctatttattaatcactttttttgtcgatatttattaatcacttttctctcatctataaaccactttgtagttatatttttttttgtcgtaaaaaaaaaaaatagcaaacaatgattgatgaaaattgtcccaaacaaaaaaaaagaggattgacgataataaagatgcaaaaacagctttctatttctgtcagcatataaggattttatagaattcaaacttatatttctacactaagaaattaaagacttataggtgtaatctattacttcacagttcacacttttgatttcttatgggaatgtgttttcgtaaagggcaatatggttttaggcattcatgtgttttggatgagacgctactaccaaaagaatatgtcgttactaaaaaactatatttttgacacatgctgttaattttggatacatagaaggtctaagagattaataggaatcgtttttatctagtttctaatttagttcaaacgttgactactccaaattttcgttgtagagttatttattgaaatagtcatcgattttaaattgggtaatactatatccgatcgaactttaatatgaaatatgaattatgctacttatgagatgcgataacaaatttctatagtttagcgatcttttgttcatgttatttagagtttggatttaaaaaagttatgaaacaaagacacgtgtgttgacgggttgtggtgtttgatttgccttgctttctttcttctttgtgatgaagaatctctttggagatccaatatattgtttttggaagtatcacgacggtgacatgtataggtcgatcgaggaaacgccaatgataaccaaattgaggctgtcgcaactaaatgatcagtcgatagtcattattaatagtatagttcgattaaaaaaaaactttccaagattattgttaccttgtattttttttgaacattttctaaaaatgatatcttctaaacttagataattcaacctatttgtggtatcattaatttgaacaactttgacatgcaagtggttggccatactccatactacaagtctacaacatgtctgcgctaggaactttcttactatacttcatttttagaccattaatgttattgcttggtcttttaaaatgatagtaaattattattttatagtatctatcgtatattattatttacatcgatcataaagtgctggtttacaaaaaatatttttaaaaagaaagagtcaaagttccttccatatttgaccaaccaagcttgaccgactcgattcaatgggtccaaagtcatagtggtcgaggtaattggtcaatcaaaacaccacgggctatatgaatctcgcttaattgctaacacgacgtattgacaaattttccattcgtaatggtgcaactattcaaaaacaacaaatacttgattttattttgaattttattagtgtttgccaaatgattttagtccaccaactaaaaaatatagaaggagcaatagcatgccgctaacaagaaaaaaatagacatcttacaaaaaaatgttttttggtttgaccttagaataaatgtatttagttagcaattctaatttaattaaaaaaaacaacgaaattatcaatatacaaaatacaaataatgctacataattcgcttaagaagaattcaactattttattttacccaaacaagttaattcttacttttttctattttgctcttaatttcccattctgattaagaaacaaatctcatatacttttctatttttgttagacatgaatttcaaatatatatcttacatttataaaattaattttcaatcaaaaatcttgtagtattatacaaccgtgatgttcctaaaaaatacctgtcatacagctgttatgcttcttaaaataagataaaattatatttactgtattaagctagattgtcaaaaattaaacagcaagataataacgtaattaaccatcgttaatatcaaacgcgttaggtcggtttgaccggtctggtttggtgagcgctggtaataatttcaccatcccaatcaatcacagacaaaattgaaaaccccaattaataatacataaaatgaaaaacatgatgaattataaattaaaactctgttctgtctcaaaaaactcaaaaggagtctctctctcacctacaccacacctaaccaaaccccctacgattcacacagagagagatcttcttcttccttcttcttccttcttctttcttcttctttcttcttctagctacaacatctacaacgccatg

SEQ ID NO: 21557 - DNA, 3003 bp, Unknown; identical to SEQ ID NO: 21556
  misc_feature (1)..( 3003): 2750-1469P.txt file - cDNA_ID_1989445; gDNA_ID_1971791; Annot_ID_175568

SEQ ID NO: 21558 - DNA, 3003 bp, Unknown; identical to SEQ ID NO: 21556
  misc_feature (1)..( 3003): 2750-1469P.txt file - cDNA_ID_1989445; gDNA_ID_2926197; Annot_ID_141335

SEQ ID NO: 21559 - DNA, 3003 bp, Unknown; identical to SEQ ID NO: 21556
  misc_feature (1)..( 3003): 2750-1469P.txt file - cDNA_ID_1989445; gDNA_ID_2926197; Annot_ID_201553

SEQ ID NO: 21560 - DNA, 3000 bp, Unknown; identical to SEQ ID NO: 8398
  misc_feature (1)..( 3000): 2750-1469P.txt file - cDNA_ID_1989447; gDNA_ID_1971791; Annot_ID_58036

SEQ ID NO: 21561 - DNA, 3000 bp, Unknown; identical to SEQ ID NO: 8398
  misc_feature (1)..( 3000): 2750-1469P.txt file - cDNA_ID_1989447; gDNA_ID_1971791; Annot_ID_175562

SEQ ID NO: 21562 - DNA, 3000 bp, Unknown; identical to SEQ ID NO: 8398
  misc_feature (1)..( 3000): 2750-1469P.txt file - cDNA_ID_1989447; gDNA_ID_2926197; Annot_ID_141333

SEQ ID NO: 21563 - DNA, 3000 bp, Unknown; identical to SEQ ID NO: 8398
  misc_feature (1)..( 3000): 2750-1469P.txt file - cDNA_ID_1989447; gDNA_ID_2926197; Annot_ID_201550

SEQ ID NO: 21564 - DNA, 3003 bp, Unknown
  misc_feature (1)..( 3003): 2750-1469P.txt file - cDNA_ID_1989449; gDNA_ID_1971791; Annot_ID_58033
aactaacaccacaattattgagcacattcaaatgctgtcatttttattactcgtacgtacacatgaataaggtggaaatgtcatatttgggaaaacaccataaaacaatatgtatgtcgttcactttggtctcatataaacgctagccaaatcatacagaggtaatggtaatgtttttttatcgacggcaacgaaagtttatgctaatatgtttataaattacttttattgattaatatgattatctctgtatagttgtggacgtgtgtatataactgaccgtctaattaaagaaaaatttatcacatcacgtacctaaaagacgttcttcattaatccataattgctttagtgtataactaatcatctatttagaagttttttgttttacttttcctattgttaatgtttgaaagattagaatatatttataagaagaaatttataactttttagcaaaaaaaaaaaaaaaaaacttataacttatgaagtctttggtatgtatattaaatttgacctgatcacaagtaatgcacgtatattcacgatttgaggtacgaagcagatgaaaattgtactatttaacaaaattactaaactataccaattaccagacacataaaatctagataaagtggtcctaatttctgagaaagaatattcctgtgttcgttctttctatctctttccttttctgttgttacatttcccacacacaaaaaaaaaaaaaatctatttactgatctatgttaaataaaaatcaaaaggaaattgttttatgatttttattactttatattaatttaattgatgtaataaattattaaattaattcttggaaaattaatcaaattaacttaaatcaaacaaaatttagttaaactaataaacactttaaaataaaaagtttaatttgattaatttagtcagttatttattaaactaataaacactttaaaacaaatttagttaaactaataaacacttcagttaattattaaatatttatgagaattctaaaagattaatccttatgaaacagaggaaatatattttaagatagaaaagagatattaagaaatctcaaattaaaatacaactcatatttgacacccataagcaaaagatattataatactaaactacttatcaaagatatttcagtttattgatatgatcagaatttggtcaatttttctgtcaacaaagattggtctaaattaatgacctaaggaagcgaattaattcattaagaagactttttttctttctcaaaacttatgaaaattaacccacttctaattaatcatcaaaaagcttgaaattatttgtaaacgaagactagaaagagagaggggaaaaaggtatgacaaacagccttaaagttaaaggtaatagtaccttttgtttgttcttctttttttgcaaacaattttttcccttatttaattacgtttataaaccttaattcagattccttaaatacattgttaggactccataattagtaacggcattaggagcataaacaaaaattatgataaaagttttgatattatggaaataaccaaatatcttacctgtaaataaaataaagagatgtgaccaaatttaattgtggatttaattacattatctaacccttgaagaaactcaatgttttttgtgggattgttgtcctaaacctgaggttacatgtaatcaaaacattaatgggatttgaagtaaataaattagatttgcgccaaaaaaacaaaatctccattgattacagtgttttaatatggtcagataaaaccacagaagtggtaacgacataaaaaatcaccaccaaacataaaaccgtaagaaaagtttcgatttttattttctgcgatccaaaggtctagtgatgaattgaatttggtttttgtttttataattgaagaatgaagaaataaacagttgatgggttcttcgcttcttctcttgttgggttagtgataagcacgcctggcttctcatcattccctccaacctttctctctctaaaagacttcaattgttttatcagcttctctctctaaataaagctctcaattcaattctctctctttcacttttttttcctctgcttgcttcttctgttcatctttttgcttcgtcaaaattttgaccaaagttttgtacttttttgttgctgcaatttttgtgattagattggatctgggcttggagctgaatagcggatttgtataaggtaattgcttgaaacgtaccgaattgattcgtttttttgtttctctgagatttttcaatatctgggtcttagagtttggctgatctgattggttctctgagattttcatgtagataagtttgttttaaaagccaaagccttagtttttaattagtgagatagatttatgtagagagcatcaatgatcaatccttgagctttatcttgggttttgttatgttgtttattgaaaaatggtttgttcggtgagtatgatgattatgttcaatggaaatgttcttccttttctctcgaatttctgagttttgctttggtttcatataactttgtttgtttgtctggggaattgtgaaatttacataaccactacttccgatgtaatataaatatcagagcttttctttattgacagagattttttgacttgagatgaatgatgttgacccttgtggattctgagttgatttttgattctttctaattggtttctggtttctatttctattgatcagctgaatccaatcatggtcttttcagtagtgtatgctattggtgaaaatcaatattggtttcttcgccttgcttgtgatgccttgtctgctatcaaaatgtgtcatttgattggtttttgatagaattgatttgcatttgttgattcttgagattttaatcttagttgatgttgtctcataggttattattagtcttctctatcgttgcggcgttcataagttggagaaagtggtaaagactgcttaagtatg

SEQ ID NO: 21565 - DNA, 3003 bp, Unknown
  misc_feature (1)..( 3003): 2750-1469P.txt file - cDNA_ID_1989449; gDNA_ID_1620679; Annot_ID_48324
aaactaacaccacaattattgagcacattcaaatgctgtcatttttattactcgtacgtacacatgaataaggtggaaatgtcatatttgggaaaacaccataaaacaatatgtatgtcgttcactttggtctcatataaacgctagccaaatcatacagaggtaatggtaatgtttttttatcgacggcaacgaaagtttatgctaatatgtttataaattacttttattgattaatatgattatctctgtatagttgtggacgtgtgtatataactgaccgtctaattaaagaaaaatttatcacatcacgtacctaaaagacgttcttcattaatccataattgctttagtgtataactaatcatctatttagaagttttttgttttacttttcctattgttaatgtttgaaagattagaatatatttataagaagaaatttataactttttagcaaaaaaaaaaaaaaaaaacttataacttatgaagtctttggtatgtatattaaatttgacctgatcacaagtaatgcacgtatattcacgatttgaggtacgaagcagatgaaaattgtactatttaacaaaattactaaactataccaattaccagacacataaaatctagataaagtggtcctaatttctgagaaagaatattcctgtgttcgttctttctatctctttccttttctgttgttacatttcccacacacaaaaaaaaaaaaaatctatttactgatctatgttaaataaaaatcaaaaggaaattgttttatgatttttattactttatattaatttaattgatgtaataaattattaaattaattcttggaaaattaatcaaattaacttaaatcaaacaaaatttagttaaactaataaacactttaaaataaaaagtttaatttgattaatttagtcagttatttattaaactaataaacactttaaaacaaatttagttaaactaataaacacttcagttaattattaaatatttatgagaattctaaaagattaatccttatgaaacagaggaaatatattttaagatagaaaagagatattaagaaatctcaaattaaaatacaactcatatttgacacccataagcaaaagatattataatactaaactacttatcaaagatatttcagtttattgatatgatcagaatttggtcaatttttctgtcaacaaagattggtctaaattaatgacctaaggaagcgaattaattcattaagaagactttttttctttctcaaaacttatgaaaattaacccacttctaattaatcatcaaaaagcttgaaattatttgtaaacgaagactagaaagagagaggggaaaaaggtatgacaaacagccttaaagttaaaggtaatagtaccttttgtttgttcttctttttttgcaaacaattttttcccttatttaattacgtttataaaccttaattcagattccttaaatacattgttaggactccataattagtaacggcattaggagcataaacaaaaattatgataaaagttttgatattatggaaataaccaaatatcttacctgtaaataaaataaagagatgtgaccaaatttaattgtggatttaattacattatctaacccttgaagaaactcaatgttttttgtgggattgttgtcctaaacctgaggttacatgtaatcaaaacattaatgggatttgaagtaaataaattagatttgcgccaaaaaaacaaaatctccattgattacagtgttttaatatggtcagataaaaccacagaagtggtaacgacataaaaaatcaccaccaaacataaaaccgtaagaaaagtttcgatttttattttctgcgatccaaaggtctagtgatgaattgaatttggtttttgtttttataattgaagaatgaagaaataaacagttgatgggttcttcgcttcttctcttgttgggttagtgataagcacgcctggcttctcatcattccctccaacctttctctctctaaaagacttcaattgttttatcagcttctctctctaaataaagctctcaattcaattctctctctttcacttttttttcctctgcttgcttcttctgttcatctttttgcttcgtcaaaattttgaccaaagttttgtacttttttgttgctgcaatttttgtgattagattggatctgggcttggagctgaatagcggatttgtataaggtaattgcttgaaacgtaccgaattgattcgtttttttgtttctctgagatttttcaatatctgggtcttagagtttggctgatctgattggttctctgagattttcatgtagataagtttgttttaaaagccaaagccttagtttttaattagtgagatagatttatgtagagagcatcaatgatcaatccttgagctttatcttgggttttgttatgttgtttattgaaaaatggtttgttcggtgagtatgatgattatgttcaatggaaatgttcttccttttctctcgaatttctgagttttgctttggtttcatataactttgtttgtttgtctggggaattgtgaaatttacataaccactacttccgatgtaatataaatatcagagcttttctttattgacagagattttttgacttgagatgaatgatgttgacccttgtggattctgagttgatttttgattctttctaattggtttctggtttctatttctattgatcagctgaatccaatcatggtcttttcagtagtgtatgctattggtgaaaatcaatattggtttcttcgccttgcttgtgatgccttgtctgctatcaaaatgtgtcatttgattggtttttgatagaattgatttgcatttgttgattcttgagattttaatcttagttgatgttgtctcataggttattattagtcttctctatcgttgcggcgttcataagtggagaaagtggtaaagactgcttaagtatg

SEQ ID NO: 21566 - DNA, 3003 bp, Unknown; identical to SEQ ID NO: 21564
  misc_feature (1)..( 3003): 2750-1469P.txt file - cDNA_ID_1989449; gDNA_ID_2926197; Annot_ID_141330

SEQ ID NO: 21567 - DNA, 3003 bp, Unknown
  misc_feature (1)..( 3003): 2750-1469P.txt file - cDNA_ID_1989454; gDNA_ID_1971793; Annot_ID_58049
tgtactgtgaacacaatgaataatacgttaattctacgcagttatatctagagatgttgtggtgggtaaaaaagcccaacccgacctgaacccaaaataaacccgcccaccaaaaactcaactttagaaaactcagatgggtttttgattaagtgcgtaaagcccgaaaaaactgattattccgagactacccgtgggtacccaacttggtttttatcatttttttagagtttatttttaactgttaatatactattatatgtatgttgtatctatattttgcttattaatatattttaaattatatttattttctgtattacatatatatttgatgggaaaaaggttgaattgcgtttttggcgggaaaatgttaaattgcgttttttggagaaaaaatgttaaattgcgtttttggcgggaaaatgttgaatatcttttttggcgggaaaatgttaaattgcgtttttgaccggaaaatgtgaaatctttttggcgggaaaatgttgaatgtcgtttttggcgggaaaatgttaaattgcgtttttggcgggaaaatgttgaattgcgttttggcgggaaaatgttgaatatcgtttttggcgcgaaaatgttgaattgcgttttggcgggaaaatgttgaatgtcgtttttggcgggaaaatgttaaattgcgtttttggcaaaaaaaatgttgattatcattttttggcgggaaaatgttaaattgcgtttttgaccggaaaatgtgaaatctttttggcggaaaaatgttgaatgtcgtttttggcgggaaaatgttaaattgagtttttggcgggaaaatgtgaaattatttttggcggaaaatgttgaatagcgttgttggcggaaaaatgttgaattgcgttttggcgggaaaatgttgaatgtcgtttttggcgcgaaaatgttgaattgcgttttggcgggaaaatgttgattgtcgtttttgacgagaaaatgttgaatgtcttttttggcgggaaaatgttgaatgtcttttttggcggtaaactgttaaatcgcggtttaggggaaaaaatgtgaaatcttttttgacaagaaaatgttgattcacctgaaaaatgacttaaaaaaaaccgtgggtacccataacccaataaggtaaacccatatgggttttatttatttgggtacccagcccattttaaacctgtattttttttctagaaaaagtagatttatgggcttaaaattttatgtgggttttgggtacccagtgggttttaacccatcattaacatctctagttatatcaaagtgatcacataatttttaaataactatatatataatggtcaaacgcaataaagaatacgttgattctactcatttatatcaaagtgatcacattacttattgactaactatataatggtcctaagtcctaacacaatgaataatacgttgattctacacattgattctaacaaatatctaaatatcatatatcgaatatgagtatatgaaaaaacagaatggatcatgatatgctaaagaacatgatagtgagtttaagcactgtatctctgtatcatgaagaaaaaaatcacgtaaatatatatatagatctattatgaatgaattatcacgatggtatcatcacccaatcaatgtgacctttgttctcgatgatttggaattatacgataaattaaagtttaataggtctagacattcagatacacatacccaatcgttttttttttgggtttcgggtctctttgggtaggggttgacaatcttgatattctaaaatttttgtttgggttcgggttcgattattttagtaaaaaaataaataaaaaagtccaaaaataaccaaaaattccaaaatagttttgggttcggatcagattttttattcatatatactaaaatctgaccaaaatacccgattacgagaaaatacattggttactctttaccaaatgtaaacaaaaatacttaaattacttaaaagaaaaaataacattgattacttttatctcaaatatatccaaatatatatgtattactacaaaatatatagtatatccaaatttataattgtaattttgagtatttaaggtattataaatataaatataactaatatttttaaatgtatatttgtattcgggtatccacgggtattagatttggtttaggttgagttcggttttttttttttgattgtagacctattcgggtaattttaaaaattagactcggggttggctagtttttttttttgggtcaagtagtacgacatatgtaagaaaaataaagctaactattctaacattaccgttccatttttgacagctcactgtaacattataaacagacattacaaaccaaataaattctttttacaagcctaaaagtcatatttgcaagcccaacactaatctgcccagtaaacaataattagggtttcaattaaaatttggaaaaatcacggtgtcaagagtcaagacataaccaaagccgagatttggagatgaaagaaaactagatcgagtgatagaggagaggagagaaagaggagaaaaagagagaatagaaattggattaggaagtgggtttgcttttagcccacgtaagttagtttgaaagtcaacgtgttgtaatttgtaaacctaattggattagaaagtggggtttggtttatcccataacttagcacctctatttatataaaaactctagtcctaatcctattaggaaagcacttatttagataactcctaaagagatttgagcttatcacttcctaaaccataactcggttaggatctaaaccataactcggtttaagattacttttattcttatgctttctttgaagcttaatccatgttgtaatttgtaaacctaattggacttgggtttcataatcctagatagatagtcacatcaaatcattcgatttaagagagatcagttcgaggaaccaaaacctgagagacaaacatg

SEQ ID NO: 21568 - DNA, 3003 bp, Unknown; identical to SEQ ID NO: 21567
  misc_feature (1)..( 3003): 2750-1469P.txt file - cDNA_ID_1989454; gDNA_ID_2926143; Annot_ID_139019

SEQ ID NO: 21569 - DNA, 3003 bp, Unknown
  misc_feature (1)..( 3003): 2750-1469P.txt file - cDNA_ID_1989455; gDNA_ID_1971793; Annot_ID_58048
aaaactattttagttgcgtaaacaaagttaatatatgagaaccatatttaaccaaattcatgttagcttcttatgcatgtaattgttattaattaattgatgaagcaaacaatgaattagtgatatgattatggagaattatataattttcgtgaatgacgatgtaagaattaaagataatgatctatgcatatacatggttatatataaaatttgagttatattgttttttttagtaggataagatgagaacaatttgaattataatggtgaggcagaggttcaatatttatttgattataaagaagctaacatttgcaaatacaataaacaaataacaaaatctaactctttgactatttaattgattagaaagaacactaaaaattaaaatcatataatttaaatgtaggattatatatcggtaaatatatagtcacaatattttataaacataaattatcatgcagtgtattcagggctggtccgacatgtttaaatgccttacgcaaataaaaacaaattatgccatataatattttttttacaaaataacaaatgatatatagtaatatatgaaggtcctactaaaattgtagagagatttgcaaaagttcaatttttctactaccttttgcaataataccctttctttttgaccatttttaaaaatatccttttatttgaacaaaatgaccaaattacctatcatctaatgagaacatgtaatttgaaactgaaattttcccgcaaaaaaaagaatgagaattttttttcgaatttattttggcggaaaaattatatttggaatattttaggtgggaaaaatcaatagttcactttgtaaacctaaaacattttcaaaatagggataacatgttcattaaaagttaaaagagggtataaatgaaaatggtcaagaggaagaggcataattaaaacaggacagtcttgaaagagcattcttattaatttctcaaaattctatacaacatattttaatttcataaaaagtctatgagtaaaaacattagtttttaaatatagctctattttagatttttgcctgcaaaatcattgatcagactcatgtaatcgagcttttcaactataatttttttaatggatagcaaagccaacacatttacttgattaattattttttattttaaatcaaaatctaggcaccataccttacaatgtcttctatttgcaagcaatttaatgtttaacttttagaaaacacaatatatcactaaactatatccattaacaatatatttaattaacttttttattaatttaaaggcttaaattccacaaaatatggtgaaaagaaagctcaacaaaaaataaatttattgtaaagacctataatatttttattaaaatataaaagacttaaaagaaattctaaaatatacttttttttttgatgtcctaaaccatgacttcactaaatgaagttgatttgctgacggtgcaaaaaaggaaccatggctctttaacaactggtttgttgctactcatagatgggaggctgctcctattttgacttttgtcactactattgatctttgggtgcagattcgtggagttcctcttctatatgtgtgtgaagagactactttggagatagctcaagaattgggagagatcatcatgatggattatcatgatgctacctcaactcaaatagtctatattagagtaagggttcgttttggtatcactcacaaactcagatttttccagaggatcatctttgaatatggtgaaactgcaatcataagattccagtatgaacgtctcaagcgaatatgtagcatgtgtttctggtttactcagagactattgtccctatcgtcagtgtcctcacaacatagcaagagaaagggctctcttccgagatagtgttttcagatcaagtttgaattctcagtctcatatgacttagactttgtttccagctcccttgacaccgcctccaagagtagctcctcctccgctgaatcatgaagaattggcggctgcaattccatattttgccacaacaagagatgctcataacatatatggtgggagtctagtactacaagacaacaagggtcatcaaactctaacaacactccaccacgagaagcggcaaacttatctggtagtagcagagtctatgaagttggtcaatcatcaagaaggaatgaagctggagaagtacgaagagctgtaggggatccacgacttcagactcatcaacaaggtgctccaaggatgggaggaattctgaaacctccgaagaaaagataatcactctaaaaagaattatgtcataactttttgtttaaagactgcagtggaacaagtatcgtagcttcaaggcttgaataacaacacatagtttcagtatggtttttgtttaggacatacccttggcttggttatgtttgatgtttggtgtttcagtttaaatttctactaaacaatgttttttgttctgtttaccttaatcttgtaagtggaaagtccactgttacactttttgtaagatcacagtggtatgaaaaacaacttttcaggaaaaaagaccatgactttacttaaattttaattgttttataatttaaaaattaaatatattgctaattaccatttacccactcccgttcaagttctctttctttttgacacttattttttctacaccaaccagttagccacccaggttcataggcgaagcatcatgaaatttgatttaaaccattaaaccggtaattgcaaaactttccggtttagttctttcttacagaccaaaaacaaatcaattaaccgtaattgcaaaccaatccggttaaaatccaaaaacaacaccaccctcttcgaaaatcgttgagagtcctttttcacttcttcagatttctagggttcgctcaaacaaacgaagagaaactcaaattctgtaatctatagattttggaaatttccagatcggaaccctaaacgatg

SEQ ID NO: 21570 - DNA, 3003 bp, Unknown; identical to SEQ ID NO: 21569
  misc_feature (1)..( 3003): 2750-1469P.txt file - cDNA_ID_1989455; gDNA_ID_2926143; Annot_ID_139018

SEQ ID NO: 21571 - DNA, 3000 bp, Unknown; identical to SEQ ID NO: 8357
  misc_feature (1)..( 3000): 2750-1469P.txt file - cDNA_ID_1989457; gDNA_ID_2926143; Annot_ID_197560

SEQ ID NO: 21572 - DNA, 3000 bp, Unknown; identical to SEQ ID NO: 8357
  misc_feature (1)..( 3000): 2750-1469P.txt file - cDNA_ID_1989457; gDNA_ID_1971793; Annot_ID_58046

SEQ ID NO: 21573 - DNA, 3000 bp, Unknown; identical to SEQ ID NO: 8357
  misc_feature (1)..( 3000): 2750-1469P.txt file - cDNA_ID_1989457; gDNA_ID_2926143; Annot_ID_139016

SEQ ID NO: 21574 - DNA, 3000 bp, Unknown; identical to SEQ ID NO: 8357
  misc_feature (1)..( 3000): 2750-1469P.txt file - cDNA_ID_1989457; gDNA_ID_1971781; Annot_ID_175405

SEQ ID NO: 21575 - DNA, 3000 bp, Unknown; identical to SEQ ID NO: 8357
  misc_feature (1)..( 3000): 2750-1469P.txt file - cDNA_ID_1989457; gDNA_ID_1971793; Annot_ID_175586

SEQ ID NO: 21576 - DNA, 3003 bp, Unknown
  misc_feature (1)..( 3003): 2750-1469P.txt file - cDNA_ID_1989467; gDNA_ID_1971801; Annot_ID_58077
gccaatcaaagatcccacttatttgcgttttttactgttggcagatagtgtaagtcactgtatccactatcctctcaccttttggtgttacaacttgtaacttacaagtccagtgcatgcaggacaatgagactatcacacatccaatattagattagacccacatgctgagatccatcagtcataccaatttttttagaaagtagaatcctgacctgtaacaacctcagtggctgtgccttggggattactttactttattgagtggtatactcttcgtggatcacagaatgcagaatagacgagaatgaaagtcttcaagcctggctatagattgacactcactgtctacttctgcacttgcttccaccgtttctgcattttttcactttaccagccaagaaagcaaatacaaaagaacaaaaaaacaaaaaaacaaaaagtttattatgaagacaagaacaaaacccttacactcgtccaagaactaatccgatcattaagagccaaaattcgattgtttatctaaagacaaatctctcagagcggattcttcactttctcaagatgtacaaggaaacaatattctcaagctcaaaacaacctgagaaagtggtgaccagcttacatctaacattaattcaatgagatcctggttcattggtgaaacaaacttgaaactactaggaaggtttcaatcgaatgaaaacattaaattagatgtgaaccatatggcaccctatgaatccagattgtcaacaagttaactttatacacacagacaaatatgacaacgatagacagtttttactttttaataaaacagaggcaagaagatgagcatatgctagtggtggggcgtgtcattcttagattctcgggtggaacataggtttgaccagcaaaatggtgaggccaattattgggctcagtaggttggtatgggtttaaccattttcagcctatataaggtttaccttgccatattacttcaaaattattcaaaatcaacacaaatactcaatccattcttgttttatcacaaatcagatgatcttactactgtgttctaggctgaatttatgcgaataaaaatgtaccttccttcagctttcacaatgcatgaagatagatatgaaatttgtaaaactatggatcttttgatacaatcctggacaacaaattcataaaccaataatcattggaagagattaaaaaggggacataggaagaggttgtgacttacggatttacatcttgggtctgccaccgaaatgcttcaaagaaaatctggagggaccactgcgacactcgggtccttttctggaaactccccaacgtccagcatatggcaaccatcctttaattaagttaactagtctggattctgctgccggtaactcgtcttgtgctcctggataacacttctcagctacatcatccacaccgttctggttttggttttgtatttggatttcgttgacaatggatgacacatccaacctaccatacaaggattctttagcagagcattgaaatgcagagacgatataggaagattgttacaaagtacttactcgaggtaccgcttgcaactcgggctcttggatcttttgttcataggagagtggtctatcgacaaatgccttacgaaatgtaactgaaatagagtgaaagggatgttaagactttcaaaggaatgagattgcgtgcatacgattcttatatagaagtgagaaggagtttaacgaacttggtctccatcattgagaccgagataacggatgctagtcttgtcattgactaatctctggtctcgataacacaagcaaaaatgaccccagacgtgagacctgtaggcaaagatcaaagtgaacgactgtaccagaaagcttaagctgtgagaattttcatatgaaatgatgatataccatgaaatcatgccgtgaccttccagaggagaaatggtgaatacttgttccacagctcttttgagctctgccactgagcaatcctttgcaacttccacatctattgattcgttggaaaccatttaacttcttgagaggccaaatcagaaacagtaaccaaaaaactagttgatacttcatccaaaattatgtctattaaggctcttaaacaatgatttctaacagcaacaaaaaattccggattagagatcgattagggtatcaccaactgagggaaccgttgagcttgattgtaaactaaactcttaaaattgctatttcggaaactggataagcaaaatcgtaccgaaaagggagccgttgagcttaacgacggaaagcttgatacgaccctgaggaggaagtttcaggtaggaagatctccgtccagaaatcgaaccaccgtcgtttaaagcaaacgatgacaagaagcgtggatctatcaacgacctcagtcctccacttcgacgaccgtccctaaccggactatgctcttctcgcattgccgattctcccggattttcaccgacaagattctgctctctttgctcttcttcttcagccttcaggtgactgttgaggagctgagcgagcgagcgagagaatcgggagagtttgttttccggggaaaaaccgcaattactgctatatagctccccaataaatgccaaaacaaaaaatcaaattaaagtttgtcaatgggcatcacggcccaaatctaataatcaaaggcccaataacttgattcgacaatacttagcgggtttggataaccgcctaagcatctgttcgacaccgcctattttttttttttacttactcctcctgatctgctgatataaggccgaacgggaataaaaaaaaaaaaaaaggaagaagcgactcacccgaaaatgttttagggtttttctttactcgattaagctcactagttcttcgcaacgtagttagagatcgacactggcgcggtggatttagggtttttttcctccgcgactacgctcggcgtttcgatttggaaccctaagctatg

SEQ ID NO: 21577 - DNA, 3000 bp, Unknown; identical to SEQ ID NO: 8430
  misc_feature (1)..( 3000): 2750-1469P.txt file - cDNA_ID_1989468; gDNA_ID_1971801; Annot_ID_58076

SEQ ID NO: 21578 - DNA, 3003 bp, Unknown
  misc_feature (1)..( 3003): 2750-1469P.txt file - cDNA_ID_1989472; gDNA_ID_1971801; Annot_ID_58071
gtttttactcgattcttattttttgacaggacattgctgtagaggcacaaaatgaatctaaatggaagcaacttggagaattagctatgtcaagtgggaaggtgaccattttttagctgcaatcagtgttctaggattcttacaaaggttaaagctaacatgtatttttcttttcattttccttcccatgcttggactacttagctggatatggctgaggaatgcatgaggcatgctatggatttgagtggtctgctgctgctttattcttcattgggagatgcagatggaatgatgaagctggcagcacttgcaaaagagcaaggaaagaacaatgtcgcttttctttgcttgttcatgttgggtcaagtagaagactgcctgcatctgttggtggaaaggtacattgtttactatttcttacatgtggaacatatattcccgcaactaattacgtctatgctgatattaatatggttacagtaatcgaatacctgaagccgctctgatggcgagatcgtaccttccaagcaaggtctccgaaatagtggcattgtggagaaacgatttgaccaaggttagtggtagacacatccgatgcaccttgtgattgaatttcaaaccttgcctgttgagatatccacaatttttcttcatcctctgtcaatctggatatagataagtccaaaggctgctgaatctctggctgatcccgaagagtatcccaatctctttgaggagtggcaagtcgccctgtcccttgaaaatagagctgcagagacgaggtatcttttcgtcgttgccgtcattagcttattcttaaaaacagtgcttatgaggaaacctttttaattgaattgtgggacttaagccatttagagtcatgtgtctgtattacatagcaaggtagccgtcatgtatttgcttataatttgaatttatacccgtataaacataagccgaatgtcgatttcattttttcaggatcctcataaacaaagtatttttgttgacttatcttgcaggggcgtccatcctcctgctggggattattgtagtcatgcagacagagatcatacaactttagtggatgcttttagaattatgcaaatagaggaagagggtcgacttgagcaaggggatgttctcgacgaggtatgcatgtttacattacatgcattgaagaggattgtcttttacccatgatatccaatccaatggtcttggccatggtggacaatggtaggatcattaattctactgtcgctgcttcatttgttgtgaacaggttggggaagagggggaagatggagaggaagaggaggaggaggatcgtcaggaagagagtagtgatgggagacagcagaatgtggaagaagaggctgttgtggtggacgctgactctacggatggtgctgtgctagttaatggtaacgagtctgaagaacagtggggtaagattagtgaaggaaccgcatcagccttatagcatttgtggttatcaattgattataagatgtcgctgcaccaaaatatccttttgccatctgcacatatatcataggatttgcgtttgcatctgtccatcaatgtttcctcatctgtctgcctcccatcttcgtcttactgatcatcttacttttgatgttgactgtcttttaaatagtgcttctctatgccattaacttttttatcaatccgtggactgattaaatatttgtttgttgtacagttctaacaccgccacaagagtagggttggtgaagagtgaagacatacacagatagatattttcttggctttgaaacttgatacattcagcagagaaatgaggcagcacagagagagattagtttccattgttaaaaaactgatctattgatagcttccgctttgtgcttttaatacagatacatattaaaaaaaaagggggttttgggactcttatgtagctttaacttatgagagatttcacctgtagaatatctgttttgaactgagatttcacccatataatatgttttgactttcgattcaataggttatgtagttgatatcttttttttttttgcaaaactcaatagcagtagcaaaaaacttaattggaaataatcaaagtgaagggataagttgggaaagagccagaggataacgcatggtgcattattattagtattgtggaggagacgcatctcgaaacatctctcaaagcaaacaaggacccaaaacaaagttccttgcattcttccactgtccgtaatcaccatcaccatatcattattcttctacccattttgtcttggaaatgattttaaattttcttgttgcttcttactgcaaactgtgtataggttcaactactccattgagttacacacttgcatgcacctatggaagttaattttccggttttgattgatattcaagttgttgaccaatggagttatatacccttgatttatatagaaaccacatgttttatttatattaacatggtcacttttgtcaggattaatagacaacaatagttgagagaaaaagtgataaggtagagctaatttgtattaaacttatcaattagtattgttggttaaaaaaaagttaataaagtagtcaagttggataattcccaaaaactgggaaaaaagaactcaagcgtcaaatgttgtaggtgcatcatcatcagtctacaagtagtaaaaaacccattcgatttgataagaagacccaacggaaagagtcttcccgtctacaaagtaaacccaatcaatcttaataatctttaagaggttttttcttattataattatctatctctctatctatctatctgcggatctctcatgaagaaacactgaggagattctctcgctctgatctcctggtatcgtcgtctctctccgtagagatatactagtttgtcccatatccgattgattgctctattcaatttattcctcttctaggttttcggtttggccctccgatttagagggattgatg

SEQ ID NO: 21579 - DNA, 3003 bp, Unknown; identical to SEQ ID NO: 21578
  misc_feature (1)..( 3003): 2750-1469P.txt file - cDNA_ID_1989472; gDNA_ID_1971801; Annot_ID_175689

SEQ ID NO: 21580 - DNA, 3003 bp, Unknown
  misc_feature (1)..( 3003): 2750-1469P.txt file - cDNA_ID_1989473; gDNA_ID_1971801; Annot_ID_58070
ccttgattttggagtctttggtggcctctttagccccaggtcttcttcttcttcacccctccaccgaaacaaatggctttctcacaaagtcgggctttctcttctgagctccagcttcgaactaggcgatgatccattcagaagggactacattgtgcttgcccctcaggtcaaggtcaacaatgttaatacagcaactcccaagctttccagtgatccttgtgtcattgtggaggaaccaaggagatcaagctcatcatcccctatggatatcatctccacgtactctcgctccctctctgggcgtgagatggctctctctgaggactatacctgtataatttctcatggaccaaacccaaaaacaacttatatatttggcgattgcatcctggattgtgaccccaaggacttgggaaaagaagatattgagatacacgaagaaggggatgattcttttagcacagaaaaacctcaaaatcacaggttcttctggctccaacttacaaagcagcattgagtggtctttttaaccttgaactaattacatctctgacattttatttccgtgaatgaacaatagggaagtatcagcagaaaaggaaagtgagaacgctggtgctgaagaatcatgttacgaagaggaggatctgtttcctatggcaatgcctcttaacccgtaatgagatggccagagtgaagggggtttattgtgtgggcctctccctctttgagtgtgacatttagtgttgtaaggttaggtgtggggatttttgtgtgctcaataaaaagctttgattcgggtgagttttgctgtggcctgatgccccggctcatcccttttcttcgtcttgttttttttttcttcttactttgtatgattgcgttgttactactgatcctcatttgatggacacacttgtgttttctctctatatcaattgttttagtggctcacgttgctgaataaaaatggatattatcgatagggcatcttttattctattttgggatacaagaatgattgaaacacaatattggaaagaaaagctaagttgcaaaaaaaaaagaaaaaggaaaaaaagtcgaccacagtgggagtcgaacccacgaccttttgatccgaagtcaaacgcgctaatccactgcgctatgcggtcattcttgttacttatatcatgaacaacatggtaagccaaaacttcttctttcctctttcttctttctgttttctggtcgctcgttaccaccaagacctcgtcgaggtttctctctctctgaaaaagtgcttttgctgcgtttccatgctctcggaaggaacttggctgaatcgttggagaattatcgatctggcgtcgttggtgcatctctagctgcgccaattcatcggatccggtttgatttctccctttcgcgaatctagccttccgtgatcttaggtgggttttccgaattgatctgtaattgaggatgtaaatcgaaactagggatttcctagatctcgttagctgtgtatttgattattgcagcagagtttttgtttaggtagagatatagggaattttgatatagggacacttaaattttggtgtatcaatttgctgcagcagccatgttctatggcacagctgtatgggacccttggcttatcgttggccagattatttgcctccaatgctcttactatctcactcttggactcttcaccatggtctttcttggccttcgtgttcctcgccttagtcttgtctacttcttcgattacgctactctcactacttccaccttcaccggttggtctgttattgcctcattcctcttctcttcactcgctgggtattttgctttgccccctagtaatagtatccatccatttatttccctctttattactagtcttttcagattccttgtattcattttaattggcagggctgtgtacatgatatttttggtggagcgagcacggaaatgcttagatttctctgcaactctctacatcatacatctcttcttttgcatcatgtatggaggatggccttcctctatggcgtggtgggttgttaatggaaccggactcgctgttatggctttgctagctgagtacttgtgcattaaacgcgaacagcgagagatccctatggatcgcttccactcaagtaagatgatcattctttcttgaaatctctctgtgtgaacaagcatatctttaccttttactttctcaagactgacttaacatgaaattaaatttggctgcctatgctgctgctgcaggggtttgaagattggtgaaagaacaagtgatgaagattcttgtgggttagcagcgcgactcgtagagcctagtagagcctagtactcttaacaattgtgatgtacagagatgaaatcagaggagtagaatgggcgaaaggaagttcagctagccaagcaacaatgttggacactggtgcaccaactctgactgcaatttttagtgacttcaaatactaagactttggaatacgtttcaatttgttcttttgtatgaaaaaaacattagactcgaataggttattgatttcatgttgcttcttttttttgtttatactggattttctcttctatcctctacttggtgcagctttgtgtgttttaaaaccagtgtctcattcatcatactcttttaccaccaattgaatccttccaatttactgttttttgggggggaaaattactgtgtactaacaagtaaaaagggccgtccgtcaaaatgtaacatctcctatatacggtgcggtcaagttaaaaaaaagagcaaaaacgcgtgataaaacgacgtcgaattagagatcctactagacccagattcagatccaaatcgccaacgcgcactggaagtgggatcaccaccactgcgcttcttcttcttcgtcatctctgatcccccctgcgatcaggggccatttccgtcgataatccgatctccggttcagacattcgtttggacttgcaaagatg

SEQ ID NO: 21581 - DNA, 3003 bp, Unknown
  misc_feature (1)..( 3003): 2750-1469P.txt file - cDNA_ID_1989476; gDNA_ID_1971801; Annot_ID_58065
aacaaggcaattctcgtttccaaaatcaaacccgactacactcattgtcaggctgtgttattcaataatactgggggctcccaagtatttgatagcaaccttctcagatcaataaaagcaaaaaaaataagtatcagatgaacaaggatggaatatcaatgaaagcagactaggagaagactaattggtgttaacacaggtcagataactagtcttattactgaacctaaatcaaatcaacattttagattacaatcaccaatacgggagaacacgcgagccattcatacaaatagatcaaacctaaaaatcaaatctacgaaaaaatagaagaggagcttcagatctggaagatctgggaataaagattgggaaacatacctggatcgcgagaggggtttaaagttatggaagcttgaacccaaatctgggttttatcgtcgtagagagaaaacgaagagcaggagaggttgtcgtaaggaagagacaagagagcgagaggggtttattaagaagcccccagggttgcgttcctctctacttttccttttttcttttcacactttcttttcctttttttttttaattactacttttatgtccttttcttctaatactatatcttatgatatttatttttgcctctctttcataatttacgtaaacaaatcgagtctacaaataaaaattatcaaaaccaaattaatacatttgcgtaaagctcttccgtccaaaaccaaattatttataagttgaaagattatacaactaactttgtatgcgttaatgataaacaacaataataattctaaactatttgaaaaatattattagctagtaaatgatttctgagttggattttttcgagataatgtcactgtttactggcatttcaatcctactgttgcaaaccttattttgtgaaatattcttagtgtggacaaaaatcttggatcgtaatcatctagtacagtactttctaatcgtcaattagattgaagaactatattaaatgtttacatatatttttggtatcacttgcttctttatttgcatctttcctacctgatcttaagtttactcggtttaaaactactgtatatagcaaacttgcaatgacatgcaatatgctatgattgttttcttttgttataaatgttaatatcatatataaaatgaaagaaatgtattacaaaagagcattaacctaatcaccagattgcgaaaaccttttagatgtcttcttgaagatatggtattgcaaatttcacggtcaaaattcttgaaaatgatcgaagaaagcagtgactgtgaattatgtaagacattatttacttgttttcaaatgtggtaaactccaccgtgtgctgccatttttttgagagtggaaggaacatttggtgaacgagtttttgtccaagagagaagctcaaactatgtggaaggcatatgcgtgtgctgccagtttcttgagagtggtaggaacatttggtgaacgagtttttgtccaagagaaaagctcaaaccatgtggaaagcatattcgtgtgctgccagtttcttgagagtggtaagaacatttggtgaacaaaagctcaaactatgtggaaggcatatgatgcgagaaatgcttaaccgagaaaaaaattagcctccaaatctcacaagcaaaatctcaagttaataagcattttagcagtggtgtctatgtacaacaatatcataatatgaaagccagtaataaaatttaaatggtatgaaaaacgataatagctatataataacattttctttgtttttaatatctatattttgttttagttatatataatattaacatgtcaacaaagttttcaaataactgattatttaatataatcaaaacaagtaaaattatacgatatttggctagatttaaaacgactattttagtgaatcgaataaccaaatcataccaaactcattcaaaatcattattagctttcgttacagtagataaaaaagtattggtaaccatgctcttataaatttaattgaattagacagtttatgattaaatcgataataataacgaagattgatgtattttgcaagtagaacaatttatttctggtcgaaatataaatagttacaacaaaacagttttcttaaaatcattaaatatttgttttgtttaaatctctattttgttgtaactatttacaatctctagatcacattaaatctctagaacatataagagatttgttgcaatccctattacaatatctggatcacattaaatctctagagcatataatccctctttgatccatatccttttctctttttcctttctaatttataaaaaatgtgattttttttgggaaattcgttttcgttcaccataaaaactttgctattaataattactctaatttaatggaaaataaataactcgtaaaaatgtaaagagagaaatgaattgcgaaatattttaattgagaaggtaaagaaaagtgaataagcaagtaaagaagaaagaactcaccaatcagaaatcagaaattagaagagaagagaagcataaagaaaaaaaaactgcaacgccgtttgttgccgatctgcagcagcgcgatctctctgattatagagagctatcatcctaggtgagcttcttcttcgatttcctcttctacaatatcctttcaagttcgatttcatcttctttcaccaattattggttttgcttccttcccgtagtttcgtttgtttgttttctaaggttttgtgtcgatctcaaagtgagtccagggattcatatacctttagactagattagccgagatctattagtgttgatctccgtcatgtagaatccctaattaatttcagtggcctcagatccagcttttcatgttattgataattttgtatccttgaagctttttggatgttgtgagattataacagagcttttcctttcagcagaatagaatctctcagtttaaaggctccaaagatg

SEQ ID NO: 21582 - DNA, 3003 bp, Unknown
  misc_feature (1)..( 3003): 2750-1469P.txt file - cDNA_ID_1989476; gDNA_ID_26992; Annot_ID_146587
aacaaggcaattctcgtttccaaaatcaaacccgactacactcattgtcaggctgtgttattcaataatactgggggctcccaagtatttgatagcaaccttctcagatcaataaaagcaaaaaaaataagtatcagatgaacaaggatggaatatcaatgaaagcagactaggagaagactaattggtgttaacacaggtcagataactagtcttattactgaacctaaatcaaatcaacattttagattacaatcaccaatacgggagaacacgcgagccattcatacaaatagatcaaacctaaaaatcaaatctacgaaaaaatagaagaggagcttcagatctggaagatctgggaataaagattgggaaacatacctggatcgcgagaggggtttaaagttatggaagcttgaacccaaatctgggttttatcgtcgtagagagaaaacgaagagcaggagaggttgtcgtaaggaagagacaagagagcgagaggggtttattaagaagcccccagggttgcgttcctctctacttttccttttttcttttcacactttcttttcctttttttttttaattactacttttatgyccttttcttctaatmctatatcttatgatatttattttkgcctctctttcataatttacgtaaacaaatcgagtctacaaataaaaattatcaaaaccaaattaatacatttgcgtaaagctcttccgtccaaaaccaaattatttataagttgaaagattatacaactaactttgtatgcgttaatgataaacaacaataataattctaaactatttgaaaaatattattagctagtaaatgatttctgagttggattttttcgagataatgtcactgtttactggcatttcaatcctactgttgcaaaccttattttgtgaaatattcttagtgtggacaaaaatcttggatcgtaatcatctagtacagtactttctaatcgtcaattagattgaagaactatattaaatgtttacatatatttttggtatcacttgcttctttatttgcatctttcctacctgatcttaagtttactcggtttaaaactactgtatatagcaaacttgcaatgacatgcaatatgctatgattgttttcttttgttataaatgttaatatcatatataaaatgaaagaaatgtattacaaaagagcattaacctaatcaccagattgcgaaaaccttttagatgtcttcttgaagatatggtattgcaaatttcacggtcaaaattcttgaaaatgatcgaagaaagcagtgactgtgaattatgtaagacattatttacttgttttcaaatgtggtaaactccaccgtgtgctgccatttttttgagagtggaaggaacatttggtgaacgagtttttgtccaagagagaagctcaaactatgtggaaggcatatgcgtgtgctgccagtttcttgagagtggtaggaacatttggtgaacgagtttttgtccaagagaaaagctcaaaccatgtggaaagcatattcgtgtgctgccagtttcttgagagtggtaagaacatttggtgaacaaaagctcaaactatgtggaaggcatatgatgcgagaaatgcttaaccgagaaaaaaattagcctccaaatctcacaagcaaaatctcaagttaataagcattttagcagtggtgtctatgtacaacaatatcataatatgaaagccagtaataaaatttaaatggtatgaaaaacgataatagctatataataacattttctttgtttttaatatctatattttgttttagttatatataatattaacatgtcaacaaagttttcaaataactgattatttaatataatcaaaacaagtaaaattatacgatatttggctagatttaaaacgactattttagtgaatcgaataaccaaatcataccaaactcattcaaaatcattattagctttcgttacagtagataaaaaagtattggtaaccatgctcttataaatttaattgaattagacagtttatgattaaatcgataataataacgaagattgatgtattttgcaagtagaacaatttatttctggtcgaaatataaatagttacaacaaaacagttttcttaaaatcattaaatatttgttttgtttaaatctctattttgttgtaactatttacaatctctagatcacattaaatctctagaacatataagagatttgttgcaatccctattacaatatctggatcacattaaatctctagagcatataatccctctttgatccatatccttttctctttttcctttctaatttataaaaaatgtgattttttttgggaaattcgttttcgttcaccataaaaactttgctattaataattactctaatttaatggaaaataaataactcgtaaaaatgtaaagagagaaatgaattgcgaaatattttaattgagaaggtaaagaaaagtgaataagcaagtaaagaagaaagaactcaccaatcagaaatcagaaattagaagagaagagaagcataaagaaaaaaaaactgcaacgccgtttgttgccgatctgcagcagcgcgatctctctgattatagagagctatcatcctaggtgagcttcttcttcgatttcctcttctacaatatcctttcaagttcgatttcatcttctttcaccaattattggttttgcttccttcccgtagtttcgtttgtttgttttctaaggttttgtgtcgatctcaaagtgagtccagggattcatatacctttagactagattagccgagatctattagtgttgatctccgtcatgtagaatccctaattaatttcagtggcctcagatccagcttttcatgttattgataattttgtatccttgaagctttttggatgttgtgagattataacagagcttttcctttcagcagaatagaatctctcagtttaaaggctccaaagatg

SEQ ID NO: 21583 - DNA, 3000 bp, Unknown; identical to SEQ ID NO: 8424
  misc_feature (1)..( 3000): 2750-1469P.txt file - cDNA_ID_1989477; gDNA_ID_1971801; Annot_ID_58064

SEQ ID NO: 21584 - DNA, 3000 bp, Unknown
  misc_feature (1)..( 3000): 2750-1469P.txt file - cDNA_ID_1989477; gDNA_ID_26992; Annot_ID_146586
aaaaatgggaaacaatgcgctattctcttctgacgccgccatctttggagcctttaaactgagagattctattctgctgaaaggaaaagctctgttataatctcacaacatccaaaaagcttcaaggatacaaaattatcaataacatgaaaagctggatctgaggccactgaaattaattagggattctacatgacggagatcaacactaatagatctcggctaatctagtctaaaggtatatgaatccctggactcactttgagatcgacacaaaaccttagaaaacaaacaaacgaaactacgggaaggaagcaaaaccaataattggtgaaagaagatgaaatcgaacttgaaaggatattgtagaagaggaaatcgaagaagaagctcacctaggatgatagctctctataatcagagagatcgcgctgctgcagatcggcaacaaacggcgttgcagtttttttttctttatgcttctcttctcttctaatttctgatttctgattggtgagttctttcttctttacttgcttattcacttttctttaccttctcaattaaaatatttcgcaattcatttctctctttacatttttacgagttatttattttccattaaattagagtaattattaatagcaaagtttttatggtgaacgaaaacgaatttcccaaaaaaaatcacattttttataaattagaaaggaaaaagagaaaaggatatggatcaaagagggattatatgctctagagatttaatgtgatccagatattgtaatagggattgcaacaaatctcttatatgttctagagatttaatgtgatctagagattgtaaatagttacaacaaaatagagatttaaacaaaacaaatatttaatgattttaagaaaactgttttgttgtaactatttatatttcgaccagaaataaattgttctacttgcaaaatacatcaatcttcgttattattatcgatttaatcataaactgtctaattcaattaaatttataagagcatggttaccaatacttttttatctactgtaacgaaagctaataatgattttgaatgagtttggtatgatttggttattcgattcactaaaatagtcgttttaaatctagccaaatatcgtataattttacttgttttgattatattaaataatcagttatttgaaaactttgttgacatgttaatattatatataactaaaacaaaatatagatattaaaaacaaagaaaatgttattatatagctattatcgtttttcataccatttaaattttattactggctttcatattatgatattgttgtacatagacaccactgctaaaatgcttattaacttgagattttgcttgtgagatttggaggctaatttttttctcggttaagcatttctcgcatcatatgccttccacatagtttgagcttttgttcaccaaatgttcttaccactctcaagaaactggcagcacacgaatatgctttccacatggtttgagcttttctcttggacaaaaactcgttcaccaaatgttcctaccactctcaagaaactggcagcacacgcatatgccttccacatagtttgagcttctctcttggacaaaaactcgttcaccaaatgttccttccactctcaaaaaaatggcagcacacggtggagtttaccacatttgaaaacaagtaaataatgtcttacataattcacagtcactgctttcttcgatcattttcaagaattttgaccgtgaaatttgcaataccatatcttcaagaagacatctaaaaggttttcgcaatctggtgattaggttaatgctcttttgtaatacatttctttcattttatatatgatattaacatttataacaaaagaaaacaatcatagcatattgcatgtcattgcaagtttgctatatacagtagttttaaaccgagtaaacttaagatcaggtaggaaagatgcaaataaagaagcaagtgataccaaaaatatatgtaaacatttaatatagttcttcaatctaattgacgattagaaagtactgtactagatgattacgatccaagatttttgtccacactaagaatatttcacaaaataaggtttgcaacagtaggattgaaatgccagtaaacagtgacattatctcgaaaaaatccaactcagaaatcatttactagctaataatatttttcaaatagtttagaattattattgttgtttatcattaacgcatacaaagttagttgtataatctttcaacttataaataatttggttttggacggaagagctttacgcaaatgtattaatttggttttgataatttttatttgtagactcgatttgtttacgtaaattatgaaagagaggcmaaaataaatatcataagatatagkattagaagaaaaggrcataaaagtagtaattaaaaaaaaaaaggaaaagaaagtgtgaaaagaaaaaaggaaaagtagagaggaacgcaaccctgggggcttcttaataaacccctctcgctctcttgtctcttccttacgacaacctctcctgctcttcgttttctctctacgacgataaaacccagatttgggttcaagcttccataactttaaacccctctcgcgatccaggtatgtttcccaatctttattcccagatcttccagatctgaagctcctcttctattttttcgtagatttgatttttaggtttgatctatttgtatgaatggctcgcgtgttctcccgtattggtgattgtaatctaaaatgttgatttgatttaggttcagtaataagactagttatctgacctgtgttaacaccaattagtcttctcctagtctgctttcattgatattccatccttgttcatctgatacttattttttttgcttttattgatctgagaaggttgctatcaaatacttgggagcccccagtattattgaataacacagcctgacaatg

SEQ ID NO: 21585 - DNA, 3003 bp, Unknown
  misc_feature (1)..( 3003): 2750-1469P.txt file - cDNA_ID_1989478; gDNA_ID_1971801; Annot_ID_58093
aacacgcttcttcacagcagtatccgctggaacaaacacaaatcaaccccatcgtcatatttttgtttaaaactacagaaccaggttacacaattccaaaacgtagtagtatcgtatatgtcaaatccagagaccaaacccattcaaaatcaaagacaagcacacaataaatcatcaaatagcaatctggatctgtaaattacctgcagcggagccgattaaacgagagaatatggaggaatatgcgggaatggaggatgcacgagtcgagagagaaaggtgagtggactctacgacggcgtgcctgcacgacggagccgcgcaggacccgacggcggagatggatttaagatgcgatgaaacgattctcctccacataatggtctcgattcttcgggaaaattaggtttgtcgtttccgatctcagatgattctcagtctccgactacctccttcaaacggaaatgaattgaataaattgaagattgaacaagacttcgactttttggcgacggcctgttgggcctggatcatgcgacttgttgacccattatctaatttgaaacaaaaatcaaaatcaatatgtaacaagattaaagtaaaaacttctgtcgatgattaaataaatttttgtaggatatatattttcttaaaaattaattaacgcatatgatctaatactatctcttattagattttattggctcgtaaagttgagttaagacttctcagaagaaaaaatgaaactccgttatatataatatatgttgaaacggtgattaactagttaataaattttgtgggactagttcgtaaattacatttttattatgtaacatgaattacaattatccattaatgtagtatattcaaccgaatgagtcaacgaccccaactttcatcctcggagtttcccaaccgctaccagcctaacatcatcgatcaccggaccacatagcgagccagagtgatcgcttttcatgtggtaaaacgtgctcaagaaagtgacacgtgtcctggccgacactgccttgaacacaagcctcccacgtctaaacccgccttttcctttagaagcgtagtccaccatgaccttgccctgtccagcgaacgcttccacaatcattggtccctcacaaccgtctctggcgtctcccacgttgaacgtgagggcgtagaatttgttcagtgacgtcctcactatctgagaaatggcgctctctttgcctccaacaagctcgatggctcggtgtccttcggggacagcgaagtgtgctttgtctacgtacttaacggctttgagagactcgatcatccaaccgggcaatgggctgttatcgtcctcgatgaacggtgggatcagtactccccattttgccgtgggaaacacgtaaggtccttcttcgaaattcccattctttatcagattatctgcaaacagaggtcaccacttaatcaccgaatccggtttactctaaaagattaaaagatatgaatatggtcggttccggtttacttacatccagagaatctgggagggaacaaagccttgatagccacggcgtcgatcaaaggtccgcaagccgggtgctcttcaacaccagggttatggaaccggatctcgatttcgggaccaccagctttaaaagcccatgagtatgagtcccaaccatcgctgccgtacatcgtctggatagggatcacacctgactcatgcgtcacggatatattgagcctctcgtcttgagcgcaggttcgagcggcgctgaacgttattgagtacagacggccaggtaggacggatattttctgggagattgaggcttcgttgcctagtctaacggcggaggaaccctgcggtacgaccaagaccatgtcatcttgtttctgaccggatttaatgaactccacaaagccgattatgttccagtttggtacggcggttcgttccttaaccacggatcctttcatttgggagggtttaggacccaactcgaagttgccgtttggtaataaacctgaaacaaaaaatattaagaaatgttaatttataatctcggatttgagttgaaatgagctttaactagagttactaccatcgcggactggggccgataagacgacattcgaagagatgaagaggagagctaagaggagtgctgcttcttggtacatcatgacttccttgggtgatagatgaagatcagatggtgagtactatccaaagggtgaagaaaggctgggtttttatgagtttgagaatagaagacgagcactggttttgaagaaaacaacgggaatgccactggaagcatcctgggttctattgtcaggtgccacgcagacacagacagctagctcaggaaacatttgacttcatgattagcatttccatttcttcaatgtattgtttaaggggctgccttaacaaccattatattaaactatatattcaaacgtaatttgcgtttgcctatctaaattattcacataaattttcaaagtattaaaatattttttggctttttcagaaaaacatttttgaagatcagtacatccatgcgtaaacgccaaaaaagttctttttgaaaaaaggtttacgggtaagtattccttaaaaagtgattaatctggaaaaaacatacacactaattaatataaatatatagggtacgtaacaactaatgcaaacaaacaacggaaaactaaaatatgtagagaaaaaaacatatatatcatcaccactcaactataatgccatggttttggaaaatgaaagaaatataatgtatatttgagatgtctctaagattagtcatttaacgccatgcaactcatcccaactctaatcaataaaaaataattatgattttcgtatagaatgcgacaaccaaaagttaatgacgggggaaaatatgtgctgttttggaataaatcaactcaacttaaaaatgaagtcaaaaatggtattgattgatgttagatattgatcacattgggatg

SEQ ID NO: 21586 - DNA, 3000 bp, Unknown; identical to SEQ ID NO: 8433
  misc_feature (1)..( 3000): 2750-1469P.txt file - cDNA_ID_1989479; gDNA_ID_1971801; Annot_ID_58092

SEQ ID NO: 21587 - DNA, 3000 bp, Unknown; identical to SEQ ID NO: 8433
  misc_feature (1)..( 3000): 2750-1469P.txt file - cDNA_ID_1989479; gDNA_ID_1971801; Annot_ID_175720

SEQ ID NO: 21588 - DNA, 3003 bp, Unknown
  misc_feature (1)..( 3003): 2750-1469P.txt file - cDNA_ID_1989481; gDNA_ID_1971801; Annot_ID_58089
gatttggacataacacagaagcgagtccgtgagggatttgtatcggctgatgaaaaattaaaatatatttaatcagaaattagagatgagaaaatggcattggtcctttatcctaggaatgaagaatctgatgttgttgcaactaatttgtcagaatgtcaggctcaggtccactttagccgccgcagtcagctgcccagttttgaattcattaagattatcaaatttaattactcgatggattaatcataggagacgaagaagattgttgatcctctgctttaatcttacttggaaatatttggaattctctcgggaaagaaagagagatagaataaaacaagaatatacatgaaaatctaagatcagtctgcaacaaaaacaaaacaaatataaacatatatatagtctctgagtttaaacagttttaacattaaagcacaaacaaaaaaacacaaacaaaaacagaaagaaaaagattcataagaagcagtataagtatatatactctctttttgttttgttttgttttctcatctttgtgtgtgttcttcttctttactttagactttagttcatgcctatctggatctacgcttcgctggccttttcctctgattaaccttcttccccggctgtttcttcccgaaggcagagcagcacccaaacgccgacagtctcggcgacggcgggtccaccgccggagacactctccctgtgtttcgatggtggcggatggctcctcctccgttggatcgactcctctccatacctccgtcagttctgataggtttgagtccttctccggcgataggtttggttgtctgatcctgtacttccgacgtaatcagcttggcctgttcgtcctgttgtagagtctcgcctttccggtcgttggccgcttgttggcttagctcggcgatgagacgatcgtcccagactatacccgaagagccctgtcgacggaaagagatggtggatctctgaagacccgccatggacggcgctaactgttcctcctccgtttttttcttcttcttttactctgttttcgtcgtttttgatgtgtgttgctaaaagtggttcatcattgtgtttcagactagttcatttcttcctcctctttcttatctctttattagaaggcacttgtgtcttttctaattaattttcttttgtcgtcttattatttcaattttatatgttttttttcttctggttctcgaattatccaaccaaatataatcgcgattatcatgtttagatgcgtaatcattgtattttatttgttacgtattttaaacgggagagaaaaaactgggtcaaagcagcgggtaattatgggagtagaatagtacaaacaacgtttttgggtggtatgtgttgaaatttcaattatctttttttttaacattaaatttagctatagccacttaattatctgccaaaaatgattatttttcttttcacgtttcaggcaaagatcatcgcatagcatatagttttatcaaccataatccagcatggcttaattttttttaatatttcttaaggaaatcaagcgttggtgactcgtcgttgttcatgcttgatttggttagttcaaagttgaaacttacaagtattagtagatgactgattcatcgagttttaaaataataatcacgcaaaactcgaacctaatatttcctgaaatataatggctcaactttgagaggtgtggattattttattttgtaagatatcttgctatatggcttgctggaccatcccatttgtgtaatgtggagacaatccattcatgtgctacttttttcatatggacaacaaaatttgcgtgttcatatcgtaattaatccccaattaaatctacatcgcaaatctaatatacccatgcatttcaaatctcgctacaattatggaagtccttgagttgattattgaagcagctaaaacgtaagcatgcgaagaaaacggcatttagctttaaaaatttgatgattgtcagaaagagaaagcaaataattggaaaaataagagcgtcttatccgtaagtgtagatttgatggaacaccaaatattttctatcaattttttttggtgatggttattttggcaaaaccaacatgatcaacgggttttttttttgttaattgttagccatctaaagatatagtgcatataaacaaaacaaaataataagaataaaagaaagtgacacaatgtcaatcgcatcagtaccagtcaaatggatcatccttatcctcagacccaaaagatttacttacattagggagtagtattcggatacatgtacacgcatataacttccaaatgttgaaagatgtataaaaacatgttagacatttaccagtgacttaaaaaaatataagtgatttatggtagtatatatcacactatattatgagtcatgacactcaaattcaaaatccgtttagtacaaaaggttacaagtctagaatcgatttttgtaatttttttagtatatatgacattggtttgactgtgttacaaagtcaaagtaaaatcccaaaaaaagaaagaggaatattttggttctgagaaaagacataaaaaaaacaatagagaaaccttgtaaaatcccgccaaaattttcacagaacccctaaaaaagtttgagtgttgccgccatccatagatttattccaccatcttcatctctggaaatccttcgccgccgcgagaattgacattgttttgattgcatataaatctccgcaacagtatggtacgttttgtttagatctacggttttgttatcatccgttaattcggcgacatcagcaacgatttgcttcatccacaaaccgaataggttcggtttaaacataagcctgggatttgagtcaattatttgcatttgcctacttttttcaattttctgggcacgccagatgtttgatgaattgctcgaatagatagatgtcaaagtgaagcgaggagacccgccgattcgacatg

SEQ ID NO: 21589 - DNA, 3000 bp, Unknown; identical to SEQ ID NO: 8450
  misc_feature (1)..( 3000): 2750-1469P.txt file - cDNA_ID_1989482; gDNA_ID_1971801; Annot_ID_58087

SEQ ID NO: 21590 - DNA, 3003 bp, Unknown
  misc_feature (1)..( 3003): 2750-1469P.txt file - cDNA_ID_1989483; gDNA_ID_1971801; Annot_ID_58085
ctgcgaatcctaaagtcatttttgctgtggttcttggattgagtcaagcaatgtaaaatgcggcgggtgctgattcttgaatcattgatcttcatgctaaacaagacacgttattttttgtgataagagataaaacagagcaacttaatatcatcatacttcttgattaatctttttattaatttgaaatattaacttcgatttaaaaacaaatgcctatttcctttattgctggaaaattcattgaactttcaagaatcagtacacagaatccttggatggcactccgatattagaggaaaattaagtctacaaatgaaatacattcagagaatatatccataaatagatacctaaaaatttaagaaaaccaaacagagtgcatgcatttatatccaatgctgttatgttactaatgtgatatttgaatcaatcccttatgttgtgtgtttatatataccttaagacaatctgaaagtaatccactattcaactctgcttagatcgatccatttctcgttaaaatggtaagactcgttgcctatatctactaacattgaacctgatttttaaaatattaatcctctttttgtacatatgtgtaggattggtttttgatcgtactcgttgcaattttaggatttcccgggttaagctatagtgaatcagtgatgaaatatggagcggtcggggatggaattgtcgatgatacatctgtaagttattggtgtatatatattatatatcagtacaagcagcataattgtttagtcatcatataaaaaaaattaaacttttgcatggtatatgtgggcaaaaaaaaacaaggcgttccaaaaggcgtgggaggatgcttgtaagggaagctccaaaatgggaagtgtaaacgtaccagcagggaaggtgttcctcctcaactcccttcacttcacgggtccttgcatacccaaacctctccttttcattgtaaatccctccaccactttacttgattgatattacatgaatactcgaatatgaacctactcctccaagttaattataaagttacttttgctgatatatgtatatatagatcgatggagagatgatagcgcagagtgatccacagaagtggggaaatggtgagaacggggtaataccatggctcatattcgatcaagtagatggacttgcaatcgtagggcgcggcttgttggacggccaaggcaaatcatggtgggatattcattgtagagaccatcccggacccgtaagtttccttttttttaactttttatttttcttgggttataatgtatcctaacaaaccatctctatgtgataatacattttgtaacctataacgtgtcacagaattgcatctgccttgcaccaacggtaagtttgctatttacaaaaggaagtacgtagtatgtatataataacttggacgtctctataactatagatatatttctcgcagatgatgacatttagcaactgcggaaatgtaacattaaagagtttgagatttagaaatagtgcacaaacacatgttcttgtgatgggaagccaaaatgtgtatatcgatgatatcaaaataacatcaccggaggctagccctaacaccgacggtattcacatcacatcttccaccgccgtttctatcaatcattctgacatcgccactggtatatttccttacctaaccatataaaagatcaaacaaaagtttaatttgtttatttattctcacaattaattaaacaggtgatgattgtgtgtcgatcggagatcaagtgaataatttgaatgttacttttatgaattgcggacctggtcacggtgtgaggtgattaccatctccttatcgacctcgtaatcttatatttttcataataaaaaaatgagaactaataagaaattagagacagcattgggagtttaggtagaggaggaacagaggtaacagtggaaaacatacgtgtgtcgcacgttaacttcactggaacaacaaacggagctcgaatcaagacttggcctggaggaactggttacgtccgaggaatcgagttcttcgatatccgtttctcgtctgtacaaaaccccatcatcattgatcagttctacggttgtgcccctacatgcgttgagactgtgagaacctttttctttctatctttcaagttaatattaaatgtaaatgagctaatgtttgaatgtaatgtatcagatgaagggagttcacatagagaaagtgagatacatgaagatgagtggaacatcggcgacaaaggtggctatgaaactcgagtgttcaggggagagtgttccatgttccaaccttttcatgagagacattgacttatctccggccgatggtattgattctgtctcctctctctgctcttttgctcacggctccgcacaaggcatcattcgacctttatcctgtttctaactattttagtaatttgtaaagttttggggtgtaaattgaattactatgtaaatgcaggggtcatattggaataaacaacaatgttttagttaaaaggcctgtataacaatgcaggcccaaacaaaaagatatgagcccaatagtcactgaaattgttttctcaaacccaaaaaacctaaaaccttaaacctccgtatgtgttccgtcgttagcctcctgctaatctccatctcagatcgcaatttctcccttttccggtcactgctccggcttacgactatagcgttccgagataaagttcggctgtgttaattaaattcgccgtcggagggattttacggatatggctgttgttgaatcgcatggggatttaggttattgtcgattgaggtaaatggatgtcgagggtttgctcaactcttcgctctccttatctttgaagctggttctatagattggttagtagatcttacaaattgcaaagattggagatttgggggatttgaataagctacatgttattcgggtatgtttaggctcgagggaggccctggatcatg

SEQ ID NO: 21591 - DNA, 3003 bp, Unknown
  misc_feature (1)..( 3003): 2750-1469P.txt file - cDNA_ID_1989485; gDNA_ID_1971801; Annot_ID_58082
ggccttgaatattgtttggggacatgagcaaagatactggcactggatctctctccctaacaccaggtctcctttttttctgtgttacaaactagacttcctcttctgcattgctttattataagatactaaatgtttttgtgtgcacaaacaaacaggttcggagaagtggctgagctcatcatggtctggtggcttgagatcactggcaagatcaacattacccttctctctgatgacaccctctacgccgcttacttcgtctttaagtggaaccatagtccttacggttttcgccagcctgtagaaacctcccttgtcttggctgacaccgagagcactgacaatgttgttcagccttccatgattagtctcatgcaagattcaggcggcgaagaaggtcagtcccctgtgctgagaagagacggttggtacgaggttgaattgggacagttctttaaaaggagaggagatttgggtgaaatagagatgagcctcaaggagacaaagggtccttatgagaagaagggccttattgtttatggcatcgagattagaccagtgccctaattgtatcctactcctaaatacctttgcggtttccagtgttctcttgattctcaaccctgtgttgttatcttctctttccctgccttcttcttcttttccttttctatattgatgcagaagaataatgtttttttgaaaaatgtttttatatgatcagctttttgattatgacattactatatatgcttgaatttttgtcttggtttgcaataatgtctgattgaaagagaaatacaggcaaataagacggtagtttagcagtttgtgtttatatcgttgttgtattaacgcctaagctaaaaaaatcttcatgatacatgcatgttaatatgttatgtgatttgaagaagaagaaaaatatgatattggcacggttctaattttgagaaaattgagagcacatgcattagatatgatcattctcatagatagtgctggaggttagagaccgactttaccaacgtgttcattacgttttctactcgctttccatttttctttactcaatcaggtcagatcgaaacgttggactcatagttccaaaattagctaaaattagatacttatttattaaaacaatcctgtacttttgacctaattagatatttcggcaaaatatctaacaaatatccccttctgatcttttggtattttctcaaaataaactaatccaaaccgaaactaaaattatttgatggaacgtacattcgttaaatgaatttcgcagacataaataactttactttattaaaagagagtaataaattggaattcaattatataaaacttctaactctttattattaaatgaaagttataagattttcacaatccatgatactgcttaaaaaatttcactgcactgttatcatacaaacaaagaagaaaatactatgcaatttctgtaagaattgatgactgatgggaacgttatgattatgttatcttcaactatggagtgaggatctttatttccatactatacaggccactcgatgggtctatttgaaataatgcaatagatagatagatgtatatatacacacacaacaaatatgtgtattgtttatacgctccgggataaacacacattttccacacttttaattcgttaccgtttcaggaccaattttaaaaagaaggttggtactatactattgactagctagctggtcagggaccttgatggtacatggaagtttcatattttatacagaaacaaaataatagagagtataagaatatcaacgacgagatctgagaagatttgttttctcttttttttgttatcaaatatgagaagattttgtaaatctgtaagttttaatttataaaagttgagatgcaatccagtgactccattcttttaaaatccactagtacttagttaccctaatgttaaacgttgaaaaatgagatttagattagttaacaagactttatagttaactaatcatataggggaatcaataatatatatgcaacttttgatgaccacactgttagatgctttgtttaaataaaactaaagatagaaagaaaagtacccttttgatctgtactgattgtataatcgttctataatatgtggaatattgtaaagaatcgaaaaaaggagtgaaggagaaacagtgatcggaaagaaataagtaatgtaaggttataatgttgcctaagaccgtcaaacaagaatcttcaaaagtatacacgaatatatatgtaacaactcaagtgattaatatcaaaacggaaaaacaactaaatgttgtaaatatttatgttgtttgtcaacatgcgagtttaaatatggatggtaccacatggatgataatgacaacacatactaatatatgtcttggccaaatgtatgtctcctaatagattgggagtaattgagcaattattacctatatttgataagatatgtcattatgtgtagtatcatttaacaagctataattaacatactttatatatactggttagagtaataaaccaaaagctcacttcacccaataagtgaaacagaactttaaatacgtataagccaattcaaagaagaagaatgaaaaatattgatagttaaaacacgaaatcatcatcccctacgtttgttaaactcttgaattgtatcgcacataagatatgtttaacgtgacgtagtaaaaaataacggtgaagaagtgaagcgcatctatatgtacttaaactttttgaacataagttgaagcgacgagtcagcggcacgtgtcaagttagcattagcttaaacagtaaaattcgcgagtcgtcgtcttataaatgctgtactcgttgtcttcctttccccaaccttcactttcctctcaaatctccaataagtaaactctctcatcgaaagcttaaaagcatcatcaccacaagaaagaaaagaaaagagtagaatcgaacatg

SEQ ID NO: 21592 - DNA, 3003 bp, Unknown; identical to SEQ ID NO: 21591
  misc_feature (1)..( 3003): 2750-1469P.txt file - cDNA_ID_1989485; gDNA_ID_1971801; Annot_ID_175703

SEQ ID NO: 21593 - DNA, 3003 bp, Unknown
  misc_feature (1)..( 3003): 2750-1469P.txt file - cDNA_ID_1989486; gDNA_ID_1971801; Annot_ID_58081
atttacaataatatttagctattttcatatatcattctatactagctcacaataattacatatgagcacgcttttttgtgttcaaatattataaatcttcgttagttaccgctgctttttataattatgtatactttctggttccaggagactaattaaggaagattattagaggcttcttatacgtgccatatgattatttatttatgtactgtcatggttcatatatagcgatgtgataccaatataccaatcaccaaagttatgagaaaatcacgtaaccagaggtgttggtacatacattttctgttaaaaatagttaagaggacttgtaatcttttgtgtttaactattgataattttttactttattcggtgaaacaatttacgcatgtttctgtgttgtgcttgtgtttcttgtattcttcttgtgtatagctttccttataagaaagaaaaagaagaagattaattgattagatcgagaaagagaaaggccttttgagatagaaatggagaaaggatggattgaatttgaagcatagagaatagcgaacactcactgcaaagttagtgggaaagtcgcgcgtcatacgagggagcaacaaagtgtgggcttttcttttacagtctcagaaactaatgcatgctcacatttaaaaaaaaaaaaaaaaaaaacaattcttgtgttaaatcaagagtggattaattatgagataatctaatgtacattactgttatatgattataacttgacagaccaaataatcatcttaatcagacctgataaaagaaaagagattaatttcaacagtgagaaattaaagatagaaagtacatattattggtgtaaaagttgttgatttaatttaaggcagatgtattaagttaaatatgtaaatgtagaggctgcgggaagggtgaccagctggtctgacagggtacgccggttgtcgggaggaagaacgccgctattggcagagtcacgcggggtaaccggctggcggctgtagccggtcacagagtgtattaatatggtcgtacaatacttgtagagtgctttttcctgtgacggtcccgtttattccccacaccctcctcgattctttcacttaaaagtgggggaaaaaggtaacctgactcttagaaaatttgaatacaattgtgggtcacctcatctcatgtagtcatgtctatacaattataaatacctctcaacaaacccaaaatcgaattataagccttctctagctagaatttgaagcaagacctgttcacattagtaaaaacaaatatatagaaagaggaaagattgaagcggaaaacgggacaagacgggtgtgccgttgtggatgttggggttgggtgtggaccggcttcaagccgacatcaaccggctcctagcctctcttttccaccagggagtgctggacgagcagttcttgcagcttcagcagcttcaagatgagacttcaccaaactttgtgtatgatgtcattaatatctactttgatgaatccgagaagttactccgcaaccttagattattgttgtgagtttcttcctttgttaatgtgttccatagttgtatgttgtttggttccaaaatgtatacgtatatatatgttatgaatgatgacgaatgtaaataaataaatgaacaggatggatagagaattctcggactataagaaaataggattacacctgaatcagctggtgggaagcagttcaagcattggtgctcgtagggttcgtaacgtctgcgttgcctttcgttctgcttccgagcttagcaaccgcccagggtacaaattaaacgagctatatatatatatatatatatatatatatatatacttctttgtattaatatataggtcaatatttaagtcaatataatgcttcataaatgtgacgatgcttcaggtgcttgagaggactggaggtagtagagcatgagtatcattacctcaagaacatgatgcatgaactcttccaggtacttacttgttttgttaatatattactcacattcacacaaacagaaggcaaaaacgtgagctaaatatacacatatatattgatagtaatatatgttaacaattatgtgggatttaatattttgagtggttgcagctggagcagcagagaatattagctgcaggagtcagatatccaatgtaaaattagaattttgtcataaaaatcagagaaaacctaattagtgtgtgatgatagtgtgttataagctaccgaagcgaaaccctttagtttcttctaatgatgttttgttgttaatctctccataaattcgagatacattaccttttgtattttcaagtgagatttacccatgtcaaaagtatctttacatgaacataaaacatttagtacccaaaaaaacagaaaaaagaaactgggctataaaatgaccgacagaaacggaagaaagtaggcccaatgtacggcccgttcatctcaaataaatgatttagttttgtttttgtttttttcattttagcaaagataacgatttctgagcaaaaagaattggaaaatgatagaatataaagccgaaaaaatattctgtgtttattttcaaaatcttagaatcataaatgtgtctcgaatgtaaccattaactgattttctggattgtcccaaaaaaaaaaaaactgattttctggataaaattagtaaagagaaggggacaggtgggtgttgcttactctagtagtcagtcatgaggaaagtaatctgaaaaaaacgagtaaggaatagacacgtgtggcttcatccctaagtatccgtttttacttaactaatcaatgcacgacttccacgtctctcttttttttactagtataaaactcattaaatgtgagcgatactttgctcgatcgaacaagtcgtatctatataatcgagaaagaggaaaagatcttttaaaccccaaaataatcaatcaagcaaataagcaatcaatcggaggaagcaatg

SEQ ID NO: 21594 - DNA, 3003 bp, Unknown; identical to SEQ ID NO: 21593
  misc_feature (1)..( 3003): 2750-1469P.txt file - cDNA_ID_1989486; gDNA_ID_1971801; Annot_ID_175702

SEQ ID NO: 21595 - DNA, 3000 bp, Unknown
  misc_feature (1)..( 3000): 2750-1469P.txt file - cDNA_ID_1989496; gDNA_ID_1971814; Annot_ID_58176
tggacgttttgcgtagattacagggcgctgaatgaagcaaccataccagacagatacccaattccggtaatagaagagcttctagatgagctaaagggagccacagttttctccaaattggatttgaaatctggatatcaccaaatcagaatgaagatgagtgacgtggagaaaacagctttcaagactcatcaagggcattatgaattcttggtaatgccctttggattaaccaatgccccctctacctttcatagtgttatgaatgacctctttaggccatacttaaggaagttcgtgttagttttcttcgacgacattcttgtctatagcccggatatggagtctcacctgaaacatttagagatagttctgcaactgcttaaactccaccgactctacgcaaacttgaagaaatgctcttttggcagtacacagatcgcatacttaggccatataatctcagctgaaggtgtctctgctgatcctgaaaaggtggaggcaatgttgtgttggccattgcctaaatcagtcacagagttgcgtggatttctaggccttacaggctactatcgtcggtttgtcaagaactacgggcagatagcaaggccactaacggatcagcttaagaagagcgggttccaatggaatgaggcagccacaaaagcgtttcaggcactgaaggaagcagtcacgaatctgccagtattggtcttacctgactttaatcaagagtttacagtggagacggacgcttctggggttggaataggggctgtgttgtcccaaaacagaaggcctatagcgttcttgagccaggcattttcaagtcaaggtcggattaaatctgtgtatgaaagagaattgttggcgattgtgagagcaatgactaagtggaaacattatctgtccagcaaggagtttgttattaagacagatcagagaagtctaaggcatctcttggaacaaaagtctgtatcaactattcaacaacgttgggcttctaagctaagtgggttgaagtatcgcatagaatacaaacctggagtcgacaacaaagtggccgatgctctctctaggaaaccaccgcaggaaaggtttgctcagttcaccttaacggctccacaaacaatagatattggcgctttaaaagaagaaatcatggctgataaagagttgcgtcagttggttgatacttggcaacaagggcagagtacagaatctgaattttcagtgaaagctgggttggtttacaggaagggagccttggttatccctacaggatctcccttcattccaaagctactagagaagtttcacactagtgcaatgggtggccacgaaggagcgttgaagactttcaagagactcactagtgaggtctattggaagggcatgcgaaaagatacagtggaatacattcgaggatgccaaatctgtcaagagaacaagtactccaccttgtcacccgcgggtttgctctccccattccccattccacaacagatttggagcgatattagcttggattttgtacaaggattaccgtcttcgaaaggattcaactgcatcttggtggtcgtggataggctaagcaaatacagtcactttattccgttgaagcacccgtttactgcaaaggtggtagcagaggcctttataagagatgttgttaagttgcatgggtttccaactacaatggtgtctgatagagacaaggtcttcctcagcaccttctggtctgaattattcaagatacacggcactgaattgagaaagagtactgcctaccacccccaaacggatgggcagacagaagttgttaataggtgcttggagtcatttttgagatgctttgcaggccgacgaccctcttcttggatgcaatggctaccttgggccgagtactggtataacacctcttatcacactgcaacaaagacgaccccattcatggcggtttatggaagagagcccccagcaattctcagatatggggacacacctacagcaaatgcagtcgtcgaagaattactcaaggacagagatgggttgttgctagagctgagagaaaacttggagctagctcagaaacaaatgaagaaagtcgcggacaaacacaggagagatgttgagttcaaggagggcgatttggtctacttaaaactgaggccgtatcgacaagggtcgttggtacacagaaaaaacgagaagctctcgcagcgatactatggaccctaccaggtgattagcaagattggtaaggtcgcatacaaactcaggctaccggattacagtcaaattcatccggtgttccatgtgtcccagctgaaaccagcggttcctccctctttcactgctcaagaactgcccaagattgtgactccttctttagagtgggcgacggagccagaaaagcttctggatatcagacagagtagaacaacagacggtgccgacgtcttggttcaatggagtggcatgtcagctttggaggcaacgtgggagccattagtgactctagtgaagcaattcccgagcttcgatcttgaggacaagatcggtcttctgcgagggagcattgataggctaagggttccactagctactatgagaaagagaatgagaactggcgggagaaaagctaaagctatggagaagtatttgaaaaaggtcttgaagaaaagtggctaagagacgaaggaaagaagaaggcatagaaagactcttgttcatctagagtctttcaccatctctctatcttttattaaactcagcattttgtctatttcgagttgtatttaaaggtctttgcctctttagggcaaccttaccaaaaacaatcatcaaaacttataacattaaagttattaattctcttctcatcttgttctccgtcaaaaacggcgcaatagaattagtttactctgtttttactcttgttcttagtatccgttgagtccatatctatcagattagcgtttaaactcatatcttatg

SEQ ID NO: 21596 - DNA, 3000 bp, Unknown; identical to SEQ ID NO: 21595
  misc_feature (1)..( 3000): 2750-1469P.txt file - cDNA_ID_1989496; gDNA_ID_2926180; Annot_ID_140509

SEQ ID NO: 21597 - DNA, 3000 bp, Unknown
  misc_feature (1)..( 3000): 2750-1469P.txt file - cDNA_ID_1989502; gDNA_ID_1971822; Annot_ID_58336
tagaatgaaagtagtgcttgatacattattatgatttttttttcattaaatgtttttagaaaatcatttaagagtaagattaatagagaatttaacataacaaaagacttttgatttttcctcaattagttttgttaatcattttatttaattaatgtagcatgacacatgccattttcttgtgtgatgatatgttacttatatggagagagttgaccaatttttatatatatgattaattaaaagacggaggaaagaaaaacaagaaaagtcaatgtgattttcatttatattaaattttttgactgattaattaaggatgtgatttgtagtaaaatgtgatgattttaaagtagtgaacgaaagatttgtggaagtaagaggtaagttgggttaatggttaaagagtgagggaagaaagaaaaaatgagttacttagtagaaattttgttggtagtgtatgttgggatataatttggtttgatgtggggatatgaaagtatgtaataaaaatatatgtaaatcatctaatatcatatgaataagggtattttgaaaattgctaacaaaacaaatatttatggttattattgttatttatgttcatttttgtgttattgtgaaaataataaactcaaatctatctcatatagctgcaaattttatgattagattcatctttgattcgaaatatcaattatacgttttatgtacaaatctaaatttttatacatctaaaatcctaaatttttactatcatgaatacatagaataacattataagatatattgatacaatagtatataattatgttacttatatggtttgaaacttgcataatttgttctgaacaaacatttttttgttccacgtactcttttctcatctactactctaaccatatcctgatatgctattaatttaagtcaatactttagatctctccctttttatgtctagaattttcaagtatatctaacatctcaaatgtgcattacgtgcaaaaacttgcatgtctttgttactaacttaccataagacacataaatgaaaagagaaaaggtcatatgataaatcatatccacaaaacaaataataagaaaatattcactgtaaaattagtaacttaataagaggttaggtagcaaacatctaaactacaacacaagtaattgttttagcaattatcaagtaatgatcattaataaataaaaaaaactaatgaaagaagaagagtagaatgaaagtaatacttgatacattagcatgattttgtatttttttagtatttttaacaaatgaattaagagtaagattaatggatgacttaattcacaataggagaattttggtttttcttcaattaatgtagctaatctttttatttaaataatataaaacgacaaatgtcattttctcatgtgataatggtacacttatatggagaaaatttaccaactttcatatatatgattatataagtaataatatgtaaagaagaaaagaaacgaaagagtgaaagagtgagcaagagaaacttgtataattaacttgtatatatgcgttaaaaaaatgagaaccgactcttttactaaatcatttattaagcagagatttagctgacattatacttctccatctatatgatagaaaagtataattttattcaatccagatgattggattttcaaaaatatattttgaaagttttcgcaaaaagtaagtcgaaaacgttatcaaccaattattttgctagtaggaccaaattaaaatgattcacattccgaaatcctattccacttttcgatttactattgcataatttcttctaaactatgtagtttatacccttcgatttaccatttttactccactaaaatttagtaaccgcatttaaaagtttagaagtaattatttttagtactttgaagtaagaaatcacataaattgataatggcgcagctatacactttattagcacttcttttttacctttcaaaaaaacttgttatctttttatctgtataataaaaccggtagtttcttgtaccaaaccaaattcttagttcaaaattttgaaaacataatacaacgaactttatttatttattacctttttcaaattcttcccttccaaaactttctgattttattattctttacatatactcttataatgttataacaattccagagaaaacaatatgaaaagaagaaaaactaactaaacaaaatagtagtgtggacctggatctattcttctattaaaatttgctttccactagattttagatatataggtttaaaagctaaccatagcttttaacctcataaatttcaaaatgctttccaaaatacggattatactattcccaataattgaataatcagtttattttctacgtaatttaacaatgggaaagctaattcgtagaagttatcgttcaaaataaaaccaaaactttttaatcattatgtaggaatcttttccaaacaaaacgcctaaaacttaacaaaaagaattcacaaaaaccagccacgtgtcaccttttgttaagccagtcgtcactttaagtaaccgcttgtcactttaagaagcggtcccaagtcaactcgcgccactcaaatcaatcatgcttatgtaaataacaactaaacgcagacgcaatcaccattttctttatagaaatgctcaaaatcgtgccttttaaggaaactgttgctttgcagaatcacaaaatctatataccaaccataagtttccaaattttgttctaaaaatcaaaaaaattcatatcatctttttgtctttttttaccagaatttcatccttatttcgtgctaaatcattttccaaacattcataatactttttgttggtttatggccaactaacaaaatatcctctagattttcttctttgtgttagtctatataaagcaataccacagtgatcctcttttttaattcattctgtgtttatgtcaataatcacaatg

SEQ ID NO: 21598 - DNA, 3000 bp, Unknown; identical to SEQ ID NO: 21597
  misc_feature (1)..( 3000): 2750-1469P.txt file - cDNA_ID_1989502; gDNA_ID_2926156; Annot_ID_139517

SEQ ID NO: 21599 - DNA, 471 bp, Unknown; identical to SEQ ID NO: 8627
  misc_feature (1)..( 471): 2750-1469P.txt file - cDNA_ID_1989503; gDNA_ID_1971822; Annot_ID_58335

SEQ ID NO: 21600 - DNA, 471 bp, Unknown; identical to SEQ ID NO: 8627
  misc_feature (1)..( 471): 2750-1469P.txt file - cDNA_ID_1989503; gDNA_ID_1971822; Annot_ID_176202

SEQ ID NO: 21601 - DNA, 3003 bp, Unknown
  misc_feature (1)..( 3003): 2750-1469P.txt file - cDNA_ID_1989503; gDNA_ID_2926156; Annot_ID_139516
atcaagtttttttttaaaaattatattgctattaaaacattgtactattgtttctattttgtttagctattattcttgtgaaatgaaaagttgtgtttattcaattactaaatggcaatatttatcttggaaaactatacctctaattggattaggccctagacatcctctttagcttattgacgttaaaattattcccaaaactattaaagtttagtagtttgaaagatgcatcaagacctactcagataggtaaaagtagaaaactacagttagtgtgattatattttaaaatatataaaacaatcttattaaactaaatattcaagatatatactcaaatggaagataaaaacatttagtctgttaccactaccagcctagctagtcactaatagtcactttggaactgagtagatatttgcatcttgagttaccatggactcaaaagtccaaaaagagaccccgagtgaaaatgctaccaacttaataacaaagaagcatttacagcggtcaaaaagtatctataaatgtttacacaacagtagtcataagcactcaacacaaactctttacgaatacttttaagtatggcttcttcttctgcaaccaagtttgttgatctgttcccatgtcttttcttagcttgcctcttcgtgttcacatactcaaacaacctcgtcgtggctgaaaattccaacaaagtgaagatcaatctttactatgaatcactttgtccctattgtcaaaatttcattgttgatgatctaggtaaaatctttgactccgatctcctcaaaatcaccgatctcaagctcgttccattcggtaacgctcatatctccaataatctgactattacttgccaggttagtttcaaattttctcactttttgttgataaattactttgactctagctctagttaaccaaatttgggaattttgtgaagcatggtgaagaggaatgcaaacttaacgctctcgaagcttgcggtataagaactttgcccgatccggtatagaaaaaatacaattacctactatatttatactattttgtatgtgtgggtttgttagaagcttaatatgaaaaatgggatggttttggaacacagaaattgcagtacaagttcatacgctgcgttgaaaaagatacgaatgaatgggaatcatgtgttaaaaaatctggacgtgagaaagccatcaatgattgttacaatggtgatctctctcaaaaggtaggtctatatacaaaaatataaaaatatacacacatttatatatatatacatatatatatataaattataattatataaccttataaccaatttttttttttgtaattgcagctgatacttgggtatgcaaaactgacctcgagtttgaagccaaaacatgaatacgtaccatgggtcacactcaacggcaaaccactctatgacgtatatataactcttcctttcattttcattttaacgaattttaaattaatatctttattttggggatgcagaattaccataatttggtcgcacaagtctgcaaagcgtacaaaggaaaggatctcccaaaactatgcagttcctcggtcttgtatgagaggaaagtgtcaaagtttcaagtctcctatgtagatgaagctatcaattaataagttaattaacaaacttcttattgaaactaagatggatctaatctttatgctataagtggaatgataaataaagacgttttatctgaacttttatatttacgcgttcatgaaccttctgattatccatttttccttttaaatgaagaaggcctatattgaactatatttagactatttctacaagtacttagttgaaggacggcctcataaaaatttcaggcaatatcacggctgataaattttagaataatgagatgaatgaaatttgtcaatacccttagctagataataaagttaatagcatttgtctccaaagtttgttgaaaatgtttattaataccaaattctgccaagttatataaaaaaaaaaatcaagcaagaattgagaaacttgatgatgcaacaacagtttcaacttcataaatgaggtagtgacatcctaattaagcttgcggttacacgtagtccaaataatcaatgcaagtgccaaaatctcagccatagtgtgttaaaatttttaatttagaagaaggcatgcattctgctattagaagaggactctatgatcatctattaatgatgaagaatgaagaatacatgcaataaattaaatataattgtttcacgtaaccaaagagcttattgtgtatgagtcagtgagtgtaaaatgtccattatgtctccacgaagcatggactcgactcttaatagtgtttttattttactttacttccagttttcttttgttttcatttaatctaaaatataccaacttttatttcttatcatcatttgaaaacatttatattctatgttgtatagatattttttttgaaggagtcctcattataaattgagcattgtcactagctaactctttttttaattcaaattttcaaaaagccataagaaaaaaaaaatatgtttaagtaggtgaaatgtgcacgagatttttcgatattttatatatctatattttcttttcaatccgctattttttgaataaaatgatattaaatttatacattattctcgttatttatagaaatcgatacttaaaccgtttcccatataaatattttaccactcatttttaccatttttgagccaaaatttgactatctacatatataattaactcttacaaaaatcaaattacaattgctttgatttaaatgaaaaatattattacccataaaatttagacttggatcccccaccggtagactggtagaggttactaggggagtagggacaaaaaaaatcaaaaatatcttatctataaatggatacacacacacacaaagcaactagcactcaactcaaattctattaagaacaatg

SEQ ID NO: 21602 - DNA, 3000 bp, Unknown
  misc_feature (1)..( 3000): 2750-1469P.txt file - cDNA_ID_1989569; gDNA_ID_1621166; Annot_ID_57857
aattagttaaggtaaataacaaatatggttagtttagagatattatatatattaaatttggtaattaaattaatttcgtttttagttatttgtttttgtagaaaatggtaataaaaccaattatggaagatctaattgaagatttgcgggtcaaaatcaaataaaaaatccgacccaattggattccttaaaatgtacttcaaaaatgttaagtagatatcaacatattttcaacgcttaatttatgataaaattctaacaactaaatcatcagaaatttttcacaaatttacaagaaaaaatatcaataaattttcaacaattaaattatcatgaaatttctatgaagttccaacaaataaggcgtcggtaatttctcacacgtttccaaaaatattttttaacaaagttgcaacaaatatgttattagtagtttcccataaacaaaccttcagaattgttgaatatttgtggcaaattatcaatgacattccaacaaaatataggttggaacaattcgttagaaacttcacggtaaattccaacaaatgtccaacaaaaaaatatcagaactatctgtaacgcccccgaaccgttctaggactaagaacgaatccggaagtgttacttgcgacgtctgtagacgatccgaccgagttctcaaaacacatcagttaccaaagtcagctcatccgcgaatatcgttccttacgaacacgacctaaggcttttcaacccataccaggtccgtaagttgtgttagtccatacaagactaatatcagaagtaaacaaggcttttaaagaaaatcttctttattcaataaaaaatataacacttacaatggattgggtacccgagcctaagagcatgtatgggggatactcatatagtatcataagtattttttagtattatttataatatttgtttattatcagagattttttatgatactcctactaaatatgtttgataagtgtgtattttgcatgttttgagcatccgtttgtcatcactttaacatcatatcatcactgttttatacaatctcatcatttgttatcactttacatgtttaggatagatttgtatgcatgttgcatatttgcgttgatttcaggtgatttggagctgttgacgagctatctggaagatgcgggcctgatcatgtcaaaccactcgaccacgaggtcgagtaggagcttcaagatcttaacagataactcgaccccctggtcgagtagaggacatcactacttcaccacatcagtcgaccccgaggtcgagtgtcttcatcccatcacctgaccatcactcgatcacatcactcgaccccgaggccgagtgtcttcacctttattgccagaccactactcgacctcatcactctacctggaagtcgagtatcaccatcaccaccactcgactgcatactcgatgacaagcttcaaagccttcttcattccgcactcaaccagacactcgagcacaaggaagaaaagaagactccagctattcactcgacctcccactcgaccacatgggtcgagtacagttcttaatccgtcctaatacttcgtcgttttaagtattagggtttcggaatatttggctataagtagcatgtacttcacattttcgcagcaaagtttttatctagttttattccgcagaccttgtgttctataccttttgtaatccggatttctcttaatcaattcagtattcagtattcagcttttgttcttgatttcatttactgttgttcattctcttatcatcctgctgttacactgttgttatcatgttttcaacttgttcaacgttaatgctttctgttatgatgtctgagtagtgaataggtttctgaggatgggttagagtagtgtagaattctcagtatgctaggtgattgagtattgattgatagatcccttctcgattagttgttcttaatgcctattgctttctgatcaactcgaatttgagcccagacatttccgcacccaaaaagtgttcgatgaaatttctgaaccactaattccagagattcgtgaccctgcaccaaggtattggttgcagggagcgttttggctttaacttgttgattcgtaatgcttgttaggttagctctcgtcaatggtgattgagtctgggactaggttaacttgatagtctcggttgcggtggcacttagatttggttaatgaacttgttgtctagggttaatttattgagcatgtcaatcacctgtaaactgaggaaacgaaactactcaattaccccatccttgggaattctttatctgattgaattctttgtttgctctactgttgtttactgcatcttgttatctgtcgcttaatttttgtaattctttctggttactcgacctcatactcgaccacccagttgtctggcaacagactgtgcagtcgagtatctgtgttttattttctgtctgttactcgacctttcactcgacctcacccagtgctctgcaaagagctgtgttggtcgagtgttttactgtttctgtttaattttctgctttctgcatgttcacttgggattgctagaacacaccaaaacctgttattgcttggcttgacttagtaacttctgatcacatcttgattgttagcatcacacccatttggattgacaaccttcagtactacaacgacatgatagtgctttagttttaattgaataaaaacctattattaatttggcgccgttgccaattgggtgtttgtttgttacatttgagatttcagacttgcttagatcaagctctttttcaattttcttttcggttactaactgtgtgtttttcttgttgtcttcttgatccaggtacacctctactgtatgcgaactcgatcaacaggcaatcagaacctccttttcaacaaaaacatcgaccgcatagctcgcaaactcagagaaaggagaaacacagtcaaccttgtacctcagcaaccactcgaaatg

SEQ ID NO: 21603 - DNA, 3000 bp, Unknown; identical to SEQ ID NO: 21602
  misc_feature (1)..( 3000): 2750-1469P.txt file - cDNA_ID_1989569; gDNA_ID_2926141; Annot_ID_138990

SEQ ID NO: 21604 - DNA, 3003 bp, Unknown
  misc_feature (1)..( 3003): 2750-1469P.txt file - cDNA_ID_1989573; gDNA_ID_1621168; Annot_ID_57818
ttccagtgattaacttctatgtactgtttattttgttaaatcaacctcaacttctcggagatgccctccgagactagtaatcctgttattgcacattttgcttaatttcttggatttattatatatgtttttgttgcttgttgcattgacatcccttcagataattgttatctcaaattttcttctaaatgcaaattctttgaatttgagcaggcatcgacatgcagcagccagtgttggcacaaaagtatacatattcggtgggctttacaatgataagatagtttcctctatgcacattttggatacaaaggaccttcagtggaaagaagttgagcaacaaggtcaatggccctgtgcgcgccattcgcatgctatggttgcatatgggtcgcagtcattcatgtttggaggatacaatggggaaaatgtactcaatgatctatacagctttgatgtccaaagctgttcttggaaacttgaagtgatttctggaaaatggcctcatgccaggttttcacactcaatgtttgtttataagcataccattggcataattggaggttgtcctgtctcacaaaattgtcaagagttgactttgctagatctgaagcaccgattgtggaggagtgtgagattggaatttatgaacaaagagttgtttgttagaagtacagccagcattcttggtgatgatcttatcgtcattgggggtggggctgcttgctatgcttttgggacaaagtttagtgaaccagtgaaaatcaacttggttcaatctgtgactatgagtgaaaatcatcttcctccccaacctgaagatgtttctctagaatcgaataaaaacaatgcagatttgaagactgagacgtctctgtctcaaccatgggtgatacagctagaaagaaagtatgcaaagttcggcaaggacatacttaaaagtttcggatggttagaccttgagagaaaggtttactcaaacgaaaaaggtctttgtatatgctttcctgtgactgaaaacttttctgaacttttccatgagaagcagctattgggcaaggactttgaaaggtcagaggaaaataatctaacaaagggtctatcgttaaaagatatatcctgctcagcggctttgaatctattgaaggaacatggtgccaaaaaactcattaatgtagcttttgaagccaaaaaagttgcaaaatcccccttacagagaatgagagaagatatcacatctatacttaaacagaaaggcctaccagaagagcttttggatgagctcccacagaagtaagtgttccagaatcctgattttataatactcggggactaaaatggtgagaatctgattgcgtgcatgttgtttttgcttccatctgataagtaattggtgttttatctactattagatgggaacggcttggggatattgttgtggttcctgcaacatcctttaaagatccaacttggagctctatcaatgatgaagtttggtgtgctgtttctaaatcgcttagtgccaaccgccttgcacgccaagtatgttacttttagaagcttacaccaatattctataagtggaaacgtttacatcttttcatcttaaagccactcaaaacctacaatattgatttattataagctgtgagaatgctgagaactttacaaaccgttgtcttacccaattgcatctccttagcagtaagacttataccatcaattttgtgtctttttcagggacgagttgaacctaatggtacaagggatagtacattggagattcttgtgggagacaatggatgggttaatcaccgtgaaaatgggatcttgtactctttcgatgctacgaagtgtatgttctcatggggtaatctctcagaaaagcttcgtatgggtaacatggcctgtgaaaatgaagttgtcgtggacctgtttgctggaattggatattttgttctcccatttcttgtgaggtatatgccattattgaataaacgagaagagaaagtggttttatacaatcaaaagtcaatactttattagatcgcatgcaactacaatgcattcttaattgacatttacagggcaaaagcaaagctagtatatgcttgtgagtggaatccccatgctattgaagctcttcgacgtaatgttgaagcaaattctgtttctgagcgttgtatcattcttgaaggggataaccggatcaccgcaccaaaagtacggttgatgatattccaaacggctcaccgtctatttaattctatgcaaatggttctttttataactgttggatcgagtaaatcgctgaagtaatagattttgcgtttcaaatcttttgattctcagggagtagctgacagagtcaatcttggtctcatcccgagtagcgaaggaagctgggtcacagctattcaggcattaaggtgattttactttccttaaaacttattcttaactacaagaaccaggagcataaaatctggaacaagttttaaggttcagtctctccaaaagatataatctttaagacgattcaaactcagagatgcgaaaatcttaagccacactgctcttggaacctctgaatatgatccaaaaatgtaatcattagagagagcaaccgctcgattgaatgtatattcactgatgtctctgttcttgttattggaatttgtaggcctgagggaggaatactccatgtgcacggaaacgtcaaggactcagatgagagcagttggggcgagcatgtcaccaaaacattaagtgatatcgccagagccgaaggtaataagtttatgaacaaaatcgaaagctatttggactaaaaaaagagcattggttttttatcaagactaggagtttactaggacttatatttttttggggttttatggtttaaggtcgtagctgggaagttacagtggaacatatagagaaggtgaaatggtacgctcctcggattcgccatcttgttgccgatgtgagatgcagatgatg

SEQ ID NO: 21605 - DNA, 3003 bp, Unknown; identical to SEQ ID NO: 21604
  misc_feature (1)..( 3003): 2750-1469P.txt file - cDNA_ID_1989573; gDNA_ID_2926132; Annot_ID_138782

SEQ ID NO: 21606 - DNA, 3003 bp, Unknown
  misc_feature (1)..( 3003): 2750-1469P.txt file - cDNA_ID_1989574; gDNA_ID_1621168; Annot_ID_57817
cagtcgaagatcatattcttatgtacactctctatttgttgcaaaaattaaaagttgggaatgggcattagagagtatggatcatctacattatgataaaataacctttgccgcctcctctcctaatattattaaggctttgaataaaccaaatgacgggcatcggtcatatttctgaattactcaagttcactaaggataaaccacactggtttatgatgatgaaaacagattattgtaatacaggtgcttttgaaatagctaagagtgtcatcacaggaatgcggtggcaatcttatgtagctcacagtttcccctattggttgagaagtctttttgataaggaattgacttatcaatagagtatttgagttttcacaaggaggttaggattagattttaggtttgtcttttataagagtagaaatcaaagttttttttaagtaatgtaaaatttgatacaaatcgataaattaataagagaataatttttttgaaaatcttatgtaaatatatggtcccatcaatatcataaattaataattgtataaatatatcaactatatatatctattatatgtaagaaacttcaatgatatataattctagtattgtttttttcatcttaaattcatattagttcttgtttgaatttagttcatttatttttattgtatcaaaaacttttggttttgttttttagacataataactgtttttacttgtatttggttcgaaaaatatattttatatatagagagatatattatattgtcatagaaaaataaaaaattaggaaattaagaaaatttatctataaattaatacctctataaattaatagaattttgcggtcccaacattattaatttatagaggttttacactatatgcgttgtgtcttaggtttgtgtttagtatctaaaactcccttgtgtttctcttttctctttggtatcatggcagatgagttatgggatgcattacaacacttagagttaggaagggaggatcctgctctgtttattccgcatgctacttatgcaactgttgaatctaggaatagacttagcttgattgttaggcctcttaatcctcgatctcaaaatctcaatgttgtggttgctgctttgccaagggtttgggatctgacgtctagagttcatgggagagtgattaatgcaacgtttgttcagtttctctttcagtttgaggtggatctcttgtctgtgctaagaagggaaccatggctctacaacagttggtttgtcacggctcatcgatgggaggtaaatatggcttttgagtacttgtctaatattgatctgtgggtgcaaatgtttgggatccctctcctctatgtttgtgaagaaaatgtggtagaaatagctcatggtttaggggaaataatatcattggattttcatgatgctactacaactcaaatagcttatattagagtgagaatccgatttgatattactgattgcataagattcttccaacgaattacctttgattctggtgagactgcgctgataaggtttcaatatgagaggttaagaagaatatgcagtagttgtttcaggctgactcatcataggaatttctgcccttatcaacaacctgagcctaggtctcttgttcgtggtcctactaacaaccttacaaggactagaagagaaggagtgtgtacccataatgaatatcatcgatcatccctgaactctcaatcgcatatgtctgaaaactcctttccagcgcctcttgaacctcctccaagagtggcagctccttctttgaatcctcatgaattggtggctgcttattttcctcaaggaagagcagtgtctttaccaaatataggaacactgaatctaatcttaatccatcatttagcagacaagcggtttcaaggaattttaacattcaaccgttttttggtcctgttattgctacaaatgttcctcgtgtggttgaagtaggtgagtgttctagacaaggagagtttggagaaccagtaaacaagatggataagggagactcaacaaaaaggaagaatatgggaagtgctagaagtgatgaagaagaaagaactcatggagttgttgggcataaggatggaggtattctgaaacctccaaagaagcgctaaacactctgaaaattttgtcatattttttgttttctatgctgcttaggatccatgatcgcagcttcaaggtttatataataagcgctgcattgggttcaagtatgcaggtccaaggtttgaataaggtgaagagtgggtatggccgttggaacactttttggttaaggctactctttgtgtgcagtttgttgtttcagtttacctatcactttttgattttacaacatgggtaacattgatgttttgttaggtcatgtttctttacttgttttggtgtttgtcttcaaactgaaagtggaaggtctactgatgtactttttgaactatgagagcagccccaacggtaaaatacattctcagtccattgtttctattattttaatcatttaagtataattttattatttatttatatttttagttacaaataaaaaaattgatcaattatactttatcacatataaagtgagtttttaagtacagtaaagcaaatccgtctttttaggactttctttctttctttcttacttctctcttactttttccaattaactatcattttttttctttttaagggacttattaaaaccgaccgctggggctactctgatcttaatatatatataaaaaaaagttgctccatgagttagcattgattacatttatcaatgtcttacatgggctacactaatgatagtatgttgggctttttatgtgtgctctagtagtattgtcgtttgtttgtatttgtactatgactcatcctcttgttcatcggatctaaagcgccactcaaaagggtttatgaaaaggttagggttttaacaacaactcaaaaaacagagatg

SEQ ID NO: 21607 - DNA, 3003 bp, Unknown; identical to SEQ ID NO: 21606
  misc_feature (1)..( 3003): 2750-1469P.txt file - cDNA_ID_1989574; gDNA_ID_2926132; Annot_ID_138781

SEQ ID NO: 21608 - DNA, 3003 bp, Unknown
  misc_feature (1)..( 3003): 2750-1469P.txt file - cDNA_ID_1989577; gDNA_ID_1621172; Annot_ID_57813
aagtgtccgagtgttgtttagagatttggcgctgacttgatcagtgtcagaaacagagatgatggaacataggtgtgatactacattgttgttataacatatgtgtcgaacagagaacaaaaacatatttgcttaatggtactttattctctgattttcaatgattgtctctgatactttttcagaatgagactacatgaatctgtagaagaagaaaaaaacgtaattgcacccatcaaacccatcgtctcattatgtcctacaattaaaacagaaattgaaatccccaaaccgtgtttgaattattcttcaacattgggtgacaataaatgtatttattgcttttgccctcgtgaagattaattagggcataaattgtatttgtaacttccacttcttcttatttcatagatctgacaattttatttaccctaaaaaaattgcttcgtcgtcttcgttgtcgtcaactcccttaccttcgctgatgaaagacaaaaagttgagaaactgggcggagcttccgtccaagttgacgtcatcgattctacttcgtcttggcgctattgagatacttcaaaacgctcaaaaagtgtgcaaaccgtggcatcgagtctgcaaagacccctcgatgtggcggaagatcgacatagataaccgcaatgatagggcagccttcaagtacgacctcgagtcaatgtgccgtcacgcagttgatcgtagccacggtggtttgattgagatcgagatttggtactacggtactaatgatctcatcatgtacatagctgacaggttctgtttctccctagctctctttccatgttaaagagaatttggtcggtgctaatactagggttagagtgtttgctaactatagggctaagagtgatcggtgctaatccaagggttcgagtgattgctaattctgaagttataagtgattggaggattttgtgtcactctttttaaactagatttatttttatctgttctatatccttctactgaatctctgataaagcaccttggtttgcttagtggttttgtcaacgaagtgttctcaataaggttatgtttttgacttttttagtaacaattatttgcaggtcaagtaatctgaaaagccttggacttgtaaggtgctttccaataacagatgagggagttgccaaagcagtttcgaaagtaccgttgcttgaataccttgaggtttcatactgcttgttttcaggagagtctctgagagatataggccggtcttgtccgaatctgaagacactgaagctaaaccgagcccctgaaatcatgttttcaaatagtgggtttgatgataatgccaaagcaattgcagaaagcatgcctgaactacgccacctccagcttttagggaacgggctaaccaataagggcttgaacgccattcttgatggttgtcctcacctggaacaccttgatttacgccagtgtttcaacatcaaccttgttggggatctcaagaaacgatgttttgagaggatcaaagacttgagatgccccaatgactcagatgacgattcagatgatggctcagataatggtgcggtgacaacatttgggtcacaatttaatgaaaccgactatcattggtactagatattgaatctttctgaatcttgcggaaatacctttgttgttgttgctttgttttttgtttttgacaattgacacctttgttgtttgacttatgaatagtttcagtttcctttcttggtagtttcagtgtctttcctttgaacttttttaagaagttttgagggcgtgattttaagtcgttcgagaacgatgtcatgggtctttatattttttttagttggtacattactttcacgattgtttagttacatactatcaaaagtaataatattataattaattaaatttacttatgaaaaccactaattttagcatcaatccaaagccttgcgattgatagcttaaaaaaaatgttgagtagacccgtagctatagagagaatataatcgtgtaacacttttcccttggtgtttcatcaccaatttcatttgatctttatatcaacaatgtccaaaacacaaggtatggtgtccccatgcaaatcacaacatcatcaataatcactagctagtagactcttaatgattgtttacgtgatcacctaactgtataattgactatcagtagagccggaccataacacatgaagatgaaacattccaatggggctcccattttaaaagggcccaacaaaaattttattttagttaaatatgcatatattaatttttgataataagagaaaatagttagttttatacatataaatcacaaataattgtgtgatccaaaatatttataaatctaatatacaattaaataaataattcaaaattttgtttaaattggttttctatttactctatagtttttaagacaaaaatattttgttttcgtaatttaaatggggccccggatttcattggtccgggactatcacaagaacagaatataaggtgataaaaagaaataagattgtaaataacttttccttttggtaatattttttttttttgttcaatccttttggtaatgtgtaaaaattcacaaattatcaaaagaaaaagagtggatattgattttactctttacttttggtgaatgcacttttggaaattgattttactctttactgtatttgggaatatatgcattgcaagttacaagtcaatttgttaataaaagtgttgaatgttttgtttcatctacattattattcttcacctttgttctaccgggtttaggagtagaaaacaatcaaatggattctcagattgttaatcttctgaggtctaaacagtattgtgggcctaggcccaatacattatttcagtatgcttggcccaaattagtttcgtataaaataagttttaccgtgaggaactaaattgtaaaacagagacggatacggcaattgtatcctttagaatg

SEQ ID NO: 21609 - DNA, 3000 bp, Unknown; identical to SEQ ID NO: 7896
  misc_feature (1)..( 3000): 2750-1469P.txt file - cDNA_ID_1989580; gDNA_ID_1621172; Annot_ID_57810

SEQ ID NO: 21610 - DNA, 3003 bp, Unknown
  misc_feature (1)..( 3003): 2750-1469P.txt file - cDNA_ID_1989580; gDNA_ID_2926134; Annot_ID_138866
aggccattcaaaaatatgaataagaataaaaaaggtttaagtgctattcagaaaataaataattcttcagaatattaacaattattttggaaataatttgtgttggaaacatgggaaaaatcgtttggatagtttgacgaagcaaaacaacatatatcataataatctcgaaacaccataattttctcagtttatcccacttcttaatgtaatttttggttactaagagaataaatgaatgagtaagacatatgtattttgtttgttgaggatatttatttcgtcatttattttaaaaaatgttgtattttaattttttattattattaaaatatatgttttgtcactatgttacaacataattcaattttgatatcatttatatttataaatatatttaataataataaatataagtaaataaaattcacagcttctacaactttttgttaccataattttctacaacataattttttaaagtcgaagtctctacagccaaactttctacaacataattttttaaagtcgaagtctttacagccacccttattgtattaagtcttaatatagtataaaaataattactttatatatctaaacagaaaataaaacatagaaaatatagtatatctattttattacgtaaaaaagttagaatatgttttgttgtacaataaaaaatgtaatgaaactcatactaaaaatttactcttttacatgtgcaaattgcaggaattatatcgagaatcattgttgcttttaaaatttaataatcaatgatatgtttttaaataaatttaactctcagataaattaacaatttatttttgaaacttatggttttaaatgattggttttgataatttatatgtttgttgtgtttattcattatatgtgaatacttagctaataaaacgggatttgtaaaacaaatatttactaatatatacacgtttataaattcttccatacactaaccgacaacgtatatactaacacatgacgttttacaaacacacaacgtatacaactatacatactataagattcatttatactataagattcaaatttgatatagactttaatactttgtaaattgggaaatatgtcagaaaaatcgccaattttcaaaaataggacgaaaaaatctccaactcctcaaacgtcgttttaatcacaaacttttggttgacttttccagaaaatacaaaagtttggttgacttggccaaattagtcatcacgttaagtctccgttaggacgacgattacagggttaataagccgttaagggcttccgtcttagcaaaacgacatcgtttctataatgacaaaatgagccataatcgatagaaacgtcgtcgttttgattcagagagatttgagaaattcccaaatcgattagaaaccctaaaagagagaaaattctgaaattctctcaatctctttccaattgatcccgatggcgaagacgcggggaggaaactggaatcctcgtcggtcgcggaggctaatggctattgcaggcgaagctaacagagcaaacataacgaatcgaccaccgaaagttgttgagatctcagaagaactggagacaaatcaaaacccagaagaaaccgcgatgaatcagatcccagaagaaactgcgacgaatcgaaacccagaagaaactgcgacgaatcgaaacccagaagacaatgtgggtgggactgttggtgaagacaatgttggtgaagacgatatggatggaggtctagaggaggaaaattgtgatgattttgaagcagattttggtgttggtgcaagagaagatggagatgcaagcaacactgatgctgacagtggaggtaaagattgtgatccccaatccacacacacttcgatggcacatcacattctccggtgactccagatgtaacagagcttgaactcattgttagagagagagagatcgaattgaagaatagaaattttagggattgaaatctgaaatcgatttgggggtttttagagtctcatctgtcattacaaaaacgatgtcgttttgctaacccggaagccgttaacggcttattaacctcataatcatcgtcctaacagagacttaacgcgatgactaatttggccaggtaaccaaactttggtattttctggaaagtcaaccaaaagttttgtgattaaaacgacatttccggagttggaaatttttccatgcaatttttgaaggttgaagatttttctaacattttccctttgtaaattatagaagataacattttatccacactaagaatccatcaaattagtataagatattaccaaaataacagacgaattaaaatgttatctcgtgcaaagcacatggtactgacctatattaatgagaatggtatgaaatttttgttattttaattacttttacatattaattattctacacaatttatgaaatactaactgtttttccttttgtatgtgcaggttgcaagaattattatatgaatactgacctactctataaaatttaacagctacatatgaccgagatatgctgagctgagattttgcagaagtgacgctttttcaagttttcaaatttagtaaaaattaaattaaaataaataaatctggcgagatatcaaatcacagccgttgattgctagcaaaaaatctgacctctttaaactgtaatagcaaaaaaatctagttaattaggctaattatctattagatcgaactttcacgttgtttcaaatttaaagagttacacagcgtgtcggccacttaaaacgatgtcgtaatgttgtttcccctcctcgacaagcgccaagcccgttaaaatccccaatttggatatatatcttttctctgtcgacgctctctctctctctctctctctctctctctctatcttaactcaactattcagtttcaattttcaaatttcagaaaccattttctctctctatctctcttcttcttctttatctcagtaatg

SEQ ID NO: 21611 - DNA, 3000 bp, Unknown; identical to SEQ ID NO: 8037
  misc_feature (1)..( 3000): 2750-1469P.txt file - cDNA_ID_1989587; gDNA_ID_1621185; Annot_ID_57876

SEQ ID NO: 21612 - DNA, 3000 bp, Unknown; identical to SEQ ID NO: 8037
  misc_feature (1)..( 3000): 2750-1469P.txt file - cDNA_ID_1989587; gDNA_ID_2926133; Annot_ID_138820

SEQ ID NO: 21613 - DNA, 3003 bp, Unknown
  misc_feature (1)..( 3003): 2750-1469P.txt file - cDNA_ID_1989588; gDNA_ID_1621185; Annot_ID_57874
tttaacttgttatttattaaagatatggagtgactaaaaaattttcaattgttttatttatattaaagtggctaggaaaacagagaaattacataatcaattgttgaaaagttgaatttgaaaaagtgaatctagaataagacttgtttttttaagtgtcgtcaacatctgtgacgctgataatatcagcgaaaccaactttcttgcgaagccggacaactaaacatgcggcgtcgacaccttctccgatcaccaccactttgtctttctcttctccttctattcccacaaacgtcactcctgctccgttatttaaacatgagaatatgagatcattccatcaagcgaattagaacgaatataatttgctatccatagcatcagtgccggctctaggggggtgccagaggagcaaaagcacagggtcattaaatttttttccaattttacttgaggttttagggtccaaaattttcagtaattaaaaaacagtattaactaaagccaatttctataaatcagcacaaggtctttaagaagtttgagccggccctgcatagcatagtcaaatgccggttcgatatatatatttggattctaattgatatcttaccagtggttttggctccgatcttgagggcttctgaacgacatttgtcgcacctcatacttaccgacatcaagattttctgctcatgaaaattccaatattacaaataataatactgctacgtatatacttcatcctaaaaccttccgtatatatgttagacttttagaatacaaatgtttttagcgtaccttggccattttggaacctcttggagaaaatgaaaccttattttttttgtccttttggtataaatgattactataatttacgtgtgtaaatatagaagtgcttctgtctttgtctcattttcttatggcacattgcttaacatgtattaatatgcatattttatttgtactattatttgctacgaaatcgcagagtaattttcatgcaactgcttcgtagttaatattagtataaatgttgacgtttaagtggacaatataaggtattgcttgactcataagggttagatttggttaggtaaaggttagatttttatcatgcacatctaaaaagtcagtaccgtgaggaccacgaccggtcctgaattataaaaggcccgaaaggaaactagtcccttatttcgtgtttctgaataaaacaaattattaaccttaaaaccaaataaaatttagcaaactgaaaattgtaaacaaagaaacggcactacatcctacttgcaaagaggtgtcgaacggaccggcccacaatggccattagttttagatggactgcaacggagcagtccgctaggaccgcagacaaaataactttctccaggttcgccctgctaaacccaacaagtttatggaccgatccgtaggcttagtttttatatttaaaaaataataaatatatatattttaaatattaattttagttatttttaatttaatttaatttttaataaatactttttgtaaatattacaatttaaaaaatttaatttcttcatattgttacatattttacatattataataggattcataattaagtaaaattaattattcttacaaattatttatttatttttattgaatatttgtagtctgcaggtcaatccgccaaaccgtgggtcaagtccactaaaatccgtaatccgttttggccgatccgcaagacccgttatttttcggatatataatatagtgtccaaacccgctccatcatggtactagcccgtgagtctttggcccgcttgacactgatacatacatagtttaaaaaaaaaaaagtatattcgggtaggtccaaaaacgggttgatcagttcgcgggtaaaaccggttcaaccaccggttaatggtttaaccgtcgttttaagttggttttgtttttcctcctgaaacgacgtcgtgtctctctctctccctctatcttttgcgactctcctcgtcttctctgttcgtctgccatatgagtccttcccaagcccaacttttctgaaattgaagtgagtttcttcccgaatcccttaaagtttcaaacttttcaattaacttattcctctttctcttgtttctatccgaatcgtgtgagggttttcattttctatgctctgatttggtctcaatcgatgtacgtttataatgaatgtgtgttctaaattgtaataaaaaatgactagtaggtactagttgacagctctccacagttgaaaatctctcttttgtatgaggtaccaattgacagtctttgagtctttccttgttgttttgttatcaagggttctgagctttgtgtctttaggttaattttctatgttgtgttatggaaaattggtcagtgaatagccaaaccaaagattgtgaaatctgcattttgattttggtgaaaaaaactgtatagaaatgtcttaccctcaagaaacttttatattgcataaatgaatagcttagttgttatagggtttggttgtttcaataacaaagaatagaatttggtttcttatactttataaacttccttctttcagtcttttgggacagagatggcattaattcagaaaccagtggtgtgcaaagacactaataagatcttcatgaagcaaatacttgcgtttactgaacaggtataatatagaagtgttcatgtatatctttctaatagtgtgctttataacttgtaaatcaggtcttttctgaatctctcgctttccatatgaaacctctttgtgaattacatttctagtttgagacaatgtcatgtttgaggtggttaagacgataagaacgttgacattttctgattgaaaataaaagacctggcttccattaactctgcattggatgcttactctaattattttctgattaaagaaagacattcccttaatttataggtgaccattacacagaacagtaagctctcgccacgcacatg

SEQ ID NO: 21614 - DNA, 3003 bp, Unknown; identical to SEQ ID NO: 21613
  misc_feature (1)..( 3003): 2750-1469P.txt file - cDNA_ID_1989588; gDNA_ID_2926133; Annot_ID_138818

SEQ ID NO: 21615 - DNA, 3003 bp, Unknown
  misc_feature (1)..( 3003): 2750-1469P.txt file - cDNA_ID_1989590; gDNA_ID_2926133; Annot_ID_197042
taccgtcgtttcaccttatctatcatgttttgatatgggggaatgtctcttttatttgcattttaaactttataatctttgtgttattttttatatatttggtttgatttaaatgaataaaaacaagtctttatctaaacacaaaaggacccaaaaatggtcaaatttgggtaggtctaagagtgggttgtcaatctccaactaaccatgttttgatgtcccaacaagctcttgccttcagatttgctagtcctaattattctttgaaattataattcataataactaatgacctaccaacttcatcatcttccactaatctaccgagtaacatgttaggatttagccaaatgtcatttccttagttttggttacaaccacaataaaaattattatagtaccctatatatatattatcattcaaccgtagaacatgcacaacgttgacaaaataccccaaaaatgtcatttcctttgttttactcttattttctaaacaggtgattttggattaaaggttacttaattttggattttattataatcgtcatgtaaattttctaatggtcaagagaagaagacttcaacgagaaacgacttttttggcattgaccaacaaaaaagtgccactaaactaccatcatgggagtaattacaaaagctttgcgtagtcaaacattcggacatcaaagacaaaaagtacacaatataacaattttaggtggaaaaaacaaccaaaaacaaaaatttgacgcgttttcttgttaacaggagtattggttaatacttaatagctttaactatgcattgtaaaaataaatcataaaaggatcaatgacgatcttgattgtttagaaaaaaaaattatttcaaaaagatttattttttaggttttcaatgcaatagttattagttataattgataaattgtaaactttaatacaaattattgaatatcattggtttagagttattgaaaattgtaaatcacaaagaacaatacatttaaaaacaacatttaatatgttttcttaatatttgtgtttttcctaaaagattaaacaaaaaagaacagaaagaatatgaaataagaaaaaatgcactagctttttttgtttgagttaaaaaggactatatttattaagaggtaaatagtatatcatttttacatgttttaacgctatgtaaacgtgattaagttacttgttatcaaataatcaaaattttatgattttcatgtttttgaaaaatgatattgccgtatactgtgaatgtgtaaaaatataggtgaaaaaaacaaacgccaacaatctattatgcttaataatgactcatatataagaatagtttgctcatttcttatgctttgttaattgttgttgtatgctaagagaggattgatgtttctagtgatgtgctaggaatgttctcatgtataggatgtatcggatcttgaggttaagaaatagagattcacatttccattcttaacacaacataaataaggattaaggctaatgaaaaagagttcacatattacacattttactaattaatcatggtgattagataaaggtaacaactaaaagtcattttaaccgcactcaatattacgagcttgttagaacactgtaacacaagtgttctcttccagtttatcaatggaggaaactggtaaaatcccatggacgatcttcttctctcatcctctgttctcttgtttcatttcactctacactatatttcttctttatttccctcaagattctcttcgaattcttatttcccatgtccctctcctcatcggagctttcttaatctcctgcctccatctcgggtcgacccggaaatccattgcccgacccggaagcaatgaggattcgataggacctgaactcaaaacgggtctcggtttaaacccggattttatggaatggaactttaaattgggagctccattggaagttattcacaaagaagaagaagaacagtcgatgacgggtgtaaaagatccgacccggttcgtgatgatcaagaggtttccatcgttatcgatgtttaacccggaatctgattccgaattggaccgcgatttcccggttatgagtgaaaatgatccaacccggttcgtgaggctggaaaggtcaattaaaccggaatctgatatggattacgactccgaattggacaacaatttggttattgatgtaaaagatcgaactcggttcgtgaaggtggagatattcccatcgttgtcaatctttaaaccggattcgaattccggttcgccggagaaattgcgttgtatatacgaaatcaaaacggaaacgctttttgtagttttatattcctggagaacaatattctaacaacttgttttggcagcaatattctgatttctgagtataatttgattcgtcaagtaaaatctaattttataattctcaacaaacaaactcgaatttgatttctctaatgtgtaatgtcgtcacgatttacgtataacatattaaaagttgtcgacaaagaaaatgaaatacatttccaccaaatataataagtaacaacatggtcagattcagagaggacgatctggcttggccaccaagattgtttgacaagtatttatttaactactatactttctcttccacaatattaataatgttttaaatgtcattattaatacgtgacgaaactgtagctctgaaataaatatattaacaaaacaaataaatattctcaaccaatcataacctcgtatttgtttttgtttccatttaaattttattttgactcgacttttacacgcatgccacgtggtcaaccaaaacgtatgacaaactctacttctccaccgtcacaatcatctcctggccccctctagatctctctctcttttcctccttagattaaaatttctccaggtttcttggcgttactgtgtgaaaaattcttcttcttcttcttctcagcgattgaatcgaaccaagagcgaaaatg

SEQ ID NO: 21616 - DNA, 3003 bp, Unknown; identical to SEQ ID NO: 21615
  misc_feature (1)..( 3003): 2750-1469P.txt file - cDNA_ID_1989590; gDNA_ID_1621185; Annot_ID_57872

SEQ ID NO: 21617 - DNA, 3003 bp, Unknown; identical to SEQ ID NO: 21615
  misc_feature (1)..( 3003): 2750-1469P.txt file - cDNA_ID_1989590; gDNA_ID_2926133; Annot_ID_138816

SEQ ID NO: 21618 - DNA, 3000 bp, Unknown; identical to SEQ ID NO: 9314
  misc_feature (1)..( 3000): 2750-1469P.txt file - cDNA_ID_1989590; gDNA_ID_1972068; Annot_ID_178500

SEQ ID NO: 21619 - DNA, 3003 bp, Unknown; identical to SEQ ID NO: 21615
  misc_feature (1)..( 3003): 2750-1469P.txt file - cDNA_ID_1989590; gDNA_ID_1621185; Annot_ID_174396

SEQ ID NO: 21620 - DNA, 3003 bp, Unknown
  misc_feature (1)..( 3003): 2750-1469P.txt file - cDNA_ID_1989594; gDNA_ID_1621185; Annot_ID_57867
agagggcaaggaagagagcgttgatggaggattgggagatggagtattggcctcatcggattccgtatgaggagattgaatccggcactaaggggtttgatgagaagaatgtgattgggattggcgggaatgggaaagtttataaaggtttgttacaaggaggggttgtggaagttgcggttaagcggatttcgcaggagagtagcgacgggatgagagagtttgtggctgagatatcgagtcttgggcggttaaagcaccggaatttagtttctttaagaggatggtgcaagaaggaggttggtagtttcatgttggtttatgattacatggagaatggaagtttagatcgatggatattcgaaaacgatgagaagattactacccttagttgcgaagagagaattcgtattttgaaaggtgtagcttcaggaatattgtatttgcatgaaggatgggagtctaaggttttacatagagatattaaagctagtaatgttttacttgaccgagatatgataccgaggcttagtgattttgggttagctcgggttcatggacacgagcaaccggttaggaccacgagggtggttggtacagctggctatttggctcctgaagtggttaagacggggcgtgcatcgacacagaccgatgtttttgcttacgggatattggttcttgaagtaatgtgtgggagaagacctattgaagaagggaagaaaccgttgatggattgggtttggggattaatggaaagaggtgagattctaaatgggcttgatccacagatgatgatgacacaaggcgtaacagaagtcattgatgaagctgaaagagttttgcagcttggattgctttgtgcacatcctgatccggccaaaagaccgtcgatgagacaagtggttcaagtgtttgaaggtgataaggctgagatctttgaagcagaaagtagtgaagatgtcgagtcatggatgttgatgaagatgggatctcgtggaagctcgcgagagttttggtatggaagctcatcacatccgacgatagagcagattagacttcagtctttgtctgtgtctctttcgtcttggaacagctcaattttagaagggaggtgatgatgatgaagaaatggcttgaggaacctaaagaatgtagttatttttgtggctttactttgttacttgttttgtacatatacgtatttgtaaacgcatttcattatacatgtatttttttattttaatttttttgttgtgaattgaaactagttttcaatttattatattttgatgtgtatataaacaagttttgcatccgaagttaaatgataaataatttaagagaagtacttataataatgctaacaaagtaaatgtgtagattactataaaacatacttttttactaaaataggatttatgttcttaagtattgaacatgagaaacatgttttatggtttttttttttttttttttttgtcatcatgttttatgttcttaagtattgaaaaaagtagtactagtatctggttgatgaataaaagattactctaaaacatgtttttactaaaagaggatttatatcaataaagcttggttatatatatatgaaaatatatatatatttttttaaaaaccttattcctaactacacccttatttatttatctaaatttttatttatttcaaaaaagaaaaatacaatacaaggctttgtacatcattctcttattaaaaagtttagatctcacataagaagttctatcgaaatttacaattttaatatacaagattacaataaaaactaccaggtttccgatcataaatttcagataatactaacagaaagaacgacaatcacatccgtcgatcaaagtttttgtaaaagatccttcgatttttttgtatacataatgatattatttaaaattcaaatatcatatacatatttacaatttttgtatgtccgcctatctatggggatcttatctagttaatcaatgaaatttggttttatatataccaaaaaacaaacattctgacaaggtctaatttgcatattaatgtaaacacatcatataaaaattcctaattgtcacgagttccaggtaatcattcatatactataatgcatatggttgccagagaggtatatttaaaaagcttttcatctttggaaaaagcataaagttatgttcatgaatcttataaaatgttttaaagatagtccttcacaaaacaagacaaatcaaacgacacaaagattcgatgctgcggtgtcctaaaaagttctctttatttggagtctcaaaatctaattcttatttgttttcctcaaaacactttctgtgaaaatttcgaaatgtcactacactgtgagtttagcaaaagagtttttgttcattacgttctaattctatgattatctaatagattaagtgccatcactttcattcatgagcacaccatcactagttaaaaagatcaagtgcctttctcagttaatcctaaatcctagttaatgtggtgtcgttttgaccaatccattaatacgttgccgttttaaaatcccaccacgagcataatataacggatataatgctatcttgtcttgtttctctctagatttcagagattctctcgagtttctgacacgcgcgtactcgcacgtgtctcatcactacactaaccctacacgtctccctttcgtggacgctccgtttacttaatctccaccatcagatcacatcttagataaaagcctaaaatcaatctaacggtcactagctcaaggagtatgtattattgtacgacgagacacacatcgttatctctctttattatttggtaatatcataattattatctctatgcacagtttttgtttcgtcactgtctttgaaacttaaaagaaaagagaagaaatagaaagaaagaaaaaaagatgaaataattttgaaaaaaaaagattcgaagcaaagaaaccgttagccggcgatg

SEQ ID NO: 21621 - DNA, 3003 bp, Unknown; identical to SEQ ID NO: 21620
  misc_feature (1)..( 3003): 2750-1469P.txt file - cDNA_ID_1989594; gDNA_ID_2926133; Annot_ID_138811

SEQ ID NO: 21622 - DNA, 3000 bp, Unknown; identical to SEQ ID NO: 7280
  misc_feature (1)..( 3000): 2750-1469P.txt file - cDNA_ID_1989607; gDNA_ID_1621136; Annot_ID_57797

SEQ ID NO: 21623 - DNA, 3000 bp, Unknown; identical to SEQ ID NO: 7280
  misc_feature (1)..( 3000): 2750-1469P.txt file - cDNA_ID_1989607; gDNA_ID_2926136; Annot_ID_138889

SEQ ID NO: 21624 - DNA, 3003 bp, Unknown
  misc_feature (1)..( 3003): 2750-1469P.txt file - cDNA_ID_1989609; gDNA_ID_1621136; Annot_ID_57795
agcaagtgtgtaatcttgaaccatgagctgattcaaataatccgagaaaagatcacgctgctacaataaatccgtagtagctttctcactctccttaccaacagtttcctcatcaccatgaaacagatttttacgcaccgtctttactgcgaccgcttccagccccaaggtggaggaattgttcgcagcaatttctgaaacatcaacccccaaatcaccagaaactgcttcaagcttacctgaatatgatcctaggaaagcatccatcatctgttgatgatctgagaggctatgactcgtctcaccaaaatcacagtaccaacccgtccagtgggacccagtcggtgctgcagcgcatcaaccctaacctctctcatgtgggcccttctagcccaccatgtaaattattgttgcgcttgacgtttctcaaacccaagacctcaccctttaacaatcttcccataggacaagttgttaccaattaacccacatgagagagattagggttgatgcgctgcagcgccaaccgaatcccatagagtgggttgttacaatcaccatcttacattttatatttttttaattagaaaattttcaaataaaacaatttgctgcaggatttaaattttataaccatcataattatctttttaaattttacatttttaatttaaatttccacataaaaatatttgcagcataatttaaatttagttgcaagtttaataaatatacaaaaatgaatattgtcaaataaatatttttgctacataatttagatttatctacaagttttataaatgtagagaataaaacattataacttcaaaagtattaaccgatgaagtggctaaccgcgattggtcgtttaaaagcttagttggacagcctgagaagcttatagcttctacttttctattttttaaatagtaagatgattaaaatattaattagtgagatgggtaatcgtgattgatcattttttgtagaaaaataagaaaaataacaaaataagaataaaaatagaaatttctaattaaaaaataaataaaaattgacatatttgccatctttgtataaaaaatattaaaatttaaaaatattagtcagtgagatgactaaaaatattaattagtggaatgactaatattacatagattccatatatttttctaagtttacataattactatattttaatataaaaagtaattataattgtaaaaatgttaatttgcaagtttctccatcacatgatgcgttaaaacttttaaaataaaacataagtatttataacattattattataacctcattaagtttttaattttgtttttatggttggttttaaagaatgaaaacactatattacaaagataaatagagttttatccaattaaattaatgttaaataagttatatagttattttaaacttcaatgggctttttaattattattattatctacactaaataatttttttttttaattacatgctaatttaattgaccaataacaaatattaaaagaaatttgttaattttccttattgttaataattttttccctcttttatatatagacatataaattagtatatttagacttattacgcttttttagttttttatacggtgattttgaaaattaccctatttttaagtttttatttgaaaaatacacttttccatatttttaattaaaaatacaattttaaatatgtgaaatgacaattatgtccagatttaaaacaaaagaattattttaaattaattaaaattaaatacgaatttttgaaaaagaaaagaaaaaacttaatttaaatcttaattattatttttaactattttttatatatcttaaatattaaattctaacatattttatcaaaaaatattttaaagtttatcacttcatatttatcacattatataaagaaattaatctaactccaaacacataattctttatttcttttgcttcttctttttcttgtaacaatattttcctttaaaaatttattcaagataaaattatatggaaaattgttagttagttattagcaaatatttttaaattaattttttttttgtgtcgacaaataaacaaaactgattttattttaaatataaatgttttcaaattattagtaaattttagtaaggatatttttgtaattttatattccatttatctcttagaaattatattttaaaagagaaaatatggataggttatttttcaaacaaaaacttagaaaagatcaggcattattccaaattttctctttttatatccaattaaattaatgttaaataaattatattgttcttttaaatttcaagggcattttttaattattattattatccatagtaaatgattttctttttaaaattacatgctaaattgaaatgaccaataacacatttagatctaaatttcttaatttttcttttttgtttagaaaaacaatttttattttattttatatatagatatataaattagtatattagatattttttttttttactttttgtatttttttccaaaaaacaaaacttaaatctcttctgacacatgtcaacatctgatcgatttatttgacatgtggtgcaatcttatgattgttttgttaacggaaatttaacggcatgtcttaaacggcccaatcaacgaaacttagctattttattgagaagtcaacaaaaacttcatgattattctaaatttaaaagttgaggctttttttttatattttttcctctatataagaaagaaaattattgagtctattgaaaattgaagcaaaaaaatggaaaaccgagaacgacgtaattgggctgagtaagaggccacgtattaaagcccagattgttatggtcggaaagtttaagattagagaccacttcacgcgacttaaacaacgaaccaaacctctctctgctcagcttttccgaccaaaagatccaagcgcaagatcaactcaaaatcaatg

SEQ ID NO: 21625 - DNA, 3003 bp, Unknown; identical to SEQ ID NO: 21624
  misc_feature (1)..( 3003): 2750-1469P.txt file - cDNA_ID_1989609; gDNA_ID_2926136; Annot_ID_138887

SEQ ID NO: 21626 - DNA, 3000 bp, Unknown; identical to SEQ ID NO: 7273
  misc_feature (1)..( 3000): 2750-1469P.txt file - cDNA_ID_1989612; gDNA_ID_1621136; Annot_ID_57792

SEQ ID NO: 21627 - DNA, 3000 bp, Unknown; identical to SEQ ID NO: 7273
  misc_feature (1)..( 3000): 2750-1469P.txt file - cDNA_ID_1989612; gDNA_ID_2926136; Annot_ID_138884

SEQ ID NO: 21628 - DNA, 3000 bp, Unknown; identical to SEQ ID NO: 5706
  misc_feature (1)..( 3000): 2750-1469P.txt file - cDNA_ID_1989628; gDNA_ID_1620812; Annot_ID_57885

SEQ ID NO: 21629 - DNA, 3000 bp, Unknown; identical to SEQ ID NO: 5704
  misc_feature (1)..( 3000): 2750-1469P.txt file - cDNA_ID_1989630; gDNA_ID_1620812; Annot_ID_57881

SEQ ID NO: 21630 - DNA, 866 bp, Unknown
  misc_feature (1)..( 866): 2750-1469P.txt file - cDNA_ID_1989631; gDNA_ID_1620812; Annot_ID_57880
aagcttttgaaccattcttgaaactttatctccttattttgaccaggcatggaaactctggaacaccggggaagatattgctcttgtggatccggtcatctttgaagagtgttttgaaaatgaaatacgcagatgtgtgcacgtaggactattgtgtgtacaagatcacgcaaatgataggccgagcgttgcaacggtgatttggatgctaagtagcgagaactcaaaccttccagagccaaagcaacctgcatttatacctagaaggggcacttcagaagttgaatcctcgggacaaagcgacccaagagcatcgatcaacaatgtgagcctcacaaaaataacaggacgttagctctgtaagtgagataaacctactgctaaagaattttgatgaaaaaatgtttaagttgtatatctgtatgtaagagtaatctataggttacgaactaaaattcagaatctggtcatgttcttgtatgaagtcacataaatatagaacatgttttattgtagacagagcatctgagcgtacttctttggaatacagtttctgctctttagtccaatcattgcacatacaaatacacagaatgtagatatgtaatcataggagtttctcgataccaacaaaactctccatttttggtacgtaattaatgattattgttggtgttcttttagttagtttcacacttttaagtcacatgaatcagttcttacatctttttgaaagtccaacctttgagatatatccggaactggggcgtgactcacagttaatgactgatccacttggttttcaatacttacacagcatttatacattttcactaaatccttgctctgaaacaaacacaaatatg

SEQ ID NO: 21631 - DNA, 3000 bp, Unknown; identical to SEQ ID NO: 5877
  misc_feature (1)..( 3000): 2750-1469P.txt file - cDNA_ID_1989634; gDNA_ID_1620823; Annot_ID_57848

SEQ ID NO: 21632 - DNA, 3003 bp, Unknown
  misc_feature (1)..( 3003): 2750-1469P.txt file - cDNA_ID_1989637; gDNA_ID_1620823; Annot_ID_57844
tttagtagacttctcaaactgacctatatcactgcctaaagtattcttctttcctccctttgcaccaccaccctcttgacctctcttctccacctttgccttccctctcatctttgcccgatcagctatcttcttccccaatgcacccggtaaaagattgtcctcatcatcaaaaccattcgcattaaaccctaaccctaaacctgagctaccaatacccaatccacctctaacttcaacatcctcatcaatcatatcattatcttcgattttatccctatctttctcatcattatgttctctagaatccttatcaatctcttgattcggcataaccgtacctgtagatacaaaattgacaggcttggttaagtctgctttccttcccgaatcacgatccttacgcctcttcctacgactgccgccgccgccagaatcatcggaatccgaatcgctctcagcgaagattccataagtagcgtcgtttttggtttgtttccgtttctccttcctcttctggtatacgaactcgtcaccttcccatcgacctccttcgtagtcattatccatactgaatctctccatatcttgatactcatccatggcgaagaaactagatctgaaactctgcgaattttccaaactatcggaggtttttggatttacgactgcaaatcgccgacgtcgccgtgtataatcggagggaaaggattaaccgacttgggctttataaataataaaggcccatttatttttgaattatagcccatttatttgtaaacttggctataacaatcagtcacctcatcttcttcattttggactcttggccaaccttatgtcgttttatcgcatctgttacaataaaacgcaaaaggtgatttttttttcaggtaaaaactatgagtttcgttatctaaccataactcaatagatactacgataactaaactaattaaaagggataaaataaacaaaaacacagttttggaaaagaaaacaaaatagaacccaccaaaacagatatagtaggttagaagtataacttataaggttaaccaaattgctcattataaccaaaaacaaaaaattgtgaacccaaaaattacgttaagaaaacgtagattccattatatcatggagttttgagtcttcaatccacatactttcgaaagtaacaaatttttccattaattctactaagatttttagggtgttgtttttgatgttttaagtttttcttattttttgtcttaatttctcctcctcctatctctcttattccaatttcataattatatatttttgcatgactagattattagaaaaaattgtttctgttttatgttatatataattaatctttctctttctgataaaatcataaaagtcaataattttttggtttaaacagtaatataaagtcatgagattttaggaacactttgttttctctaactaaccaacttttcattttgcaacatagaatagaagcattaatatattctttctggaataaatacaacaaaatccccttatttcttgtacaaatcgcataaatatgggatttgaagagtacaacaacacataaagaaacgtcccacctttttagatgttataacaaagaaaagtcggttgtatgactcggacttttctagttggtttttcaaaaatgttacgtaggttttgacgtcatatctcattatttgaaactattttccttggaatggttcactaatagctaaatgtaccattcttgttacattttttaaattagcagctaaaagtgtatacaaacttttatatatgtcgtcatttaattgcacacattggttatacaatgcaaattatttccttaaccatgtctagacttttttacttctatcaatttaattatatacttttcgtatctttatgtacataaaataagtttcaggtagtaatatcagcaaaaaataaggacttaaatgaatacgtctgataaataacttacgggatatgttatagcttcgcgacaaaaaaaaaatcctcgaagcctatagtctattaattacttgttgaacaaaacaattagtacgtactagctaatgaaataagcttacgttacaaattagtataataataaaccaacaacgcccgtagccgttaggtctattttgtcctaggtggaaaatttagtaaatgcctaatgaccctagtctacgcgtaattgcatttatatgaattattaaacttcaaaattaattgatatggttggacgaacattatcttatgaattattattatatcatatatcacatgcgtttcgcaagagagttgacattgctattcatcgtctccaaagaacaacgccacctggttccatatttattgtccccaatttaaatttaatttaatcgtgatcattgtcttagttacataaatgttaaggttgatttcgagttatacgtcaattattcaatggaaacttgtttaattatataagttgagacgaactctcctttctctacctgtttaaagataactacgatacgaagacgcaaacaaaaaaatgcgtaagaaagtaattatggaagcatcatgatcagcatatacgtactagtagatatatgtatatataaaaagataaaatactaaatactctcatgcaataaagccacatgcatgtagcgtaagggaaggaagacaaaattaaatttttggaaataaacaccaaagaacttgttgttataaattcattgccagttgcacatacagcgatttattacatatatatcccctctctctctctctctatagtctctctataaacaagttttttatcacatttcttttctacagtattttctctattcacgcatatatatagatatccagctgcctccaacatatatagtcaactgatgaaattataagcatcatcattatagttttgtctcctttttttcttcttcttttctttttctttctagctactctcttcttcatagctagatcaagatg

SEQ ID NO: 21633 - DNA, 3003 bp, Unknown
  misc_feature (1)..( 3003): 2750-1469P.txt file - cDNA_ID_1989640; gDNA_ID_1620823; Annot_ID_57840
atatctctggaaggtttctcggtttcttcagccatgttagccaccatatcaaaaccagtgtatgaccagtagacaactgcagcagattgcaccacacctttcgctccataagggaaaaaaggaaccaaatttgaggtttttgaatgagtaaaccccacaacgacgataaacacaataatacaaacagtgaccatggaagtaatcaaattcaaccaagaagtcctctttgttccagtcatggcaataccattagcaactaaaagcactgcaacagcaaccggatccaaaagatcaaaccctttagcaaaggaatcgactttaatccgaaaataatcagaatcattcttgaccaaactagctagatacgaagaccatgacctccctaatccagcagcaccaaccatagcctcaagaagaatattcccagcagcaataaaggcaataaaatcccccaattcaaccctaagataagagaaagaacctccagcgacaggaatctcaactccaaactcagcataacagagaactgagagcaatgcagagacaccagagatagcgtaggagagaacaacagcaggaccagctccaactcgagcctcctgacccgtgatcacgaacacacccgaaccaacaacagaaccaaagctaagccagagcaagtcccaccaagtgagacaacgacgcatagggttctcgctttcgcggcgggctgcatcgagctcgtacgcatcggaagagcgagagagaagacgatcggcgaggcgtggacaagtggcggagagagctgatttgtaggtagagaagctctgaaaagagaattccgggaaaaaatcctgcttcctccatctccagtagcttctccgttgacttaggtcatcggatctcgactccagctggtgagcttcctccattgaagcagggatcatctcaaatccacaaaaaatccgaaagagcgaataattggcaatttaaaaacttgagtgtctaaaatatgataataaaatagttatggatcgaaatgtaaatagtcgtctaattgtagttaaaattcgtgcagcgttcactgaaactgaaaggtggtgacagtacaaccctaaaaacgagggacccacctaaagtttttattgaaagtcgtctaataagagttataaaccaacggtcaggattggagatgtgagactcgatatcaccttttgagatgaatcgtacaaaatgcaggacccactttgtctgacatgttttgatcaaatagctaaacgccacgtgacgaatgtctattacgagatcatgccacgttcgtcgatgagcttgactgatttattcatcaacttgcttaccatttttttataaaaacaaattgttttaaaatcatatttctttttttttttgtcacattttaaaatcatatttctagtatttgttatttgtttgaaagaaaatgtattagatacagaacttgtgttttgccattcgtttttgatttgacaataacagattttgttatttagtaccttttctgatttttataattgctttcgatttttttttactgatattctacgtgacgttttataaataaagaaaaagtaaaattaattattagaagattcattattacatagtttcagatttcgtcaacagtcattttcatactttataaaacttacatgttcctgtccaaaggtatcaaggtaaaaatcccataataaaaatattactgttaatgtgacatattattttaggacaatgaaagactatttttatggagtatagaattcctttctggtattttgaataggaaaaaatcaactacatttaataattttatcaatttgcttacataattacgtgtgataaaataatagtattccggaatttattaaatgtctacctatattttggttattacccaaaatgagcttataaaattattattaataatctactttctatatttttggttaattattagtttatttaaaaacagcatcctgaaggacggagagagacagagtatgcgaggagtgtgaaaacgaagagcataaacaacacgggacgaggagagagaaactagtgtgttttagaaagaagaaagagagagatagacaaagagactgtttgtgtcttcttacccattcgaggaatcaaagcatctatttccgagctctcaagacgacgagaagctaaaagataaggctgaagaaatttagggttttttcttccttttgtattcagctcgttaattaaggtatgttcccaaattcttattcttaaagttcggctctttcctttttcttccgacttgtgtcttagttttttttttcaatcgtggtcaaaatttgttcttgagctactctgttataagggtttgtgggtactggaatctttgattcgagagcaatggagactttcaagcacctcagattttatggttagagaagtttttttttttgagctgctctgtagaataatgtgcttaggtctgtacggatttggggtaactagttggatcgcgagtgtttctcaccaggtccttggaaaaggatttgttttatacctgaaatttgggatttttcagactcatcttcaagtactttgctttgaatcggggatttagcagacttgggttcttcagtgagatgctttattcagttttgggggtttgttagatttgagagcttaagagataatttcttgttgcttttgttgaaaaactatgaatggagactagatttaattgggcttcccttggaaaccatcttgagctttattgaatctgtgtataatatgatggaataatgagagtataaactgaactcattctattggtatttgtaaatgcagggctatccatcttccgagttcttcagtagcttcacaagctggacctgaaaatagatcttggcgcatatcaggagtgtgattatggttatctgaattcatgtaatttgaagggattttcacgagctgtgatcgggtcatgaatgcgtgtctgaggacatg

SEQ ID NO: 21634 - DNA, 3000 bp, Unknown; identical to SEQ ID NO: 5875
  misc_feature (1)..( 3000): 2750-1469P.txt file - cDNA_ID_1989641; gDNA_ID_1620823; Annot_ID_57838

SEQ ID NO: 21635 - DNA, 3000 bp, Unknown; identical to SEQ ID NO: 5885
  misc_feature (1)..( 3000): 2750-1469P.txt file - cDNA_ID_1989641; gDNA_ID_1620823; Annot_ID_169593

SEQ ID NO: 21636 - DNA, 3000 bp, Unknown; identical to SEQ ID NO: 5876
  misc_feature (1)..( 3000): 2750-1469P.txt file - cDNA_ID_1989646; gDNA_ID_1620823; Annot_ID_57833

SEQ ID NO: 21637 - DNA, 3000 bp, Unknown; identical to SEQ ID NO: 5876
  misc_feature (1)..( 3000): 2750-1469P.txt file - cDNA_ID_1989646; gDNA_ID_1620823; Annot_ID_169584

SEQ ID NO: 21638 - DNA, 3000 bp, Unknown; identical to SEQ ID NO: 5883
  misc_feature (1)..( 3000): 2750-1469P.txt file - cDNA_ID_1989647; gDNA_ID_1620823; Annot_ID_57831

SEQ ID NO: 21639 - DNA, 3000 bp, Unknown; identical to SEQ ID NO: 5883
  misc_feature (1)..( 3000): 2750-1469P.txt file - cDNA_ID_1989647; gDNA_ID_1620823; Annot_ID_169580

SEQ ID NO: 21640 - DNA, 3003 bp, Unknown
  misc_feature (1)..( 3003): 2750-1469P.txt file - cDNA_ID_1989648; gDNA_ID_1620823; Annot_ID_57829
ctttgcgtgagctattgcttcatttgtttgaggacgaattccatcatcagcagcaaccacaatgattgcaatgtcagtgactcgtgctccgcgagctctcattgcaccaaatgcctagatgaggacataaaagtaagatgagtaaaactatggtatgcctagcaatagatgtgagatagtcaataaacatgctacatgtaagaaagctcatgaagtataattaatgatacttcagcatcagaaatgaacatgcgaagattcaattgcaagaaaaagaatctacctcatgtccaggagtatcaaggaaaacgcaggactgcaactttccatcaacaggcactgacaccttatatgcaccaattccttgtgtaattcctcctgcttctgacgcagcaacctgcatgtatccagcgaagggagattagctgacaacgctacttagcactaatcttgacaataagcaaatgaacaaacattaattgccagtagccatgctttagaaatgataagaaactgaagaggccacaatgaaatttcttaaataataaaaggcaaattaatagctaatctcatccataccttgctttttctgatatagtcgagaagagtggtctgcaaaataggcagcaaatgcattaggaacaacctactgctaaaaaataggactctatatatccttttaagggcgagtaggacatgagaacaaaaaaaaggcaatgcaaactgtgcctacctttccatggtccacatgacccattatcgttatgacaggaggtctgtcctctaacttgtccaaatcttcttcatcaaaagtttgccttttctttgccatctcttctactttaactgaatcagcatcaaggacctcaacatcgtaatctctacaaatcatcttcaccatctcgcggtccaaagtgtgcacaccatcaggtctaatcccttttgaatataggtacccaaggatgtcaccttctccgatggctaggttgtaagccaaatcctcgatggacatgccttcttcctctacctctaagatttcagctttgacaggtgctgcgtcttttgcagcctggagtcttacagccttcctactagctttactccattttctcccttttctacctgatcgagaaatggatgcatcatcgtcgccgtcgtcttcagcaacaattcttcgtcttggactagctgatgcattttttttattacggtgctcaactctgaacttgttagagggaggaccctttccaggcttagtaggagctaacacagcctgagaggccgcaggatcaacaccttttttcttcgaagcaaatttgtcaaccaaaataggcttcctttctttacttttaacgctagaatcaacttcttcagaaactaaaggttttgctgccataccaagatcttttaagatgggtgatttctttacgggtggagctaccataggcttcccttgtaacattggctggggtcttacaggcggttgaggtctaaaaggtggctgaggtggtgccaatggagtgcctgctttggcattcacctctccctcttctctcgttctaggttcggtctgcactcctctattaaaaattttaggtgattccttaacaactttttgcacagcagcaacagcatcgcccttacgccacacactcttcatggttttcgtcttccttgttcctccatcactcgcattcgcatagctaccatttcttgagttactactgttggcactaggctgtgacggcttaacagcctcaccaccctctttgttacccggtttcggaatttccaacttctcagctttatctaaaacttcaccaagagattcaataaccttattcctctcttcttctccatcaaacttacccccattcgacaaatctttactccaaggagcagtattcacccccaaacctctttctacccttgccacagggggtttcaagacaggtttaggagtctgcttcagcacaacctcactatcatccccatctttactccccctaaacgagttagaatctatagaaactgagttgttgttttggtcagcaatgaagtcagcagtagtagtagtagttgaagacgaaacagaatatctacacagccatttcttagtccccttaacacttctccttgacaaagaaaccctcttaactaaagcatacgatgcatccgaagaactcgttccagaaacgcttgcacaagcaccacctagactaaccagagaagccaaggacggcattgtgccgacgagaacaagcatcgatggcatctcaaaaaaaacagaaaacgaataaaacaaagcgatagcaaattcagagactttatctcattccaattgcaacgaatttcgaaccagaaatgacataaaaacttcaactttgtaaagaaattggggttatcgacgaatcaaatccgaaagcatgaagctgaattgagaatcgatgagcaatttagatatatggtgagagaaagagagagaggaagaagaagataagtgaaggaggaagaagaagaagagagtgcggagataactttgaacttgagcttgtgtgggtgtggctgcttctatgcctggaattttcgcggatttccgataaggccaacttacaaaattaaaattaaaatccataaatattttagctaacaaaaaaaaaaaacacttttgtttgtctgaaaagtaaggctattgggctcgtctctaaagcccatttataaaatcagacccggaaacttctgcgtgatagacacacgtggctacatttaagccgtatattgtaaatataggggcaaattcgtcattaacaaattaaaagtatttaatattatcgataagtaacagagcatttaatactaaatttaataaatattaaataacgtcaagagagagatttgtcatttgagacctcaagatttctctttctattgcctactctctgttgaaaaagtgaagaaggcccgatatagagagagagtgtgtgtcgttgacgaaggaggatg

SEQ ID NO: 21641 - DNA, 3003 bp, Unknown; identical to SEQ ID NO: 21640
  misc_feature (1)..( 3003): 2750-1469P.txt file - cDNA_ID_1989648; gDNA_ID_1620823; Annot_ID_169578

SEQ ID NO: 21642 - DNA, 3003 bp, Unknown
  misc_feature (1)..( 3003): 2750-1469P.txt file - cDNA_ID_1989662; gDNA_ID_1620833; Annot_ID_57911
aatgaacttttactaatttagcgagcatatagtgtaagatgctttggtgcattgttctggttagataccagtatttcattttgtttactgtggagtctttaagctcctcgacgttttgcaatagtgggttccttcttccctcctattattttacccagcatcgtctcttacaggttcttgaccaaactgctgactgtggatttgcctcgattatttgtccgaccgaagaaaattgtcttggactttcagaaaggaaaagctgttggacctgttttagaagacctgaaatcaggagaaatgcaggaaggcaataaggattttgtcggggaactatctgttactcttgttgacgcccagaaacttcgatacatgttttttggtaagctatagttcctttacatgtcagtgtttccttcatagttggaaaagtggaatagacagacaatctattgctgaagtatcagcctctttgtgcaagttcagtcgactttcttgggaataaagtagctatactaattgagtctattggtgagatgttttgttttcctcggtaattggtaacaggtaaaacggatccatatgcaattctcagattaggggatcaagttatccgtagtaaaaggaacagtcaaactactgtcattggggctcctggtcagccaatttggaatcaggtgaactgctttggatggttcattcacaatctggtggtgaattatgattatttaaggattgaaatgtaaatagataagtgtgtattctttaactttgcaggactttcaattccttgtttcaaatcctagagagcaagtattacaaattgaggtcaatgatcgtcttgggtttgctgatatggctattggtactggagaggtaaataatatttccttgggtacatatttttttttgtaatctgtagaataataggcgttgagtacgtattctgtggatctctttaatgattgcttgaggaatgttgcttaatatttatgttactgtctgcatagccttattatttagttatatgtccaggttgatctcagatttctgcaagatacggttcctacagacagaattgtggttttgcgtggtggttggagtttgtttggaaagggatctgcgggtgagatactgctacggcttacatacaaatcatatgtggaggaggaagaagatgacaagaccaatgtcaaagccattgatacttctgacgatgaaatgtctgattcagaagaacttggctcatttgtgcggaagggaaagctttcgtcagatgatattgatcaagagtcatttatgaacgtgttgtctgcattgattgtgagtgaggagtttcaaggcatagtttcatctgaagctagagacggtataattgatggtggtgactcacttggggcaccagtaccttctaagccagatactagtaaggggtctgaaagaaacgcagatgtatcaaatttggatttgttagttgcaaattctggtagaggagctggcggtgatggaggtataccgaggctcaatctcttacgatgatttcctttctatgctttcttgacctgaaactgtaaaacctcctaatttcaggattagcattactgtggttcggtattatcacgggtatattggttcttgttgctatcaacatggaaggctcaagtttcttcaacccgtagtatagtactatacatctcgctggagatttctgttgcaagtaagtctcttaatatatacctcgagaacttgaaatttcttcccctgatgtgattggacagacagattctctttttgtcagttgttttccttatattagaacgtggaacaacactggtttgttcatatagtcaagaaccaaacttgaacttcttttttcctagaataattatgctacttgaaacattaaaattgtagattctgttactctttctgctgcttgtagtgtaccgaaagtcaaaactggacatcaggctttgtatttgataaaattatgtgtgaattgaaaatgagtcagttgattcttctaccttgtgtgacatagttcagtccagatattttcatgtcaaccttttgcctaccgtgtgtgataagcttatcaaggcctctttattttgtggcaggtctggtggtcatctcttctcaaccttagatatggcttataacgaggtctcagttttgtaatttaattttgtatgtaaatagccattagaagagggactcttactaaaggcaggaaggtttggatctattctgtccaagctctcactgttgtgttactctttacacttgtggttgatatacagtacataaaaaaagatagaaacttttgtatattttgaccaaaaaaaaaagagaaaattctgacttttcggaaataaaatataatcatcgattgtttcaataggattggtagtaggagcagaacttggttcgtggaaccatccttcatttccattcccttatggtaagattgtggtatttcatgattctcaaataaagtttgacaaagatagactgatcgaaaaggtggagcctcttgttaacatgggacagattagttgtgtcgccgctgaattccatgatctcactgatggcagactcaataatggttatggtattgaatgaagctctcacgtccatgttctgttgaggcttacaagactgttctagttggtggggaagttgtccgaaccggaacataatccaaaccgaactgaattaaatttttaaaattaaaccgaactgtccgaccactacaaagttttttcgaatttgcacattaaattaattaatttttgtggcattttgcgatcagttaacgagtggatatgaggtagcaaacgtagaaaggactcgagaagtcatggcttctgcttaatctcctcttccttaaaaaccagaagatcctttgttccacgtttctcgtttgtagcttcttctctctcagaattcaattcgaattttgacaagtcttgacgaagaagaagaaacagagctgcttcaatg

SEQ ID NO: 21643 - DNA, 3003 bp, Unknown
  misc_feature (1)..( 3003): 2750-1469P.txt file - cDNA_ID_1989663; gDNA_ID_1620833; Annot_ID_57910
caaactaagttttaatataaaaccgaaaatgtatcaaagaaaagatttgaagttttttgagattaacgtgtattaataatatacacacatggatgtatatatatgattaagaagatttggagtcatcctttagattcttcactctgtcttgttactgccgtggggttcatgtcagacccacaaggccacaacagtcttgactgtatgtttcttcttgtttttctctgtaatactattagtaaaaatatcttaaaaaggaataattctggtaaggtactatcagttacacttgaaatacatgtcaaagactaacaattattcatgtacttttctattcacatgttttactggaattaacaatagttcatcattttcaaaaattgtagaaataatgattattatgtcagtgtatgattgattcctttataatttctgttgttttgttattgtacagtctcatccgaatctaacaccccaagatcgaacagagatatgtcgatgtctcaactacaagaaactaacaatggagacgtgcaaacagctcgccagaaaccctaagatccctccagaaatcgccattgaagcactcaagtccagatgtgggaatcaagaacacacaacttcagatgttaaagttgcaaacaagagtttttcttgtagatattcagaagagaagaagaagcctgtagtattgcatctcgagataacagagaaattagccgagaggttgaagactaaaggaggatataatttgaaggttatggatagtttcagagaaggcttatgaggaaaatggtaaacgtcccaagtcatgattcagcagtcacatcttccaattcatctggcaatctcatttgcaccccaacagtgtcgagagtcttgtacaaatcatcagattcaaggggtttcttatcatcgaaagctatgaattcacaaagcttgcctttcacttcgatccaactaaatcctggcgatttcaccacctgttgatctttcatttgctttcttacccgagcgacttcatcccagttttgggattccgagtacaaattagccaagagagtgtatctcccactatgactaggttgcagcttgatcacacgggaggctgcgtatttacctaactcatagtctttgtgtaacaaacaagagccgaacagagctccccataccacatttgttggctccattggcattctttctatcaaagctttcgcctcttctagcaaaccttttcttccaaataaatcaaccatacacgcatagtgatccgcttttggctccatattgaaacgtcccttcatgctcaggaaaagccttcgaccctcttccacaagacctccatgagcgcaggcacttaagacagccatgaaagtaacttcatttggtgaaacatgactactcaacatggtataaaagagatcaaatgcatctctagcatatccgtgtgctgcaaatccattaatcatcgcggtccaagtatacacatttttctcatgaagtctctcaaaaacaagtatagcttcctctaaacacccgcacttgacataaagatcaatcaatgtagttccagctgtagtgtttatctcaatcgaattcttaatcatataacaatgcacccttcttcctcggtgaagtgccccgacatgagcgcacgccgaaagaacactgcttagagtcttctcattaggcgcaacatcactctttaacatctcctcgaaaaccaacatccctttatcgaagcaacggctttgcacatatccagcaatcaacgccgtccaagtaaccacgtttctgctaggcatttcatcgaacactttctgggcatcatcataacaactacatttcccatacatatctactagagaacttcctatgaacacatcgcatttcactctccctgtttctaagtaaagcccatgaacgcttctcccaaatcgaacatcttcaaccttccctgcagctttcaagacgctaacaacggtcatttcgttagccgcgactccagtcttcttcatctccacgaaatacaccattgcttccgaagcagaaccatttctcacaaacccatcaatcattgcagtccaagtaaccacgtccttatcttcagctccatcaaaaagacgacttgcaaaatcgaataacccagaactagaataacccgaaatcaacgaattcctgacaaaaggatccgaatccaacccgaatttaacgatatgagcatgaaactgaaacgggttcgagtctctcagtttgaaaaccgctttgagaagcggaggaaacgtgtggcggctagggatgacgccgtttcgccgcatatgacgataagcaagaaatgataaccgacggttgagagtaatcccgccggagaagtgaccaatgagcgaatcccatagttgaatgctcagagtttggagttgacataataaacgacgagcgtagcggaattgagttgcggcggtgcagcagcgacggagaagacgtgagagaaagagatcgcgacgagtatagaatatcggagaagttaggagtaagcaatggatctgcttgagatgaagaaagtgtaatggaagatcaagcaatgttttgagctcaatcatgtgaattgagaagtaagcaaaagagagagagagagggggtggttaatacttcaattcgaattttccagttttcagatttcagatttcaaaggaaccgaaccgaaccgacattaaaccaaaattcccattcaattgaatcgaagtgactctgaatatcagtcggtttagtttttatatattttttttaatagccgtagagggggagacgagggttcgatccacgtgtcaaacagtccagagaaaaaaacagaagtaagaagagaagaaaatgaacttcttcttctgcaatttttctaactttgttagcttctacagattttgctacgagccattggagaaactgttattgccctaaagatatgcgttatttttctccttcttcttcggatacgattcatagatg

SEQ ID NO: 21644 - DNA, 3000 bp, Unknown; identical to SEQ ID NO: 5930
  misc_feature (1)..( 3000): 2750-1469P.txt file - cDNA_ID_1989667; gDNA_ID_1620833; Annot_ID_57906

SEQ ID NO: 21645 - DNA, 3000 bp, Unknown; identical to SEQ ID NO: 5930
  misc_feature (1)..( 3000): 2750-1469P.txt file - cDNA_ID_1989667; gDNA_ID_1620833; Annot_ID_169752

SEQ ID NO: 21646 - DNA, 3000 bp, Unknown; identical to SEQ ID NO: 5933
  misc_feature (1)..( 3000): 2750-1469P.txt file - cDNA_ID_1989670; gDNA_ID_1620833; Annot_ID_57901

SEQ ID NO: 21647 - DNA, 3000 bp, Unknown; identical to SEQ ID NO: 5933
  misc_feature (1)..( 3000): 2750-1469P.txt file - cDNA_ID_1989670; gDNA_ID_1620833; Annot_ID_169744

SEQ ID NO: 21648 - DNA, 3000 bp, Unknown; identical to SEQ ID NO: 5924
  misc_feature (1)..( 3000): 2750-1469P.txt file - cDNA_ID_1989673; gDNA_ID_1620833; Annot_ID_57898

SEQ ID NO: 21649 - DNA, 3003 bp, Unknown
  misc_feature (1)..( 3003): 2750-1469P.txt file - cDNA_ID_1989675; gDNA_ID_2214462; Annot_ID_133010
aaattaaactaacacctttctaaattgaaaccattgtcacataacacatggctaacttgaaattcttgctgtgcttgttcttgatctgcgtttccttatcgcgttcatcagcgtctcgaccgatgttcccaaacgcagacgggattaaacgagggcgtatgatgatagaagcagaggaagtgttgaaagcgagtatggagaagctaatggagagaggttttaatgagtccatgagactcagtcctggaggtcccgatcctcgccatcactaagtcttattctcgtagttttgaattcgaggatgtatattttgttcttgatcgagaaccggtttagaagaaaacatatcgatcctctttgtttgttttttttgccttgtttgttcgttcggtgtaaccaatatattgatgtatctgtttcgttacacatttatgatttgtgcatgctttacgtaccttatacattccactatatagtagtctagtagagaggaggactttgcatataaattgttatataacaagaaagggtaaagaaatatagtatgataagggaggattgaattaatttaatttatcctgttttttcagtctctaatggctcgtgtagaaaagtatatattatatatggactcttttgcctcatcgtccaccaatgaaatatcacataaagagagaacgatagtgattgaagtttttcaaaaagaaaaaaaaaacaggggaaaacagagagaattatactttttaagagcgaagcaacgtcttcaaatcttcaatttttcagagatcaaacccttgaaatgctgctctttacgaaactcattttccaaaatctctttttcatcactttcgttacaaattcacaaaaagttacaagtcgtgacaagcttgagcttaagtatgtgtatgaatagtgtgaccaaattgttttgcaagagatcaagtaacttgttacaaaagaaatgattcaacgtaacttacaaaactataccaatttaccaaatcagttatctgtggaaagagggtacctacagtacctctcatttttcatacacataaagaatctctcataagccgaagccatttgagtcgctgtaaacatcgaaagagcgtatcccttacaagctattcctttcatctccaaaaccctaggcccatctcttacaacagaatccaaagtctcaacaagagatctcacgtttggagaaaatgtgtacccaaaacgctcgtccacaaccactgtcccaacaatgcttggataattaggtgccacgacaggtttcccacactgcatcgcctcaatgatcgtcaaatcaagcccctgtggtctcaacgtcggattcacaaacacatctaaagcgttgtagaaaccagagagctcctctggctctaaagctcctaaaaccctaacgttttcgcctaattccgcgtatcttttgccccaaggaccagatccagccacaagcaaatagactttcgggtgcattttaacgagcaaagcaaacgcttcatatagaagtggatgtcctttgtctctcaccaaacgtccagacacacccatcacaatatatgtcccattgtcaggaataccgtgtttcgccctgaacctagctccagattcaggagaatacacgaacttggtttggtcaacaccgttgactataacgtgaacttttctcttaggaagttgatagatgttaactagtacctcgcgcgcgctgttgctaatgcaaatatgctgtttatattttgggaagaatctgatttcatcgacgagtctaggcatcgtttgttgaagatcagagctaggacgatcattggaaagttcttgaaaaagatttgaatgcataatctcgtaccagattccgtgccatgtcacagctatgtcaccattaggcaccattttgactcgccaatgaggcagagaaacactctcagtgtgaacataatcaaaggaatgatgatctagactgttgattttatggaagatctcaaaagctcgagagtggttaagtgagccgtgttcgtttggagcaaagtagacatggagatctcctttgttgtagtactcttctcggttacttctgtcggaagaaaccgtgaagacgtgaatctcgtgacctcttgaggcgagagaagtgtagagtgtgtaagcatgacgctccattcctccggggatcgaaccaacaggccatgacttgcagaagacagcgagtttgagcttctccgagattggtccaagtgagagtttgttccaagggaatgtcaggtctcgaagatctcctgcgaaaggaggattttccggtgaagaagtcaccggagagtaatcaaactgtgagaagaaaatgtagtaagaagaacaaaagatgaatgctaaggtaatgattgttgtgaatctgaatgaaaatgaagtggaagaagaagaagaaagagttgttcttgaagaatggttcttgaaggccattgttttggtttatttgatttttgtgaattgagtgcaactattgatgttgattctttgcttaaatttcggatctttctcgagttattatatcaaagttcatttctcaatgacattgcacatggcttagctaatttttatatggtttttacattcaattgaaagtcaaatctctcttaaccaactgagatttgtaactaaaccgggatatcacacctaattagttttcccggtttgatattttgttttgtacacgtaggcgtgtgattactccgtcacactttacacatgtgtaattcccctaatttatcgggtttctttaggcgcgtgagataatgcgcgtgtgtctacgctattcttgcgacgctgtgcttcctagggtttcgtcgttgcaaacacagtcaatgttcatgaaccacggatcctaatctccccgatcttcgattcattgtttcagaaatccccaattactgtctctgtgcgtaaaatctctagagaaaccttaaaattttccgttcagagaaattgtcaacgaaggtaatg

SEQ ID NO: 21650 - DNA, 3000 bp, Unknown; identical to SEQ ID NO: 5969
  misc_feature (1)..( 3000): 2750-1469P.txt file - cDNA_ID_1989675; gDNA_ID_1620834; Annot_ID_57953

SEQ ID NO: 21651 - DNA, 3003 bp, Unknown
  misc_feature (1)..( 3003): 2750-1469P.txt file - cDNA_ID_1989681; gDNA_ID_1620834; Annot_ID_57947
gtaacaacagtctacaagggccggttcgtttcggatcacctaattgcaagaatttgttgactttagatttgtcatacaatgaattcgaaggcggtgttccacctgcattgggaaattgcagtagccttgacgctttagtcattgtgagtggtaacttgtcaggtacaatcccttcctcattgggtatgttgaagaatctcacaattcttaacctttccgagaatcgtctctctgggagtatccccgcagagctcgggaactgcagtagcttgaacttgttgaagctgaacgataaccagcttgtaggcggaataccgagtgcattaggtaagctgaggaagctagaaagtctggagcttttcgaaaaccggttttcgggtgagattcctattgagatatggaagagtcagagtcttacgcagttgctagtttatcaaaacaatctcactggtgaactacctgtggaaatgactgagatgaagaagctaaagatcgctacgctgttcaacaacagcttttatggagcgataccaccgggtttaggtgtgaacagcagcttagaagaggttgactttattggtaacaaacttacaggagagataccgccaaatctatgccatggaaggaagttgagaatactcaacttgggttctaatctgcttcatggtacaataccagcttctattggtcactgtaagaccatcaggagattcatccttagagaaaataacctttcaggtcttcttcctgagttttctcaggatcatagtctttcttttcttgatttcaatagcaacaacttcgaaggaccaatcccgggcagcctcggaagctgtaagaatctctcgagtattaacctatctcgaaacagattcacggggcagatacctccacaacttgggaatctacaaaaccttggttacatgaatctttctcgtaatcttcttgaagggtctctaccagctcagctatctaactgtgtgagtttagagcgttttgatgttggcttcaactcattaaacggttcagttccttcaaactttagtaactggaaaggcttgacgactttagttctcagcgagaaccggttttcaggaggtattccacagttcttgcctgagcttaagaagctgtcaactctgcagattgctagaaatgcttttggtggtgagattccttcgtcgattgggttgatagaggatctgatctatgacttggaccttagtggaaacggattgacaggtgaaattccagccaagttgggagatctcatcaagttaacaagactcaacatatctaacaacaatttgacaggatctttatcggttctcaaaggtcttacctcattgctacatgttgatgtctccaacaatcagttcacaggtccaataccagataacttggagggtcagttgttatctgagccgtcgtcgttttcaggaaatccaaacctctgcattccacattccttctctgctagcaacaatagccgcagcgcgttaaagtactgtaaagatcaatctaaaagcaggaagagtggccttagcacctggcaaatcgtgctaatagcggtcttatcgtctttattagtcttggttgtggtccttgctcttgttttcatttgcctacgtcgtcgcaaaggaagaccagagaaagatgcttatgtcttcactcaggaggaaggcccatctttgttgttgaacaaagttcttgcagcaactgacaatctaaatgaaaagtacaccattggaagaggagctcatggaattgtgtacagagcttctttaggctccggaaaggtctacgctgtgaagagacttgtattcgcgtctcacatccgcgctaaccagagtatgatgagggagattgatacaatcggtaaagtcaggcacaggaatctgattaagttagaagggttttggctgaggaaagacgacggtttaatgctgtatagatacatgccaaaaggaagtctttacgacgttctccacggtgttagcccgaaagaaaatgtgctagactggtctgcacggtacaatgtagcacttggtgtcgctcatggactagcctatctacactatgactgccatcccccgattgttcaccgtgacatcaaaccagagaacatactcatggactcagatttggagcctcacattggggatttcggtttggctcgccttcttgatgactcaacggtttcaactgcaactgttacaggcaccaccggctacattgcaccaggtaatgcatcttctcattatacatagtggacttggtataatctggtttagtgttcaaaccgagttagttaccggttaaaaaagtctgttaggaagatactctgtttcttattagctaatttcacaattaaactgcagaaaacgctttcaaaaccgtgaggggaagagaatcagacgtttacagttatggagtcgtgttacttgagctggttacgaggaagagagcggtggacaaatctttcccggaaagtacagatatagtaagctgggtgagatctgccttgagcagcagcaacaacaatgtggaggatatggtaacaacaatcgtcgatccgattctcgtggacgagcttctggattcgagtcttagggagcaggtgatgcaagtgacggaactggcactgagttgtacacagcaagatccggcaatgagaccaacgatgagagatgcggtgaaactgttggaagatgtgaaacatctggcaagaagctgctcctctgattcagttcggtaatctcgttactttgtgcagagcagaaggaggaaactaaaggactgttatcagtggtaacgtaactgggcttaccggtaatgtaactgggccaataatgtaaaatatggcttattgaaggcccaaatatgacggccctttaattgtaaccgtgtttgtttgtgaaataaaatctcgtttatcaaatttctgtttcctattttatttttaaaaaaagtgttgggaaaattttcgtttggccggagatg

SEQ ID NO: 21652 - DNA, 3003 bp, Unknown
  misc_feature (1)..( 3003): 2750-1469P.txt file - cDNA_ID_1989682; gDNA_ID_1620834; Annot_ID_57946
caatttaggtagaatatcaaagatctcctcaatttgctgtataatggtcatctaatttccaacttatcaacttccttgttaacaatttaggtagaatatctaagatcttctttctattattggcgtcaatcagatcgattataatctgtcaatatccttcaaggtgtcaatcaagttctattttgtttccctctttcctctctcctcttgcccttgtctctttataacatgcgagctccatttgtacatttttcttgattttcaagtctcagatggagaatcttgggttgttccaaattcttttgctattctgtctctttgtctcggtccgcatagtttctgtttcttgtttaaattcagatgggttaactttactctcgcttcggaagcatttggacaaagtaccaccagaattaacttcgacatggaagactaacgcatctgaagccactccatgtaactggtttggtattatctgtgatgattctaagaaggttacgtctctcaacttcaccggttcaggtgtttcaggccaattgggtcctgaaatagggcaactcaaaagcttagagatattggatatgagttctaacaatttctctgggattataccttccagtttagggaactgtagctcacttgtgtacattgatttgtctgaaaatagtttctctggtaaggtccccgatactctcggtagcttgaagagcttggccgatttgtatctttacagcaactctcttactggggaattgcctaaatccttgtttcgcattccggtgttgaattatctgcatgttgagcataacaacctaaccgggttaatccctcaaaatgttggtgaagctaaggaacttcttcatctgcgtttgtttgacaatcagtttactggtacaatccctgagtctattggaaactgcagcaagctggagattctgtatctgcacaagaataagttagttggttcattgcctgcaagtctcaatcttttggagagtctcactgatctgtttgttgcaaacaacagcctaagaggaacagttcagtttggctcaaccaaatgcaggaatctggtgactttagatttgtcatacaatgaattcgaaggtggtgtccctcctgaactgggaaattgcagtagccttgacgctttagtcattgtgagtggtaacttgtcaggtacaatcccttcctcattgggtatgttgaagaatctcacaattcttaacctttccgagaatcgtctttctgggagtatccccgcggagctcgggaactgcagtagcttgaacttgttgaagctgaacgataaccagcttgtaggtggaataccaagtgcattaggtaagctgaggaagctagaaagtctggagcttttcgaaaaccggttttcgggcgagattcctatcgagatatggaagattcagagtcttacgcagttgctagtttatcggaacaatctcacaggaaaattaccagaggaaataaccaagctcaagaatctcaagatcgttactctcttcaacaatagcttttatggagtgataccacccaatttaggtctgaacagcaacttggagattatcgatttcattggtaacaattttacaggtgagataccacgaaatctctgccatggaaagatgttgacagtgtttaacttaggatctaaccggcttcacggcaaaataccggcatccgttagtcagtgcaagactctaagcagattcatcctcagagaaaacaacctttcaggctttcttcctaagttttcgaagaatcaagatctttcgtttctcgacctcaatagcaacagcttcgaaggaccaatccctcgtagtctcggaagctgtaggaatctcacgaccatcaatctgtctcggaacaagctcacgaggaatattcctagagaacttgagaatctacaaaaccttagtcacctgaatcttgggtctaacttattaaacggtacggttccttcaaagtttagtaactggaaagagttgaccactttggttctctccggaaaccggttttcaggattcgttccgcccgatcgccactcttagagagaaggaaaacaaccatgtattccagtgacatcatatcaaacatttttactatacaacatactctcttttttttctttgcttaaatcgttgtataccttttcaccattcttattgccgcttagtacatttttaattgataacacaaaagtttcggttgataagatccaaattcataatatacaaaattcttatttaacattcaataagaaaaaacaaaatttgctaatgctacgatgttacccactcggaagcttaccatagtctgttagtcatagtttgaaagtcaatttggtcagctgtagcttacggttaggctgttcttatcaaataacaaaaagaatgtcaaacacgtattttatcgtattcaatttagggcacgttgataacgtttccaaaacaattattcaatagttggtaatgaaaattaatgaaagacccaaacctaatgaatgttaaccactaattgaccattcaccaaccaattatttaatgaaatatctttgttagtttcgttatttagtattgttaacggtttcttactctttttgactacatcagacggacgtaaaacgacatcgttgtcgaatattcaaaagattcacaatttgacaaagagaaacagagacgacttgtttctaaaaaaaccacgtgtgtctgaaaacggaaaaaaagaagactgaatgagaaacggcgtgtaaaaagaaaacgcgttgaaggttaggctctcacaatcgttggtatacagagagaccaaacatctcgtcataaaaaacggcaagaatcatcagttactttatacccatcaatcaagtcttgtcctttttctccttctctctctcatacgagcttctttcctgctgatgaggcttgagctttaaattttcaatcttgattgagattctgcatgtttctcgatctttaaactcagatg

SEQ ID NO: 21653 - DNA, 3003 bp, Unknown
  misc_feature (1)..( 3003): 2750-1469P.txt file - cDNA_ID_1989684; gDNA_ID_1620834; Annot_ID_57944
aaggtattggattccaggacagcaatgtaagaggacgatagatatgtgtttaattgtcttatctttctttacataaagaactaggagattccagaaaacttcaagaagaaacatttacgtggaacaaattccaaaagtgttcatcatagtgccaaaaagaagatgagaggaatattatattacctcctgttttcacattatcaatatttaagtttgctctagtatgtactatgctatatgaacatgtcctctgctttctgacacaggaaggtttgaaatttgccataatggttactctgaaagtaagatcaggccatttatcattatatctcaatcctgtttttttacatgaactatagacgaactcctgtactccgttattacatgaattaaccgaggagtccaatgatagaaagaaaaaatgaacaaactaactgtagaaccatctgatagagagctacaggtgaacgtataacagaaaaagaatcagcaaactaatccagaaaatgcgaaagagcccatcttgcggaaatcatttctatctcatcctctctctcagcatcttcagccccatgtacctgcaattaaagccaatgaaatttgtttttaagtctggtcaaaaaggactgatacagtttcgaagagtatacactttgatggtttcttcttaccttccaagcatcatcaaggtagcctgaggattagtccctggagagatattgaaggttgatccatccacgagtctaagagaattaacaccaatgactttgagatcagagtccactacttttcctacaacagcgcctccatggtagtgccagattgtgctcacagttcgtctgcagaaatctgccatcacaagatcatttgattggtccacaggcaatggagctccaacaaacctgaacctacggttcccaaaccattcccttatcataaagtcctgcatagctcggctcctgagtatttctccaatcttcctagtcccattgacacatctctctagatcctgtggatcactgaagtagttgaatctaacaactgggttaatcctcacatccgttgacgccaaccttagtaaaccaatagacactggacctaggatcttttccattatagttgtcacagggacgtacaaaggagaagctggagctctgatgaacacagaatgtaaaggcgatgcaaacggaatcacattcgaagcagcctccagaaaagccccatcctcagtaacacccacgacttgtatcagtgagttctccattggaaccggaggaacaatggagataccattcctcgggttatcatacacaaaatcccccacatgaggctggtcaagagccacagggatcccccaagttgaaagataactccttggaccaatcccactaagaaaaagcaactgtgggctaccgagtgcaccagcagacagtatcacctctcctctgtcccgtatcaatgcgtgatggaaacgtcccagctgatcacggtaaaccactccaatcgcagaaacgttggaacctgagacactaggagatgaagcaagcaatactctctctacagttgcgtaaactgcaactctaatgttggaactccttgcatatctgagaagatctgcagagctgtgtctcctcccagtacgatcaaacgtggaacctccgatcttagtccccactttatgctccaaggtgaagccattaaacggatggacaccaacttcaagcaacgcatccctaattgcagtttgccaagtcctgagctgaggtctaaacacaatcgctctctcaacccactcataagactgattcacactactcagatcccaaacaagacccgaattctcaaagaactgtttatcagcacggctatagaatccagcattgatcgcactacttcctccaagaacacgacctctcgcgttaggaactccttcctcagagatgaaagactgagccggcgagtcgaaattgttgacgtcagtgagagtggtcaagaaaccgtcgtgtgacatcacgttaggtctgttgtagggaacgccaccgcgttctagcagaagaactcggaaagattgcgaaagtgtggcggctagtggacatcccgccgttcctcctccgacgattatgtaatcgtagtaatcctccgacgcaaaatcagttgcgttcgatatgaatcgcatgaaaccgggagctgcaacgaaggttccaacagtaagaaacaacaatgaaagagaagaatctcaaaatcaaattagggataagctaaacatcgatcatcgttttcttgctattactcaaaagcgatacaaggaaatcaaagaaacctcatcaaaaacttcttcgtcgccaaagattatgatgtttcaagcattaacatgagattctacagaaattttctcggaaacttacgtcgattaacgcgtggccttgcattagagcgatgaactactccaagaagaagaagcactacgagcgccgtgtagagaagagaagaatcaatccgtttcgtcattctcgttcttctgttgaagattttctcggagctgatagaaaattaaattttctcgggaaagtgagaagtttctcagttagagagagaaacagagtaaaagtagttaaaaaagaagactcaaattaaatggcgcttggattctgttatagagagagtttctcagctctggaactctgatataaaagtaatcacagccgtcgatgaggtttagaccaagttgagatcagcggttgtcaagagaagtagtcctgagctctaccgcagtggataatagcatgcaatatatttgacgccgttagcaaccgtctctggaccctttaacgtcgtcgtcttgttgtaaaagtaccgatttgataactgccaatcaaattccggttcaatccggttaagggaagataacaggatttagccacgtgtcatgaggttgtgcagattagactgtagccagtgttatcactaccgtctaaacacagagagagagagagagcaaaaatg

SEQ ID NO: 21654 - DNA, 3000 bp, Unknown; identical to SEQ ID NO: 5950
  misc_feature (1)..( 3000): 2750-1469P.txt file - cDNA_ID_1989687; gDNA_ID_1620834; Annot_ID_57940

SEQ ID NO: 21655 - DNA, 3000 bp, Unknown; identical to SEQ ID NO: 5952
  misc_feature (1)..( 3000): 2750-1469P.txt file - cDNA_ID_1989689; gDNA_ID_1620834; Annot_ID_57937

SEQ ID NO: 21656 - DNA, 3000 bp, Unknown; identical to SEQ ID NO: 5978
  misc_feature (1)..( 3000): 2750-1469P.txt file - cDNA_ID_1989697; gDNA_ID_1620834; Annot_ID_57924

SEQ ID NO: 21657 - DNA, 3000 bp, Unknown; identical to SEQ ID NO: 5976
  misc_feature (1)..( 3000): 2750-1469P.txt file - cDNA_ID_1989699; gDNA_ID_1620834; Annot_ID_57922

SEQ ID NO: 21658 - DNA, 3003 bp, Unknown
  misc_feature (1)..( 3003): 2750-1469P.txt file - cDNA_ID_1989705; gDNA_ID_1620835; Annot_ID_57968
cataatctattgtttttttacataaatgcattgtgttaccgttacttcaaattcatacattgcaatatacggaaaaacttttatagatgatatctctttacaaaacctaaaaataacactagaacgatacttttgcgacactgaaaaatattatcacatcatcattatgattacaaagatgattcagtcgtgtacgttataacatgtcgaaattcatggtcacaaatcacacccatctgtcattctctttcttggacttcctaaataacttttagcctttttcccagattatattcaataattgacgatcgataactttaaactattcattctttaagagtgagtaaattgaaaagtttatgaacatttcacattctttaatcacgtgtttaagccaccagtagccatcattgttcactttcaagattgtctaaatcgcttcgacgtaccacttcttttgaagaactggaatcaatattgatcgtccgaagttttaaccactcatttgatttgtatcaatatataactgccaaattcttatgtgttttagtgtttatttcatacggctaaaccgtatacttttgttcacgtgtatctttgattatttaaccacaaacataattttattgcatatagtgtgtttattaaatgatactgtactttagtttctgttttgtataatacttctttttctttacaataatattttagtactctattgaactcaaagtttgaccaaaattttagatgatatttttgtaacaattaaaagagggcacatttttaaacttagccataaacattttgagtcactcagtcatagccttatacgcacaacactgtgtgtactagctttattgtggaatatgtatatttttgtgtagatctttatgtacattagctagaattatcaattatataaacacttaaacagatggaataatttggtagttaatggaaatggttaagctgacatatgaagtgcttccaaaagttccctaaatcttttgccgatatctaggattatttattttgttaattgaatgtcaattgagtgaaaatattaagatataataataggttgattcgattatgataaatagttgaataaagtgtataatatggttttgtaaggacggcagattttatcttagcttaaatcacaattaatcattcatgtttggacttattcgaggaagttgtgtcaagtaatattttatgcaatcagaaagatacagcaacactaagtcacaagaaggtcacgacattctctgtctcagccatttactcatgtgaaactttggctctgtactaaaaaggtagtaatgcccatatcgggaaaaaaaattataagaataaaatacaggaaaatatttttttctactatataagtgatttaatgatatattaactaaatttatacaataaattgagctatttggttttgtaaaactcataaataaaaatgacatatattaactatactcataagtactacattgtgatgataatattttaaaactcaaatatcaaatcaataaatgtctaatatcaatttcattgataattcatttttgaattttatttctctattaatctatttaaaaagatatgtttaccgctagcctccaaccactagttagaggttaaccactgtagttctaatttcagttcatctcaatttttgttttggttaaaaagtttaaaccgatcatctctacactaaattcagattttagtttatgtgaacaaataattccgaagcgacgtgttaactaatatcatgaaggggaattagacagaagcttaacgatgagaatataggctaaaatttatgtcgtccaaggagtaattgagtgttgcctacttcacgagacaaataagtaaacctaacaataacacatagacacactcgacgccattagccaaattccatttgagccatccaattccttagtggatcttctttgtctccagcccatcttgtctccttatttttctaatgattactttataaaaagtgttttatcaaacatcacaaaatataaaaagaatttccaaatacttttgatatttaactattgcttttttgattattagccggggtaccaagatattagtttttaatttagtaatatacccatatgtttaatattgatatcgatattgatttattcatattacgaaaatggattagttagagaatgtgaaagaaaggtaaagtaaaatattgaaaagcaaagattaggggacagaagagaaaaggtatgtctctgccatgcccatccccaaaagtagagtgccacatgtagaccttcttcttaagatctaactcagatgctatttgtacaagtaaaaaatgtggcagactcagtttctatttttccatattttactttaatcttcatgaatcataaaaaatgaaaaatcaagcacatgaatgtcactgaaattattcaacaatattcttatttatcagttattttaattatttgactatttatgtgtatgttgttatctacaatatgtccgtttcaatcagtcgaacaaaaaatactagattttagttatgtagtataaaatataaaaatgttgaaaaacactctaaccattaatttgtattattttaaactttccatatgatgagatgtattattcaatataataataaaaagaatattatttaataattaaacaaaaacataataaatcttataaacaatatcttaaaagaaaagaactatattgttatttttttgataagatcgataaaaaatgtaacatactaaagaataaataaaataaaataaattagtaaaaaggaacttgggtggtcacgtatttgctgtataaagaggtgtaaagtggcatccttccttaaattatatcctcaaaaaccaaacttgctcactccacacacacactgctcccaagtcctctcacttcttcttcttcctccgacaccgttgcttaacggttttccatttttgtcccttcaagatg

SEQ ID NO: 21659 - DNA, 3003 bp, Unknown; identical to SEQ ID NO: 21658
  misc_feature (1)..( 3003): 2750-1469P.txt file - cDNA_ID_1989705; gDNA_ID_1620835; Annot_ID_169857

SEQ ID NO: 21660 - DNA, 3003 bp, Unknown
  misc_feature (1)..( 3003): 2750-1469P.txt file - cDNA_ID_1989708; gDNA_ID_1620835; Annot_ID_57961
agaccttttgaattcacctttccttttcttttttgtttctttcttttaataagctgatttaagtagcatcgttgaatttgagtcggtgattgtttgtaagtgaataagaaaagtagtagagtcaggagacaggtgtgctttctcttcaaagctcagaagcaagatggagaaaacagaggaagaggttgagatgaaggaactggtagggcttgtgagaatcctagtgaagagagggatcgatcttgctcgtcgagacgctctaagcagcgacccttttgtcgtcataaccatgggtccacaggtactttttctctctttctgattctaatctgatttggttctcttctgtttgatgtttctatttctgttcttgagatgtatggtttctctgtttactttcttcgcagatggaagaccaaagaatcgacctttaagaaacatgattaataatcatttaaaaagattttacatttcatgctacaaaatgaaaacaatctatagctataggatgttgtgttgcattcgttctaactgaaattggttgtatctttgaattgcaccagaagctgaaatcttttactgtgaagaataactgcaacccagagtggaacgaagagttgactcttgcgatcgaagatcccaatgaacctgtgaagctggtgagtactagtacccgtcagtaactaccggaatcatgaattttcaactcaaaaccaactgatgataagtggttggttccatatgtttttgtttcgtatgagtgcagatggtgtatgataaagatacatttacagcggacgacaagatgggagatgcgcagatagatatgaaaccgttcctagacgttcacaaactcggtttgaaagaacttccacatggaaaagagctcaagagaattgtgcccaccagagataactgcttgtctgaagatagcataatcgtctccgataatggcaagatcgttcaggacatgattcttctgttgaagaatgtcgaatgcggcaaggtcgagatccagcttgaatggcttaaaaatccaggtggtagtggactctgaaaaaacagagatgaagtagctttatgattttctgtgtgtaataaaaaaaatctcagttaataaaatagaacagagtactactactctgttttgtaatggaaatatatttggttttagatctaaccgaaaccgttttggtttcccgcgagttttctcttcatcacaaaaaagaaaaagtgatatttatgttttatattggtttggtaaacatgttcttggaaaagtcaacggcttaaaccttttgtccatagtcagaaaaaaagaagaatcaagaagatattattaccaaagatgttcgtgagagtaacgcgtagatgagaataatatagaaacaaacacctggaaaacgaaacctattatatagatggtctttattttttgtttctttattcgctctatcgtccattgataagccaatttttaagtggtcctcgttgaatttgagccggtcattgtttagaattaaaaaaaaagaaggtaaaagagtcagagccgcctagagaaatcgatcacaaattcagaagaaaagaacagagaaaacagaggaagaggtgagatggaggaacttgtagggcttctgagaatccgagtgaagagagggatcaatcttgctcagcgagacactctaagcagcgacccttttgttgtcataaccatgggatcacaggtcttttctctctctatctctgtctttgattctaatctgatttggtctttgtggatttcttctgtttttgagacatatatctctttttatcaaaatattgtcctccaagaagcatgataaatttcaattaagtatggaaaaataagagagtttaaacaacagagaaatgaaatcaatagataggtttagtatatgattttgatttttgatatagagaaaatcgtctttcgatattaggatgttcatatcttgcatgcactctaatagaattctttaaaatgcaccagaagctgaagactcgtgttgtggaaaataactgcaaccctgagtggaacgaggaattaacccttgcgttaagacatcccgatgaacctgtgaatctggtgagtacttctatctgtctatttttttattactggctctaataggaatcatgaatttccaactcaaaaacaattgacaattagtagcgtttttttacagatagtgtatgataaagatacattcacatcgcacgacaagatgggagatgcaaagatagatattaaaccatttctggaggttcacaaaatgggtttgcaagaacttccagatggaacagagatcaagagagttgtgcccaacagagaaaactgtttggctgaagcgagcagtatcgtctccaataatggcaaaatcgttcagaacatgattcttctgttgaggaatgtcgaatgcggtgaggtcgagattcagcttgaatggattgatattccaggttctagagggctttgaacatatctctttctgtgtgtaataaaaaaaaaactcagttcgttttgggtttttagacaaaagtcacaataagtagaacagagtactactctgttttgtaattgaaatatttggttttagcacctaacctaaatcgttttggtttcccgcgagtttttttattctgttgtttgtttgcagatgaaaaaaaaacgtggagaagaaaaaaacaaaaacgatctaataagcttggaagtttgcttgcagatattttttttttgaaaatttttgtggttaaacatgtgaaaatgcagagatattcaaacgtaaggttatggttacatctagtaacgaatcttatccatctccaaatcccaaatttgaaaaacacttccaagggaaaaatcgcggatacatacaagattgcaaatatctaagcttggaattatatttgttttctttctttggatctctgctttcaagtctgaaacttgaactctgtttctaatttacttcaaaagctatg

SEQ ID NO: 21661 - DNA, 3003 bp, Unknown; identical to SEQ ID NO: 21660
  misc_feature (1)..( 3003): 2750-1469P.txt file - cDNA_ID_1989708; gDNA_ID_1620835; Annot_ID_169839

SEQ ID NO: 21662 - DNA, 3000 bp, Unknown
  misc_feature (1)..( 3000): 2750-1469P.txt file - cDNA_ID_1989714; gDNA_ID_1971889; Annot_ID_58455
ccttggtttcaattcaaattaaatgtcagttttgacttttgactaatagttttgtttaccaaaaataattatcgttttatgattctatacctttaaattaagtgaacgaattacagaattttagtactcgatcaaaaacaatactaatacatattgaacattgcattaaattttgttttatccctaccaaaataaataaattagtttcattgttacttgaaaaatgcccaacctaacgttaaaacacgtagtagtgattattgtttacaacatttgtccaattattaaagtcaaacaatccataaactgtttacgctaaaacttgtgattttgacggttgcgggattctagatgatcattggtcaccttgtacccaaagaaatcctattatattattttggaaagtacatttgaaatgtaaccttaatttttgtaattaattacatgacaatgatattagaaaaatttaatcaaaaacaaaatcttttaatgacgttattaaggttaccaaaattcatttaacgacaatattcatttcttaattatagggcttattggatctaaagacgggtcatcaaagattttctaaactgaatcaaaatataccgaatattcaaatatttatctcttaccaaatataaacaaataagttcgtaaaacaatttaatattttatatacgaaatcaattaaatcttaattacataaaaattagcacaaaaaaaaagtattcaacaattacaattttatcaaatctctctgttatataagttttgataatatattcgaataaagtgtaatataacttttcaatttgtactctttaactaatttaagctaattaatatatttgttaatcttatacctatcaaaaccgactatcgtttcttatctctatagtatttttgcaagactttttggtggattttggtaaaagtgcattcgggtcatatggtacattctcctattaaataaatatggtgcactcctatgttattagctaaaatatttagattataattagagtcatatcataaataaaattaatattattaaataaatggctttttggcaagacagatttggagaaatggggttttgaatcaacaataataaaaaggtaaaatataattaattcacaatacgggttaaatctttaatttattattttttaagaccactaatattaaacatatcaaatcatcctaatttagaaaaggttatataaaaccaaaaaattatgtggtatgtataatgttactatatataaaattaaactataaaatataaatgtattagagaatgatgcaatttataaaactcttatatataataaataattcttaaattttaaaaattactactttaaaaaaaatcacgggacaggtaaagaaattacagaacgggttttattttggaattgggttatatggtggatgtatttgaatcaatatttataaaattttaaaatattattaatatactgttttaagaagggttaaaacttcagttttttaacaattgtctcatggattcgtggtatagcgttacttaataacaattataaactgtaaaatataaatattttataaaaataaaatttgtaagttttaatatatattacctttaaaaaataaatagtcccgcggtatatcgcaggttaaaatctagtaattatatattatgaataaaataatttagataaagttagagatcaaatcctattacatctagaaaaataccagtctatatatttgtgatttttattgttgtaacaattgtggtgattagtttacgattttaaacatatcaacaacaaaaataattcagaaaagaaaacgcactcaattaatatagtttttttatagaatgaaacttaaacctttttacacgtataaaatgctttttagtgtaacggttaagacttcatcttcagataaatattttaggaccttaatatataatggtaactttaaaattgttctagacgacggtattattaatattatcaaatacttagtacaacgaatcaaattgactggaactataggaatgttcgaaatggaacatgatccaacaaatatcatacgtggtggattaacttgcttcacatataatttgtgctgaagtccaaataataatatacatggattctggaagtattatagttgggtataaagtcttgttgcatttgcatttatttcttgtacgcaatgcggctaagcaactttcattatccttaccataaaaagaacaaaaacaatcgtatcatattctcactctgcacgaaaagtcaagtcacgtaaattgttaaaagattggggatttgaatattgtatcagaaaaatgttatttaatctacaattttaaactatattaaaacacataattaactaagaaatcctttgtaatctcttaaagtcactaaaaatctaatgcttaaaatatttccaatcacaatgaattttaaagttttttttaccaaatcaattgttctatattactatattttataactttttaaaactctatggttgaataacataatattttgttttaacacaaatcattttaaatggtagattgaatacacttccttagttttgaaaaaatacactaaaagtatgaaatgatgttttttttttaattacaaaacgataactcgaaaacgatggtttaatgaaattatttgatgaaataaagttatcataaacatccttaatctcttcttatacatgtcaactttgaccatgacatgaatggatcgcattcccaatttactaacacaaaaaaaaatgaggaaatacgaaaacagtagtataaaaatagagcaaagccggtgagaaaaaacaagaaacacagaaacagaacataaattaaagaagactcacattcaagaatctctctcttctcctcctctcattctctcagcggcttcttcttcttcctttttctttcacatcacacaacacaaccactgtgatcttgatttgttaccaatg

SEQ ID NO: 21663 - DNA, 3000 bp, Unknown; identical to SEQ ID NO: 21662
  misc_feature (1)..( 3000): 2750-1469P.txt file - cDNA_ID_1989714; gDNA_ID_2684202; Annot_ID_191245

SEQ ID NO: 21664 - DNA, 3000 bp, Unknown; identical to SEQ ID NO: 21662
  misc_feature (1)..( 3000): 2750-1469P.txt file - cDNA_ID_1989714; gDNA_ID_1971889; Annot_ID_176803

SEQ ID NO: 21665 - DNA, 3000 bp, Unknown; identical to SEQ ID NO: 21662
  misc_feature (1)..( 3000): 2750-1469P.txt file - cDNA_ID_1989714; gDNA_ID_2684202; Annot_ID_137219

SEQ ID NO: 21666 - DNA, 3003 bp, Unknown
  misc_feature (1)..( 3003): 2750-1469P.txt file - cDNA_ID_1989733; gDNA_ID_1620834; Annot_ID_57931
gatttctcagggtcgccactcagcgcatctacacgacgagtttctgagaaatattaaaagagaagactctaacaaacaatgtcttaagaatcaaaaggttctgcttgtggcagacaacgttactaaggttaaacagttagaagctcttgcaggggatttcagcagttttggtcctgggagtgttgttattatcactacagacaacaaggggttgttgaattcttatggtataacagatgtctacgaagttgagcatttgaagttttgtggaatcttacgatcattgggctttaaaaagagagctgctgcgttccagcgggctttgtgtagagcaaagagttttgccacggaatgtttttgttgtcaaagtagtagtatatctggttatgggaaagtgacagatttagtttaattaagttgaatcccttattagtcatatgcattaagttaagtaaacttaataagttgtgtggcttagaaataatattgttttgtctatttttggagtgggttgctcttggggtgtagaaaaatgtcactcttcattggattaagtaatatacatttttttgttccttagtttttaagacatttttttacatctggatgtgccagttgtttgtaatatactgttctttccttatagaaataaatattacacaattttttaaaaaagatttatgtatttgggagggttttttgatgtttggacatgcccaataaaattaaaaattaatacaggagacacaaagtcgctaactttccaaagttggaatctacatatgtctaaaacagagaagaaaagcttttaaactttttacatgacgatcctccaataatagtaatacactactacagttcaaagccactgacaagtttctcgcttttttcccttaatgagaaactcttttaacctgcttttctgatttatgctctttgggtacgtggaagatttcaatcacagactaacgtaattaaatcatttattggaaactgtgagtcaagctgaataaacttgatgcaaacgaatagatatgaaagaaattgggttgatcaacaaaaaaacaagccgacaaaaactgaatctcatgatatgttttcgtccgtcagttttaaccgttcgtttgatcggataatcaaaaccagtaaatgccaataatacacaccagaaaagtaagatgataatttttgttcgttagtagtattttattattatcatgctcatcattttcttactttggcggcccatcttttctcttcccctctttctgagtagtttagtaaaacagaacctgacagaaaaaaatagaaaatgccaggaaacacacacttagcaggaagactatgggagtctctaaccaatgcacatgctttatttagttcaactactctctagtggtctataaatatcgttgagttctttatttctattactcatcatagttctcaatagagagaatcaaaaatcaaaatgtcttctcctactgcgactaagtacgacgtctttctgagtttcagaggactcgacactcgtcgcaacttcatcagttttctctacaaagaactcgttcgaagaaaaattcgaactttcaaagacgacaaggagctcgagaatggccggaggatttctccggagctcaaacgcgccatcgaggagtcgaaattcgccgtcgttgtggtctctgtgaactacgctgcgtctccttggtgtctcgatgagcttgtgaagattatggatttcgaaaacaagggttccatcaccgtgatgcctatcttctacggcgtggatccttgtcatttgaggaggcagatcggagatgtcgctgaacagtttaagaagcacgaggctagagaagaagatcatgagaaagtagcttcgtggagacgagcattgaccagtttagcgagtatctccggcgaatgttcattgaaatggtgaaatttcgtagcgttggttagaaagattggatttttatttgatatgtctcgttactaaagtttcgatttttattttgttttctctctgtagggaagatgaagcgaatctggtggacgaaattgctgacaagatatcaaaaaatctgatgactgttacaacaataagcaatgggagggacctagttgggattgatacacacatgaaggctcttaacaaaaaattggatttgaattccaacaaaagtttgagagtggttgggatttgggcaagaggatacaatggtagatcagctttagctaaatatgtttatcaagacatctgtcattggttgaaggttggttggttgaaggtttatcaagatatcaagacagcttccaaactttatgttttaactcgttggttgaaggttgcacatttgcttcatagatcacatcactcttttaaaactgagtagccagccaatcaataacccgaatttcactgagaaatccccacatttgttatgtttccatactacaaaatcatctattgacaccactagttagctgtgatcttataaagatgagtaagccaaccaaaccaataacccaaattggaaaatgtgagtcaagccgaataaacttgatgtaataacctattcgttctaacttgaaattgttattaaaatcatccttatcaattagcctttctcgtccgtcaattgacttagttctaaccattcgtttgatcgataatcaaacaaacagttgaatcttcttcaaccaattaaattagactacgagtaactaaatgccaatacacgagaaaactagactaagaggagaatttgtgttcgttaatatgttatccatactcattatcttattttggcggcccatctattctcttccctctttctgagtagtttagtgaaacagaagctgacaagaaaaaatagaaaatgccaggaaacacacagttagcagtaggaagactcttataggtcaacttctgtagtggtagtgcctataaatatccttgagttttttatttctatcactcattgagaatcaaaaatcaaaatg

SEQ ID NO: 21667 - DNA, 3003 bp, Unknown; identical to SEQ ID NO: 21666
  misc_feature (1)..( 3003): 2750-1469P.txt file - cDNA_ID_1989733; gDNA_ID_1620834; Annot_ID_169794

SEQ ID NO: 21668 - DNA, 3000 bp, Unknown; identical to SEQ ID NO: 9018
  misc_feature (1)..( 3000): 2750-1469P.txt file - cDNA_ID_1989734; gDNA_ID_1971973; Annot_ID_58675

SEQ ID NO: 21669 - DNA, 3000 bp, Unknown
  misc_feature (1)..( 3000): 2750-1469P.txt file - cDNA_ID_1989737; gDNA_ID_1971948; Annot_ID_58600
aaatctcgcaaagtttctaatttattatatcacttttgctccttactattttaatggaaaaactgtgataattacatgtcaatcactgaatttgaacagtaattataattttctataccgcacaacatatgcttattttggttttgggtactgtcttattagttacatacggtttaggttggcttgtttgtttgttttgtcctagctaatcacgttaatgaaaacgctctaccaaataaccgcgtttagaaaacgctattagttaccgagtgtggttgggaccgagtgaggacgtcacggctccaaccaatccgcaaataaggaagcgcgtgtgtgtaagtagtgggtgaccactttgcctagtcttaaacgttaagtctggaaataccaaaactacccctggtttggtcgaagattctcacgcccctaccacccaacccaatcacaatcctcgtgaacgaacacaccaccttctctccaatctggatctggttcctcttcttcttggtctcttctccatctcatcggagctgatctcgaattgttctccgttcatttgttacggtggagatgacatcggatcaccgcgacgctcttttctctctggaactggaatcgcctgatccggacgaaggaggtgtagcagacggaggagaatctgataccgacgaggatttgcgcgacaacgatgatgttgttatgccgggaacgaacgaagctgaagctgaagacgacgatcccgaagaggaagatctcaattctccgtctacatcatcactccccatggtttctacgatctcagcgactgctgttgtttccgggaccccgacggcgacttcctctacaggcgccgtgaccgttgcacttccggctggatccgccgtccctgtctccgtgattcccgttgattccgatccgaagtggcaccgtatgacggagatcgtccatcagagaccaccgatcgatgattctagacgccttttccagaggctgtggacagacgaagacgagatcgagcttcttcgtggttttctcgattacatgacgatgcaccgcggaagcagctcgcatccgccggatacggcgccgttttatgagcagataaagtcgaaacttcagctggatttcaacaagaaccagctggtggagaagcttcggagattgaagaagaagtacaggaatgtgatgagcaagatcagctctggtaaagaggtattcttcaagagccctcatgatcagtctactttcgagatttctagaaaaatctggaaccaaactgggaaaatcataggctttgaagataacaacgtaatggatttcgaagaaaccaataaccatcataacaccaccaatggtaactactcaacctttaacagccctagttctaatcctactctggagctcgactccgaaaatggaatcgagaagaaattgacaatgagtagcagtagcgtgtcgagaaaacgatcacgatcaagaattgggaagattgaggaagacaacaaacctgtcatcactccctctgatgggccaatagctagcaatgtcaacctcaacgaagctgcagctgttggtattggaggaaatctcgggggtttgatcgaagagactgtgaaaaactgtgtctctcctgtgatcaaagagatgatgaatgggacaacaagtatgatgatggctgcaatgggaggagggtttccgggtcttggtggtggtggtggtggtggtggtggtcatggttttggctcgctaagccccatgtttacacggccgttcaatttcggttttggtgtagagggaggaggaaacaaggcggttgcagatgagcggtggaggaaacaacagattctggaattggaagtgtattcaaggagattagagttggttcaagagcagattagaacgacattgaacgagttaaagacgatgccgagtggtatatgatgaagggcgagaagaataagacaacaaggaaccatttaggttgatatttgatatctttgagttaaccttctggtgtgtgagtgagtatagtaagagatttggatctttttaagttataaattggtaaggtattgtgatctttctctaggttttttcatcattttgatttttttttcttcttcttatctttaaattatttgtcaatagggatgaatcataggaggggggtttgtgtataaccttttgtattagattatagttcttttttcgtagaatcatttgttcaataacaaacagactttctagctgtttttctttcaaaaagaagaaaaataataattctaaattgtgtgctactctttctttgtctaataaaatctgtaataacatgtttatttctagatcggatactgttattgaagtgtattaaactttgacctctttctttatcatgttgattaatgtagttacttaaaaacttttgtgtttgaaaaaaagaaccaatgttgtgtttcttgctagtacgcatcagaagattcctttcctgattaagtaaaaaaaaaaaggcataatcaaaacaatttaaagattcaagaaggcagaaacttgtccacgtgacgaggcaaagaatgttaggtaggtttgttattgactttatagtttatacaatgattttaacaaaatacctatggaagatacatgattattttttataaatgtataaacgagtggatatatttggtggtggatgatggtgtgtgtgtatatgcaaataattcactttataaaagcttatcgctaatttgacagaacactagaacagttctctctttttgtcgacagtcttcttcttcttcttcttcttcgattggatctggaactggtaagctcttctataagtctctggttttgtatctttcgaactgttcttttgtttctctctccaaaaatttcaaactttcataatttcgcctcctcaagttcgatttcagctcaagaacacgaatgcttcactcacttgtttcattgttaaatcttatatttagtttgatactcatg

SEQ ID NO: 21670 - DNA, 3003 bp, Unknown
  misc_feature (1)..( 3003): 2750-1469P.txt file - cDNA_ID_1989739; gDNA_ID_1971953; Annot_ID_58662
gtttcatggtgcgattcaaatgtaggtgttctttacagagatgctggaaatataactatggctatcgatgcttatgaggaatgccttaagatagatccagattctcgcaatgctggccaggtatctatactttagcgtggtcttcttgttatgaggttgaaagatatatgtgtttaaaaccttcttgtccccttttgtagaaccgattgcttgccatgaattacataaatgaaggactcgatgacaaactatttgaggctcacaggtaagcacatatattattaatgtagatttgtattatgttgcttttatgggtcttacagtgaaaaaatcttctgaacacagagactggggttggcgcttcacaagattacaccctcaatacacttcatgggataatctgaaagatccagagcgacctatcaccattggatatatctcaccagatttcttcactcattcagtatcttatttcattgaagctccccttacgcatcatgattatacaaagtacaaagtggtggtttattcagcggtagttaaggtaggatttttacctatataacttatatagatacattttccctctaagcaattcatttcctggttctcgtggcatttttcccttttgagcaatcattggtctctcatggctttgcaggcagatgcaaaaacatacaggtttagggataaagtgttgaagaaaggtggagtttggaaggatatatacgggatagatgagaaaaagatagcaagtatggtcagagaggacaaaatcgacattttggtagaactcactggtcatacggcaaacaacaagttgggaacaatggcctgcagaccagcaccggttcaggtgagaggatatattaaacctatctcattttgttgtttcgggttttgcctttgactttccatttcaagtgtacttatattggctaagataccaggttacttggatcggctatccaaatactacgggtttgcccactgttgattacagaattacagattcgttggctgatccaccagataccaaacaaaagtacgttttggttcaagatgcaattttgggtttcggaagtgctccaaataaaaatcttaatttttatttatttattttgtgatatttgattgcaggcaggtcgaggagctggttaggcttccggactgttttctttgttatacaccttccccagaggctggtcctgtttgtccaacacctgcgctttctaatggctttgtcacatttggtagtttcaacaacctcgcaaaggttaaaaaatttgtgtccttggattatgcacaccaatctcccctagtatctctttcaatgttttgacaggtttatctctgtttgtgcaaatcagataactcctaaggtgctgcaagtgtgggctaggatactgtgtgcagttcccaattctcgtctagtggtaaaatgcaaacctttctgctgcgatagcattaggcagaggtttctcaccacgctggagcagcttgggttagaatcaaagcgtgttgatctcttgcctttgattcttttcaatcacgaccatatgcaagcctattccttgatggatattaggtaagatttgacacatagtgctctgtaaaacaccgaggcttatagattcacatatttaatttacatttattgcagtttggacacattcccttatgctggaactaccactacctgtgagtctctctacatgggagttccatgtgttacaatggctggctcagtacatgctcataatgttggtgtcagtcttctcactaaagttggtaagctcttagcaaaatttttttttttttttttgcaaaaattgttgttagtcggacatcttttagctaattcagccatttcttgattcaggattaggacacctggttgccaaaaatgaggatgagtatgttcagctatctgttgatctagcctctgatgtcacagctctttctaaattgagaatgagtctccgggatctaatggctggatctcctgtttgtaatggtccttcctttgctgttggtcttgaatccgcatatcggaatatgtggaaaaagtactgcaaaggtgaagtgccgtccttaaggcgaatggaaatgctgcaaaaagaggtccatgatgatcccttaatctcaaaagacttgggaccatcaagagtcagcgttactggagaagccactccgtctctcaaggccaatggttctgctcctgtaccttcctctttaccaacccaatccccgcagctctcaaagagaatggactccactagctagataaccagcaaatcgagctgctgcgaaatgccggcagagagtcttgacccatctggaaaaggtgtgaaagaaagagtcgatgagcttttcctgctatttacttccaagacaataggaactagactttagattactgcttgtgtagtaaaaagaatagtaaaaccagctctttcttttgttgtatctctttctactcttagtttagctttacatgattcttgggaagtcgttaggtggtagtggatttggagtttttcttctcatttgagagatcaagttgttgtgtatcgattagggttttaaggctttttaggatgttttcatgtgttggattttgactcatatgatagtaaatatagttatagaaagcttttcggtgcctttacctatttcataatataattatctaaaactcctgcttaagcttaatcccataggtgagacccaatgaaagacttttgacttgtatgattatgttgccaactccatatctctctttaattaattaatatggagagagtaaaaaggcaagcaactaactactcttcaattcaacacttcttctgctccattgcttccaccagaaccctaaagaccttataaaacccaatcccaaatccctttgctcattcaccaccaaagcatccaactttctttgcttcctctttcaaagcaacacaaaatattaaatctcaagaaacaaagtaaagaaaaatg

SEQ ID NO: 21671 - DNA, 3003 bp, Unknown
  misc_feature (1)..( 3003): 2750-1469P.txt file - cDNA_ID_1989739; gDNA_ID_1971953; Annot_ID_177407
ataactatggctatcgatgcttatgaggaatgccttaagatagatccagattctcgcaatgctggccaggtatctatactttagcgtggtcttcttgttatgaggttgaaagatatatgtgtttaaaaccttcttgtccccttttgtagaaccgattgcttgccatgaattacataaatgaaggactcgatgacaaactatttgaggctcacaggtaagcacatatattattaatgtagatttgtattatgttgcttttatgggtcttacagtgaaaaaatcttctgaacacagagactggggttggcgcttcacaagattacaccctcaatacacttcatgggataatctgaaagatccagagcgacctatcaccattggatatatctcaccagatttcttcactcattcagtatcttatttcattgaagctccccttacgcatcatgattatacaaagtacaaagtggtggtttattcagcggtagttaaggtaggatttttacctatataacttatatagatacattttccctctaagcaattcatttcctggttctcgtggcatttttcccttttgagcaatcattggtctctcatggctttgcaggcagatgcaaaaacatacaggtttagggataaagtgttgaagaaaggtggagtttggaaggatatatacgggatagatgagaaaaagatagcaagtatggtcagagaggacaaaatcgacattttggtagaactcactggtcatacggcaaacaacaagttgggaacaatggcctgcagaccagcaccggttcaggtgagaggatatattaaacctatctcattttgttgtttcgggttttgcctttgactttccatttcaagtgtacttatattggctaagataccaggttacttggatcggctatccaaatactacgggtttgcccactgttgattacagaattacagattcgttggctgatccaccagataccaaacaaaagtacgttttggttcaagatgcaattttgggtttcggaagtgctccaaataaaaatcttaatttttatttatttattttgtgatatttgattgcaggcaggtcgaggagctggttaggcttccggactgttttctttgttatacaccttccccagaggctggtcctgtttgtccaacacctgcgctttctaatggctttgtcacatttggtagtttcaacaacctcgcaaaggttaaaaaatttgtgtccttggattatgcacaccaatctcccctagtatctctttcaatgttttgacaggtttatctctgtttgtgcaaatcagataactcctaaggtgctgcaagtgtgggctaggatactgtgtgcagttcccaattctcgtctagtggtaaaatgcaaacctttctgctgcgatagcattaggcagaggtttctcaccacgctggagcagcttgggttagaatcaaagcgtgttgatctcttgcctttgattcttttcaatcacgaccatatgcaagcctattccttgatggatattaggtaagatttgacacatagtgctctgtaaaacaccgaggcttatagattcacatatttaatttacatttattgcagtttggacacattcccttatgctggaactaccactacctgtgagtctctctacatgggagttccatgtgttacaatggctggctcagtacatgctcataatgttggtgtcagtcttctcactaaagttggtaagctcttagcaaaatttttttttttttttttgcaaaaattgttgttagtcggacatcttttagctaattcagccatttcttgattcaggattaggacacctggttgccaaaaatgaggatgagtatgttcagctatctgttgatctagcctctgatgtcacagctctttctaaattgagaatgagtctccgggatctaatggctggatctcctgtttgtaatggtccttcctttgctgttggtcttgaatccgcatatcggaatatgtggaaaaagtactgcaaaggtgaagtgccgtccttaaggcgaatggaaatgctgcaaaaagaggtccatgatgatcccttaatctcaaaagacttgggaccatcaagagtcagcgttactggagaagccactccgtctctcaaggccaatggttctgctcctgtaccttcctctttaccaacccaatccccgcagctctcaaagagaatggactccactagctagataaccagcaaatcgagctgctgcgaaatgccggcagagagtcttgacccatctggaaaaggtgtgaaagaaagagtcgatgagcttttcctgctatttacttccaagacaataggaactagactttagattactgcttgtgtagtaaaaagaatagtaaaaccagctctttcttttgttgtatctctttctactcttagtttagctttacatgattcttgggaagtcgttaggtggtagtggatttggagtttttcttctcatttgagagatcaagttgttgtgtatcgattagggttttaaggctttttaggatgttttcatgtgttggattttgactcatatgatagtaaatatagttatagaaagcttttcggtgcctttacctatttcataatataattatctaaaactcctgcttaagcttaatcccataggtgagacccaatgaaagacttttgacttgtatgattatgttgccaactccatatctctctttaattaattaatatggagagagtaaaaaggcaagcaactaactactcttcaattcaacacttcttctgctccattgcttccaccagaaccctaaagaccttataaaacccaatcccaaatccctttgctcattcaccaccaaagcatccaactttctttgcttcctctttcaaagcaacacaaaatattaaatctcaagaaacaaagtaaagaaaaatgaagaacgaatctaccttcattgatgtccctgcagaatccagctcagccatg

SEQ ID NO: 21672 - DNA, 3000 bp, Unknown; identical to SEQ ID NO: 9054
  misc_feature (1)..( 3000): 2750-1469P.txt file - cDNA_ID_1989740; gDNA_ID_1971974; Annot_ID_58721

SEQ ID NO: 21673 - DNA, 3003 bp, Unknown
  misc_feature (1)..( 3003): 2750-1469P.txt file - cDNA_ID_1989753; gDNA_ID_1620833; Annot_ID_57914
ttaagggatatgcggtacgcagttgctgcaactagggagttacttccgtcgttgatgaacgactactagttttctgtgtccaaatacttttctgaatcagttcatccgagatcttttttccttctgtaaaaataataatattttttcttctttttttgcagatttcttcttatatcacaagtattctctatggctagtctcttattatatgcatctattttgtctactgaagacataacttgcaacatttcttggagtttttggtcttgatcaagtatgttttttctgcctctctgtgattgaaactgtgttctttgaaaactggactcagattgattttagatgtgaatgactctaatcgaattagtactggttcttgttgatgtatctgactttcatttttaactttttatttcttacaggttcatccagttatcatctgtagctggatatgtgaagtgtcttcttgcgaacttatgtcttaactttgaaatactttgaataacgatgataatttggagtaatgatggtaatttgatcaaattgtgtttggctttttggtgtgtccatttgcagagatatattgctttttaataacgagaaaaatgttatttaataccctaattttcaaattataaccgttttatacgtcaactttatatatggtcattttaaacatgatgttatcgttgaccaccatttaaaccatgaatatttcgttgaccaggccaaaaaaaatagtcgttaacggattattcaactcccgttaacacctccgttaaccattctaaacgatgtcgttttcgttactataaatcatgttttacccttttataagcttttaaaatcccttgtaaatcattccaatgccacttacttatgcttaaaaaaacattgtaaaccatgctagccctttttaaaaatccttgtaaatcattttatgccacttacttatgctttaaaaacgatgataaatcatgttttacctttttataagcttttaaaatcccttgtaaatcattcaatgccacttacttatgctttaaaaacgattgtaaatcatgttttacccttttataagcttttaaaatcccttgtaaatcattcaatgccacttacttatgctttaaaaacgattgtaaatcatgttttacccttttataagcttttaaaatcccttgtaaatcattcaatgccacttacttatgcttaaaaaacgattgtaaaccatgctaaccttttttaaatcccttgtaaatcattttatgccacttacttatgctttaaaacgattgtaaatcatgttttacccttttataagttttcaaaatcccttgtaaatcattcaatgccacttacttatgcttaaaaaacgattgtaaatcttgtaaaactattgtaaaaagttttaaaatgatttacaaaggtttaaaaaggggttttaaagtatttacctatgtttttaaagactttataaagattttaagaggttttaaaatgatttacaagggtttttagcaattaccaaagattttaaaaaactttacaaggttttttaaaagagtttttaaaaaatttacaaggatttttaaaagcattttttttgctgggaaacaaaatttacgagaaaaaattttggcgggaaatttatttttggcgggatttttttttttttggcgggaaaaaaaggtttggaggtgttcttcaatgaataggggtgcttgatgaggcttgtattaaatggtagaagtccatggagaaatcgaagtgttcaaaatcggaggtgttcttcaatggaagctttactatggaaatgttttgtttcgttaaagatgaagaagaagaactttaagcgtatataagtatctgtgtttgtatagaatgacagagaaatctttgcaggtagagtggtcaaatgacctttgatttttctcaaatgataggggttcgaatcccaggtctgtcatttctttttaaagaaaaacgaaaacgacgtcgtttagaatggttaatggaggtgttaacgggagttgaataatccgttaacgactaatttttttggcctggtcaataaaatattcatggtttaaatggtgatcaacgataacttcatgtttaaaatgaccatatataaagttaacgtataaaactgtcataatttgaaagttgaggtattaaataacatttttcccttttaataactgtaaccaatatgtaacagaaatccatccaacccaatttgatcaatagcgtaaaaactcattattgttataaaattttaggtagtttacatcaaaataatatcattcattttttatactataaaaatagtatttagattaatatttaacaagaataagaataatttttatatatagatcatatcaatccacataataaaaagagaaaaactcaaatatgaaaaaaattcaagtaacaaaaatatattagaattacatttggttgattggaaaaaaaaaaattacgtgtaaaactatagtattatctgagaaacgaatacaaaaatttgcaacagtagcagcaaaacaaattcaaaacttgcggcaacgacaacagcaacaacaacaacgaaacaaacaataacatgcgaggcagtctcacggctagtggcagcaaacccaacagtttatctaaacgagaaccaaaatttactctcgttttttttttaatgttatcctttgatgaacaaaatgtattttccaaattttactttttttattttttaagtattatcccttaaaataatatatcttgcggaaaaggaatcggattaaataaattttaacggtagaaaataggataggaggagagagagaaggtcttttattggtttgaatgagattagtgaaggcagcttctcttctgatttcttcaaccaaacctccgtctagggttttttactcttcccatctccgccgcccttttttctctcacttccgtttttcttcctcttcgtcgacgtcttcctccgtcgcagtcatg

SEQ ID NO: 21674 - DNA, 3000 bp, Unknown; identical to SEQ ID NO: 8371
  misc_feature (1)..( 3000): 2750-1469P.txt file - cDNA_ID_1989775; gDNA_ID_1971785; Annot_ID_57992

SEQ ID NO: 21675 - DNA, 3003 bp, Unknown
  misc_feature (1)..( 3003): 2750-1469P.txt file - cDNA_ID_1989776; gDNA_ID_1971973; Annot_ID_58669
ctaatggcacagcttttatatcgtcagggattcgtgatcttgacagtgagctttctcctttttatttacacatcaagtctcatgaggataagagagtctggttttggggctaaaaggtttgtattttattacttttccagggatactaggtggtgggtatcctttgggaagcttagtaatggtaatggaagatcctgaagcaccgcatcatatggatctgttaagaacttacatgtctcaggggcttgttaacaatcaaccacttctttatgctagtccttcaaaagatccaaaagggtttcttggtactttgccgcatcctgcatcatccaaagaggataagcctactgcgcccgaccctgatcaggtgctactttcttgtctgtaccttcgttctgtttgcctttttcctggctagttaaaaattgggtagtgtgcacttttgtcaattctgtagggagagagcttgaggattgcttggcagtatcggaagtatttggaaaaccagaagaatgctattggtaatttagttagtgcggttatatattcatttgcatatcattcaagaataaattgagctactagtaagttagatatcattctttggaaacataatcctctttacctattctggatcagatgattactccaatgactttgatatgagaaagcccttggagaggcaatttctgagcggacggcccatagattgtgtcagtctgttagactcttcagatctttccattgctcaggaccactgtgctacgtttttatcaaaatttccaaggttgtgtggcatcctttcttatttgatctcaattactcgctctagtttcgaatcaataaattttgttggtcatacctatgcagcaaattctgctcaagctcaattctttttacatctctcttatacttccaagctcagtttgtttatattgttttagtttgttactgagtcagttattgttcaaattcttctcttatttactggctttgttaagtagattgtcctttttttcttaagaacctgtgtattgtttcccacagaaacagcagtaacattgcatctattggccgcatcgcaatccagtctttttgctctcccctgtgtgagtattctgaaaaggtaattaggagagttttctggaacttttagcctatatcaagtcaacaatgctttctaacgaaaattctcttgactctatagttaatgatagctgaagcttgtaccagtatcacgtcgttatgtattatattgttgattttttgacattttgtttctatcaacacaggaatcagacatgctctcattcataagattgctgaaaagtatgcttatggtttcaaatgcggtagccattgttactttcccgccttccctgctctccccatcttcctctaaaagactgcagcatatggcagataccttgctctctatcaaagcaatcccaggtttgctttccctgattttcttattcataaatagattatcatagttgtttcttgacaagtatccttgcctttttttccagatggtgacaaggaattggagaaactcctcactggctacaaggatataaatggattcctcaacatacacaaggttgctcgtatcaacacacaggtatttacaaattgtgtaattctcaatttatatagggatattattaccctgaaacctgtaagcaagaacccctttgtattttgccaagtcaaaaaaacatattcaatggataaaagtctgatgaaattcaaaatgtctactgaacaacttatccagaaatccccatctaatccatttttctctcttttgatgagaatgacatgaacttgcttagaaaccgttgaaaaaatggattcactatggtcctaaaccactggtttgatctgaattgtttaatggaacaggtgcctgtaattcttgaggcaaaaaccttctcaatgagcttgaagaagagaagattcttggctctagagtgtctgaatcaagcccctgtagacgggtccagtggaacatcgtatggcacatctggtagctgctcatccaaatccggagcactagatttttgagttgctgagttagtctttcttttcttcttcttagtttttttttttccctctccattgagttctctaagttcactcactaacctgagcagttacattattattatagtctttggtcttaaaaacagttttgacagcaatatgttttgtttttataatgaaatttatttcatttctgtattatatatactcttatgaaactatgaccaatgatagatgctagttactaaacgttcaatgtaatcacttcaacatgttcacgtggttatttgttgaaccatccatatatataacatataaagaaagaaggtgagacattgaatgaagagttcaaaaatatggttgatctatatttggtgctcctttaattcagtgttcctttacttaccaaccaacgaccatatcatttgaattattgctcataaatctctctctctacccaatctctttatttagtaccctattcttcttgactttgtttctttccaaagcttatacaagagatattcattcttaaactaagattttcatatatattgaaaaagaaagaaaagatttctcatcattttactttttggtagagagcatttcaagtaaaaaatactttgagaaacaaaaagagaaaactagtatgagaaacaaatccttaaaaaaggaaataacagtaatgcacgtgatgatataacaaaaggttttgttttgtttgtttttttattgtttttttcttcttttatttgtctgttataataatcaaaaaacaagaagaaaaaacgagacgttcatgcatttaatctcgcaccttacgacaaagagtgagagagaggatcgctcaggtttgttcatcttcaccggacgattagcttttgcggtgggagaaagaacggcctgtcttcagctctgaaacagaggaacagagaggttaggaaggagacaatg

SEQ ID NO: 21676 - DNA, 3003 bp, Unknown
  misc_feature (1)..( 3003): 2750-1469P.txt file - cDNA_ID_1989792; gDNA_ID_1971889; Annot_ID_58466
tagctatggcggcggaatctgccggcggtggtttgagattggctccggcggccgaagtacatagcgatttgctaaaaagacgtttcatcgattggtttgttttattttgttttgaaaaaagtctttttaagtgacttcttgggtaatttggtgtagttgtatcacatttgtttaccgctaaataatgttttaaccgttttatggaacgtttctttctttttcagattgtacagagttagttggtttatgggtctaattgggcattctttggaaatggtctcacaagacattgtggagttcaaagaagagttcgacgattctcacaaaccaaacagcagagtcgattgctaaccaggcctttccatctaaaacatattggttataattgatgcattgcggtaggagtatagcgtatccgttgtaattgattatgaaaataataccaaagcgattaaaaagatactttcaccgcaccgttctttctatccgttactttataccacttttaattatttacatatcgttaaccgctttctctatctgcttaaatttttgtaccgttttatgttattaatcaaaccttgaatggatatgtttgtttttgtaatggtgtccaccaaagtttatttgatgagttacaaaaataattatattttaaagttttgagaaaaaaaatcatgtttgtgaactttcaattgattcacctcatgaagattttataagttctatatagattttgtgaatcttcaaaagtacaaatatatgtactctttttccaacataaatgtagtgaaaattttattttatgtgaaagaatgaaaagaaaccaagtgaaagaaattaatagacagtacatgtaattactgaatacgaaagataaaaagagaggagagtagtcattgtcagatagaaagaaagagcagacaaaaggatcgtaaaatcaaagaaaattgggtccctaaaaagattatgaccgtgaagacacaatattacgttttctgacaagacataaacacatcactcatcgcctttagattctcttccgaccctcacaagatcttaacaacaacaacaacaacatcaagatccgatcctccagattctcttctgtgtatttccttaaatctcctcctctttctctttcctatttatttatgtatctcactcaccgcttctgcctctctctctctctctctcttatttatgtaactcctcgtcttccttcttcacattgatttctgcgtcctttgacgttcaaactttaaacgtttcttcatctgttttgttgtttactttcccgagagaaaacaatggctctcagagatttatcttcttctttatcttcttcttcttcaccggagttacatgttcttgccgttgatgatagtttcgtggatcgtaaagttattgagagattgcttaagatctctgcttgtaaaggtaaaaggcaaaactgtttctctttacgttttctgcttttcttttgtttggtttctgattcgtttttttggataaatttggtgggtttctttatatagtgacgactgttgagagtgggactagggctctgcagtatcttggtttagatggagacaatggatcttctggtcttaaggtatatattcattcatttcttagaatctctctgttttctagcaaaatcaaccctagacgttgaaacttgaagtgttcttatgctggtttggctcccaagaaatctaaggtttcacaatgtggatcaaaagtttaacctttagaggatgattttattatttgtttattgatgccgtttatatgaacaattttgcaaattttgataacaggatttgaaagtgaacttgatagtgacggattattcaatgccgggactaacaggatatgaactcctcaagaagatcaaagtaaatttctattttgtgtcatttattagagcaagatttgaataagctcttctcgtgttttccttacaaaaattctgttgtatatttgccaggagtcttcagcactcagagaaatcccagtagtgataatgtcttctgagaacatacaacctcgtatagaacagtaagtcactatagctaaagatacaaaactgaatcaatggatcttaacactgtaatctgatttttttgtctatcctctcttttgttgttgttgttgttgtagatgtatgatagaaggagcagaggagtttttgctaaaaccggtgaaattagctgatgtgaagcgtttaaaagaacttataatgagaggtggtgaagctgaagaaggaaaaaccaaaaaacttagtcctaagagaatcctacaaaacgacattgattcatctccatcatcatcatcaacatcttcatcatcgtcgtctcatgatgtttcctcccttgatgacgacactccatcttccaagaggatcaaattagagtctaggggttaaatgattgagctcaatcttttctcacgttttctcttgatttccttgtgtaatatacattatttttgatatatgcaactatgtaagtctagattctaatgctcaccttattactctgttttttttttttgttaaaacaaaaggagatcaatgtgaatatgatttaaacaattttataaaattaaatactttgcctacagtatatatattgtttcctacttcacaaccagatcaattagattctataatgtaacatataatttaaaagtacacgtaaaaagattttgtatatgatcttccatgtgacatacacgatttcacttgtatgtgtttataattcataaactttcaagcatcagaaaacaaaaaaaaacgaatataatctttgttggaatacattatctattactatattcctagttgtatagcagaggaaacttgtttgcacttacgtggcatcttatgattggttcagtgatgtctgttttagaccgttgagagacttggataccattgcggtcttatcccgaaactccaagaacacataattttttttcttggtggtctctccaatg

SEQ ID NO: 21677 - DNA, 3003 bp, Unknown; identical to SEQ ID NO: 21676
  misc_feature (1)..( 3003): 2750-1469P.txt file - cDNA_ID_1989792; gDNA_ID_2684202; Annot_ID_191256

SEQ ID NO: 21678 - DNA, 3003 bp, Unknown; identical to SEQ ID NO: 21676
  misc_feature (1)..( 3003): 2750-1469P.txt file - cDNA_ID_1989792; gDNA_ID_1971889; Annot_ID_176816

SEQ ID NO: 21679 - DNA, 3003 bp, Unknown; identical to SEQ ID NO: 21676
  misc_feature (1)..( 3003): 2750-1469P.txt file - cDNA_ID_1989792; gDNA_ID_2684202; Annot_ID_137231

SEQ ID NO: 21680 - DNA, 3003 bp, Unknown
  misc_feature (1)..( 3003): 2750-1469P.txt file - cDNA_ID_1989813; gDNA_ID_1620834; Annot_ID_57927
ttcttgtattcgatgacattcattgtttaaaggaaaacataaagattgacccaaataaagagaggaatacatcttgtaaaaaaaggaatgcataaaccgttgtaaagtgaaacgaattggagtatttatttttgcaccttatccttagtccgcttaacaaattaaaaaaaaaaaaaactattttagttgtctcaaatatttgggctttcttttgctttttagtctttagatcttttaacagttggctacaaacacttctagaactttacagatatagaagaataatggggaaaaaatgtaatgcttgataatcaaattcaaaggtaagaagtaaaaactaagaagaatggttcattgtgttctctttcatttttggatggacttttcattctgtttctagtttatgcattgctaggaaatgtgttgggccaaacttaagtagcccacaagaataatgcagaccaaaaaaaaaagcctgactattcgattaacggtcgacaaacattattccattatacactactttgacaaaaaaaaaattttaaaaaaattgtgtttatctaatgccaattcaccttcggtaatcactttttattcaacaaatagcattggaatcgtcaaaaatcaatttatccacaagtattttttttgttcaattatgcgtcaaaatcttatcaaacttgtatttaacattttgccattttttgaattttctttaaatacttgcgaaaacttttgtaacttgtgtttgtggttactctagtttgaatgtcttaccagtttccgtgtacaaaagtaaattagaaaaatttacagagaaatttcacaactttatcgacttttcaaactaaagaaatcagatcaaatgtttagcttatgactctttctccttatgagttggtaatatctttgactcttgctcttgaataagaaaaacaatgtatccggccaaaaaaaaaaaaaaaactgcatatgactttattgaataaagcacgaagaaattggtcatggccagttggccactttaaattgaatgatagtatagataatgaaaaatatttggtcgagattataactgtacgtacggtcgacgaacatatgactcggcaatgtatagtagcatacgttaactacgttgcgaactcgatgattgtctacagaacaaaacgtataaaatatgttcgaatctttcaacggcgaatactttcagcaaacaaaacgtttttattaaattataaggtacaaatacacaaatatatctccagattctgtgacgtcgcatgtgttatacaaaataaatgaataattactttagaatatatgattgcgacaaaaacaattccaagattttatccaaatttatttttcaactttaggatggttgattggttatatgggcgtttacacgtaaacatgtctctaaatgtaaatttcacgtgatttaaaacaattttctgatgatttaagataaactcggtttttcagcgtaaatttcacgtgatctagaaggatgtacggtggcgtctagtcctggtttggactatggctctgttcgtttgcctgtcgctggcgactaaaaccagcgacaacaaccaaaagttgttcgtttgcctgtcgctggttcagcgaccaaaagtagcgacagtcgccagcgatcagcgaccgcaatttttggtcgctgaaatttttagcgatcagtcgctggtttcagcgattagtcgctgcttttggtcgctggatccagcgacaagcaaacgaacaacttagcgatcaaaaaatataaattaataaataattaaaaataattaaattaaattaaatttaaataaatgtctttttgcactctgaacggttgtgtcttttaatcgcaactttttgtaaaaaatattgacggttgttttttctcgcttgtgtcttttattgcaaccttcctatattgtaattctctgtcaaaatatttacggttattttttccggttagttatatatatactattgaataactacaaaatttataatatgcatcatttggagttagatttgttttaaagaaattattatataaacaaatttataatatttttctctgcgatatcacgaagggtttgagttctagtttaattaaaataattcttattaaattaagttaaaataaattaaattcaaataacataaactaattatagtaaaattaaatttgataaaactaaaataaataaatatattaatttatttttctcatggtgtaggatatatatgatttatattttgattttaaaatataaattagcaccaaaataattaatttaaaaaaaaaatatagcgactgtttataacgacaatcaaacgaacaacacatcgacaattattagcgattgtcgctgtaattggtcgttgaatctagcgacagacaaacgaacaatgtatgttgtcgattgttgctgtcgctggatccagcgacagagaaacgaacagggcatatgccttcgaaaatatctcatgttagggttaggccatgcaaatatattggacacttattttattttaatatgtggtctgaacttatttctttttgaacaaaaacaagaatattgttgtttaaaatttccatgaaatgattaagcaatacatatacaccacagaaaacaaactcagcttcttcttagctaagcaggcttaaggggcggctggacttatctataataaaaatttgagtatctaaacgaataaattggagatattcttttagtgttatcctaattatagttataaaacaattataaccttagaaagtttcttggaaatttaatggtaatttcattaccgtaaatagtttttctttcttcttcacgttttttttttttttttgttaaacttcttttctttctctataaaaactaaaaagcaaacttctcctttttggtacacttgccaaatgctctcaagctcaaattagcccaataaagagagaaaaacaaaacaataaaaatattaaaaatcatg

SEQ ID NO: 21681 - DNA, 3000 bp, Unknown; identical to SEQ ID NO: 9105
  misc_feature (1)..( 3000): 2750-1469P.txt file - cDNA_ID_1989814; gDNA_ID_1971984; Annot_ID_58747

SEQ ID NO: 21682 - DNA, 3003 bp, Unknown; identical to SEQ ID NO: 20464
  misc_feature (1)..( 3003): 2750-1469P.txt file - cDNA_ID_2024808; gDNA_ID_1620741; Annot_ID_166464

SEQ ID NO: 21683 - DNA, 1956 bp, Unknown; identical to SEQ ID NO: 2204
  misc_feature (1)..( 1956): 2750-1469P.txt file - cDNA_ID_2024817; gDNA_ID_1620502; Annot_ID_158941

SEQ ID NO: 21684 - DNA, 3000 bp, Unknown; identical to SEQ ID NO: 7169
  misc_feature (1)..( 3000): 2750-1469P.txt file - cDNA_ID_2024838; gDNA_ID_1621130; Annot_ID_172456

SEQ ID NO: 21685 - DNA, 3000 bp, Unknown; identical to SEQ ID NO: 8816
  misc_feature (1)..( 3000): 2750-1469P.txt file - cDNA_ID_2024857; gDNA_ID_1971893; Annot_ID_176869

SEQ ID NO: 21686 - DNA, 3003 bp, Unknown
  misc_feature (1)..( 3003): 2750-1469P.txt file - cDNA_ID_2024882; gDNA_ID_1621093; Annot_ID_170812
tatttttttcttaaaggtttttaaattatatattgttgactttattatgatgtgctttaaaaaaaaacaatattgtgattttgtaattgaccatgaatatgagaggttttggaatataacatataggtgaactactagccaattgttagtcggattactggtttaataagatgatcagaacaactaaacttgtaaacttccatcgattacaacaatcttgtgaggctaacttgaagtagttcaccattttggttggtgaacactatatatgtcaatttatgttctctaatatatattttcttgtttggttttctcaatatgtgttgtcgagtcgaaagtgattaattgatcgagctcaagatcttgctattaaggcgaagtaaagattgcaattcatattgctgtatcctaacaaatgtgatggtctcttatcgttctaacatctctctttcagatttatataaaaatatatatattgtctacaaaactcattcatccacatccaaaatttaaaatttggattattacacaaaagtagataaaccactagacaaataatatctagtcgaattaattaaattactcgtctaaattattagctttttagatatatatatctaaactaaggactaaagctagttagtgtaaatttgacttttttttgttctttgaaactatgtgtaatatctatttttttgtaaatgcaaagataatcgagtaatgaacatgaaaactactatattataaggaaaaaaatggtatttaaataaaaaaatatgaatagtgattgaagaaccgtacaggttatgtttgtgcagggagaggggtcgcgagtgcgtgggtcgggtacagaggatgagtcagtgagtcaggacctgtttccccctttgtagggacacttttaccatcctttaatgggcctattcttttcataggcccatttaaatcatatcagtcagtctttttcttgggcctcatctttgttttgtggttcttgcgatttgaactatctgatggtgactacaattggacgaccgcagaacaacccaaccgtatatgctgtcttttgtgggcaaatcttttttattgatatggattgtctcaaaataagtgatagaagtccgatataaagcataaaacaatctctcatgatcaaccattaaaagaaataaactagcaacaacccatgttcctcttactgacatacatacacatatagtcaaagatttatgcaataatttggactttattaaaaatatttacaaaccatatagacatatatatagtcatttttgatatcttggtttcaaaatctttctagatctttagttccaataaactttcaatttaaaagcggttttctaaaaatccgaagttggccaagtgatatattagtcctgtccaaactgacacaactcacgaatgtggtacgggttgaaaagccttaggccatgttcgtgaggtaaagatactcgcggtcgatcaactttggggaacgaattcgttcttggaacttttgttgattgattacgggcgtcatacgtgacgcccctgttcttttttatttttaggacggtttgggggtgttacaagagtggtaccaaaagacgacgaatatattgactcatatcttttatatcttagcatagtttgctttttcacttttaatgtgagaattctaacatgcacatttgagataatgaatcattttcactcatcgttttggatcgaacctcgttttgtttttggtttggtcataactttttaacttgaaaaccacttgagagtgagtcgactgatttatatactccttatattttactttatatcccatatttttttatgatgtaagattcttaacatagtcaagtactcataatgatctagtagttgaatgatttacgatgattcgaatcattctacttcgattgagggtgtacactaattagatcctattatatatgatataaactgatatatataagaattattatataatgcaaaaaatgatcataagacggacggtgtatatttattttgaatataatacaaaattatcatatgtccaactccagattcgtgtgcatgtctctacgtatctccggatacgatcatgctataagagtcaagacccctacacgatatgacaaaacgagtaggaaaaacgtgacaccaaaagatattaaaaagctgaaactaatatatagaaatgaaaatgagagatacatatcaacattatacaagaaagaaaatgaataaaataattgtaatgtaggactgaaaacctaaaaagaaaaagaaacatcaaaaggttgccaaaataaaaaagtaacatgaaaataaaacctgaccagaaatttccataaagcccaacctatttattttgcctacactctgagccccactcattagttgctcaactattttaattccttgtcataattgttatttaagaacctttataactttcactttcagggtatataatctctatggatttaaatggagaaaaccccagtgaccatagtttgatttaaggaagggaaagttataggaatggattatgaaatattataaattttgcatattaatgcaaaatatctatctttataaaacatacttttaaaaatatataatgttaagaaacaaaaggaggttaatattaagtgaagactctcactaaagtatacaaatgaagagatataaaaagcaggataaaaatagagtcaaaaagaaagaaaacaaaaacaagacatagcaatttgaatttaatatttggattccaaatccaagctcatgggtctattctactgttcacagtcacacacacactctctatctaagcttcttttgacttaagaccaaaatgaataaccccaaacctcaaacactcaaacataaacccaaaaaatctctctcacagagaaaaataaaacacacaattttaaccacaacacttgtctctctgctaacatacgcatcctctccggttcttgactaatg

SEQ ID NO: 21687 - DNA, 3003 bp, Unknown; identical to SEQ ID NO: 21686
  misc_feature (1)..( 3003): 2750-1469P.txt file - cDNA_ID_2024882; gDNA_ID_1621094; Annot_ID_170836

SEQ ID NO: 21688 - DNA, 3003 bp, Unknown; identical to SEQ ID NO: 21686
  misc_feature (1)..( 3003): 2750-1469P.txt file - cDNA_ID_2024882; gDNA_ID_2926160; Annot_ID_198719

SEQ ID NO: 21689 - DNA, 3000 bp, Unknown; identical to SEQ ID NO: 1917
  misc_feature (1)..( 3000): 2750-1469P.txt file - cDNA_ID_2024884; gDNA_ID_1620467; Annot_ID_157947

SEQ ID NO: 21690 - DNA, 3003 bp, Unknown
  misc_feature (1)..( 3003): 2750-1469P.txt file - cDNA_ID_2024889; gDNA_ID_1620356; Annot_ID_154489
taataatatttcccacacatattttttggattattgaatcaattcttgatttagatttccttacactactctaaagtcttataaactttaaagcataatgtaataaaactaacgaaacacaatacaaaatgggaaagatatcagtaaaaagatatacacatataaaacatttttttgatcgatacacattaaatttttgtaaaagaaaaacgctatttatagcaatacattaacgtcgacataaaaatctttgattataagaaaaaaagaaaagaaaaaaaaaaactttgattatatacacgtctctctctctctctcacagaaaaaaatgaaaaaagaagcattagttcccaaactcacatctgaattgcctccgtttacactaaaagaccatccgaagtttgtcgtcttagtggtcatcttgttctgtatcgctttcttcattgctatgaccttttgcgggtatgaacaagataaagaaaaagaaaactatgtcccaaatattacaataccttctatggatttcacggtccttaatataaccgagactcatcttagtgtaaaatgggatttattgttaaggatccctagagatcttcctggttggtatatgtgtctcaaaggagattttcagctttccataatatacagaggtgttaccattgctacttcatccatagagaggttaaactttttttctattctattgtctatattttagaatttttaataatttattcagcttatttgttcacatatttttgtgttattccttatcatgattgatcagttacagtctgataccacggtgggctcagctgattagggtttcatcgattgcttctgaaggagacatggagggtgtgattataaaagatattatgaaggatatcaaggaaaaaggtgaaataaggttccgatcgcgattgcttcttccggattgtagatatgggacaagtggaaagatgaactatgcgtgtgatgaagccatgttaaggttcgagcctggctctcaaaggaatgcaactttgtttggagaccaccctatttgccgctatcttcgctaagtacttttcatcaatagtttgttctttagtttgtcaaatgatggactttctaaattcttttgcgttttgatatggacttgctttacctaaattaaattcctataaattaattaatggaatatatttcttctagatgttaagtgttgaacattcttaattctctctctttacgaacaatagatatgttctagagcaatatcatggagttgtacgtggtgttatgatgatttctacacgaggcatttatccttgacggacaagttgcaattattttcctccatgatattcaatttttgggatggtattttcattctccacaaatgttgcatctatgagatcaatatgcatgcaagatctctaattaatggtgtggtgcatggtctgccctcccaaaggtggatctttatcttttgtgttgtgatagtaaatttgtatatatatatctagtgtttaaaaatttgctaagcatggggtgatccaatacctacctattaaaaacgtttaatccgaacatagctacacacggaccgaatgttcttttttggagttttttataattttattaagattttgggacatttagatctctttaaattaatatttactaaattaaagagagtagttaagatccttaccaataaacgagagagatgttaagatccgtctcatcaaaaaaagagaaagattttaagatccaagtcaggtcacttttttctttggtattaatctcacaactcaattctcaactcaactcaggtcaccaagatttaacacttataattttacactttgttttcttaatcattatatactatcctaagcatatatatgaatctttcaccataagttataccatttatatatgctaatattttctaaataaaccttacaaatttgttggcgctaacaaccattgtttaattttgcttggggtggctctagttatattatatagaccttaattttgcaggaggtatgtaacacctcatattgcttcagcttagcaattcatatatagccaagacgtgtggacttctcacccaaagtttcctagtttaaatgtgaatgcctctaaacaaaagttcttgctttcgatgtctaaacttagatgtgttaccgaataaagccagatttacctcctttgaccttactatatagccagctcgctgcctccgcaactctcaaaatgacactcgcgatcatattagttgtttccaacaaattgaaaaataaaacatttcactcaaacaaaaaaagatctaaacagccgaaaaaacaagtccaatatcaaaatctgttatagcaaaaaaaaagaaggtagagtattttggtaagaaagaactctaaatgcctctacgatataatattaataagtatgttaccaaacaacttaatattagtgcaaaaaaccctttagtttgtcataaacagcaaaatctgccactataagttgttttcatgaggtcaagttgatgagagtatatgattctctgaagctcatgtcaaaagaatagaaccaatgttcttcagtcttgtccacacggtaatgcttcaaatgaacttgtctatagagaatcttccagcgtgagagattcttagtgttggtggattgacataacagaaacatacctaacattggaaaatgctaaaaactttgagtgaatgaatgaatgtatcaatcatgaattagagattccattttttatggcctaaatcaatgtttctcacttgtaaaagttgtctttttgacaactaatcatattctaattctttttctctgccctttatggaaaagctttgtgactatttctttatttatttctgtccaaatttgatgatctgtaagaatctctttattgggattgcaatttcaaacaaactttacatcttcttcttctctctgcttttgccttcacgacgagtagagagagccatg

SEQ ID NO: 21691 - DNA, 3003 bp, Unknown
  misc_feature (1)..( 3003): 2750-1469P.txt file - cDNA_ID_2024916; gDNA_ID_1620730; Annot_ID_166084
taatttatttcaatgtatgcagaaacatatcaactactgaattatatatattaattaaccattttgtagtcagaattaactgggattaaatcacccaatcctaaatttgattttgacctaactaatgaaaatttaatagtaaaaaactattactttgattttacattttaactttgatagttttttctaatttttattaactagaaacctaattttttttcgtcaactagaaaactattctatcttgatattattttataattttacagacaacagaattatatataaataatttgagtttttttttgtagcttttaaaattgcattaatcaaatttgtttaatagaggatataaacatggtattaataaaaaaaaattctaaaaattcctctagttccacttttcagccaattcctcaactgatgtatcttaaaaaaaaaaaaaaaaatccacagattcagctaaaaatcactacgaaaaatgaacgattaaaattaacatgggccacatcaattgggcctaagaagataaagatgggccacaacatttaggcctaaaagaaaatgacctcaacatcaaaacttcgacagtcagtcactgtaacattttagatctttcccgaagaagaaaacgaagaagagacgaagagagaaatgaggccgatgcagctggatatgttatcggagatggatgatgcaggttcttcgatggccatggacgttgatgacctcgaagccatggagatactcaacgaaggaggacttgtctcagataacaagctcgccgacgccgatttcttcaacaaattcgatgatgatttcgatgacaccgatatcaactaaatccggttaagtttcctctttaagatttcagttttttttcctaaacttgatgtaatttgtggagaaacctatgtagtaagtgtgtaataagttctgggatttttatgtttgtggtatgtaacaatgtttttcttcatttggattactaaaacatttgatttgtgtgttattgtgctttgtctgattgttttttttggctcaaatttagaatgttttttttttccttggttctggagatgatgatgttttttggagattgaaacctaattttctttagtgttttggtattttagtaactgaaaattagagtctttgtatgtgaagaatgttgtgaatttgtatgtgaagaatgtgaaagttattgatattggcttaagatagaaactaattgattcatttggtaccatattccattgtgattgcttgtaatttcaacatctgaggtctctgaaatatgtgttgatgtgtttcattgtgttgatattcatgtgactcaccgggtctagagaaacttcccggtgagagatgaaatcctcatgtaagctgtaactttccactagtgattaagtgaactagggaactcatactgaagcacatattcctaccaacaatttaatggcctaagagaaatagtctcttgtatcttccatgtaactcagatacatcagtcaatgatttatatggatatggtatcttgttccatgttgatttcttgtaaattcaccatctcgtggtctctgaatgtgtgttgtattgtggtatgtgggagggggtgtataattcctgtcttgtggtatgtaggagggggtgtataattcccctggccaagttctgttgttgcatcgtgtcatattatattctctgggccggttttgagatggaaataatgtgcttgatgttcaactatggtagaaaggaaaaggaggctaagcataaagatgtcacttgtcactttgtcagtccctagcagtctttgttacttgccttatagtcgtatgtatgtagtgtagccaaatttcatgagatttcaacattcgatagcaattcattagatatcggtaacctcttttcagaatctcttactaataaaaaaaaagttatttgaggcctctcacactacccacctcagccttttaacaaatgtgttctcaagttgccacgtcatcaactctctcaaaaactcccaaatctctgcaagccaccatccatgagcctcttaactttcttctcctccctacctcaacctttataaaatctccacatcttggtttaatgactaaactctaaaattttgagttataaaaaagaatgtttgttaaactatgatattaacgctaaacatttattgaaaaaaaagttgggtttcgattaatattaaatatttcctatgtttcttagcaaaaataaataaatattttctctgttttttttgtttgattgttagaaaaaaacacacaaaagtaaatatattaaagttgattttaaatatattatattttgtgttttacaattttctatcactttaaaccaataaaatttaattatttttattaaagtttacaattcattaataaaaactaataaatattacataaaaattttaaaaaatcaatttttttgaaacaattttttttttcttcaaaatcaacaaaatagaaccgaaggaatatgaattacgcggattacaattaaattatcaattcatcgatcacctaatttgaacgagaaaaaacaagtaaaaaaacgaaaagtaaaatagtaaaaagtaaaaatacattctattggatttggttcggtatcaataaattatgatgttcttcacaaaatgcatttatatgacgtgtttgcttcctctccctccagtttcaagttgagcatatctgattagcaaaagcggttgaaggtcctctacttctcggcccaccgtaacaacatacactgtcaatccatatagttatcataaacccacacgtcaacgaaaccactcttttgacttcatcctctatccaatcacaccacgccacgttaacaccacgacctagtgtttctgtgatctccacacagagaaagaagcgtttcggttctgttttcgccccaacacaaagactccttttgtttcttttcctcaattggatcgaaaaaacccctaactttgacatg

SEQ ID NO: 21692 - DNA, 3003 bp, Unknown; identical to SEQ ID NO: 21691
  misc_feature (1)..( 3003): 2750-1469P.txt file - cDNA_ID_2024916; gDNA_ID_2926157; Annot_ID_198519

SEQ ID NO: 21693 - DNA, 3000 bp, Unknown; identical to SEQ ID NO: 4178
  misc_feature (1)..( 3000): 2750-1469P.txt file - cDNA_ID_2024920; gDNA_ID_1620689; Annot_ID_48533

SEQ ID NO: 21694 - DNA, 3000 bp, Unknown; identical to SEQ ID NO: 4178
  misc_feature (1)..( 3000): 2750-1469P.txt file - cDNA_ID_2024920; gDNA_ID_1620689; Annot_ID_164697

SEQ ID NO: 21695 - DNA, 3000 bp, Unknown; identical to SEQ ID NO: 4178
  misc_feature (1)..( 3000): 2750-1469P.txt file - cDNA_ID_2024920; gDNA_ID_2926182; Annot_ID_140633

SEQ ID NO: 21696 - DNA, 3000 bp, Unknown; identical to SEQ ID NO: 4178
  misc_feature (1)..( 3000): 2750-1469P.txt file - cDNA_ID_2024920; gDNA_ID_2926182; Annot_ID_200360

SEQ ID NO: 21697 - DNA, 3003 bp, Unknown
  misc_feature (1)..( 3003): 2750-1469P.txt file - cDNA_ID_2024949; gDNA_ID_1620549; Annot_ID_160241
aatctcccacaatattattatctctctcatatagccaaaacccaaacagtgcttctgtctctcgtgtgtttcctatttcgtttatatgggctatataaattaggcccatgacattatatgggctttcacatccaactaaatggattatggattcatagcgcgtgtgttcactgtctccttttaaacgcgtggttagatcaaagtctctcagatttcttaccttctcttttaaaaatgcaaaagatttcttaccttttctttttttgtgcaaaagatttcttaccttacaaaattaaaatagatacagagaatgttgacttggtgaggatggaggacacgtgtcagtttttgattgagtaagctattactctcctagatttctttctattccaatgtataaatttgtaacaaacattggattttgtcaaaagtaccacattttcgatttttgtatattgtaaattgtgaaattttcaatatttttattttaaaaatctaattttaaaattcatgcacattagtttgtcccaaaaaaataaaaaataaaagctcatgcattataagccaatcacactaccttgtaatgttaattctaagagttagataattttgttatttgtagatatacaaaacaaatgattaaaaatacatttagtaaattttgcattgttcaacatacgtgctaacatatagccattgtttttcgacaaatctaaaaccaaaattttatactatttacatagaaaaaaaaaataggcatacggtgttatatcatttttgttttagctatattatagcgcgtggttcacacacatgatctaaagagcgtgttgaatccccaattattaaaaagaaagaatattggcatttacctagatattttgttttggttttgttatatatagcacatgaaatcttattcatcaaaacactaaattttgtttcttctctcaaatatatcgtcgtcttcattgcttaagtcatgaatcgtttatgcttttttaacaaagttgtaaaagttgcccgtggtgattcacctccttttgatcttgcttctttacctcccaaagaacaacgagatgtaaaattgattttgcttactttaagattgcagctacttacaaatatagtttatgttatctttatatgacctaaatttctctttttttgtagttgattggtgaaactttgttctttatggtggaagaacttgagccacagtttgcaccaaaaatcacaggaatgattcttgaattggaccaagacaaggtccttcatctgctggtaacacctaaagccttcaaagaaatggtcaaagaggcaatggaggtcctagcgcactcctttctgcaacagatgaaaattgctaggggaaaaagatgttagcaagttcctaccttccatgctccccgctaaactttgaaatgtttgtttggtttttgttcattaatatgagcaacaaaatgtggctttaagttgagttttaaatctttgttttcatttaaaaaaaaaaaaatcatatgttagtgtatccaaatgttttaagacaataataaaaataaaataagttctgcttcgtccaaataattactagagtggttataactgatgttttagttaagttgaatttttaatttgtaaacaatgtatcccttagtaatatctaaacttctttctttcatatttaatcttacttatattaaaatatatatatatatatttatattctattaaataagaaaaaaatatatatacatatatataatagtaataatttatgttgatttcaactatatcgataatgtaaagcatgactaaacactaaataaatgatatttttagtagcccgtaagatatttttattatcatgtattcaaaaagttttaatccaaacatatttatttaaatatttagatttattttactttgtatgatgtaagtagataatgtttagtttttattttactttgtatgatgtaagtagataatatttagtttttaccaaccaatctttttagttgctagttttttaccaaccatatataccctctatcctttttgtatttatatcttttaggataaaaggctaataatagtttgatttactttgttaacatatctatcatatacatcaagtgttgcttcaaaacataaaaccaagacatggaattttataatttatactagtattctcgttgtatcataacttatatttaaatttgtgtttgttgtaaacaatcgaaaagcatatagaattcgtatatattttataataataaagaaaaggaaaaaacaaaatcgagacaaatgaataataatcatgaaaaaatgtttttcatatgttcttatatattttcaatttgataaataccgaataaatgtttcaaagtaatttgactttttaagtcaaataaaatctctaaattataacagtgaatcacaatagaccaaatcaatcatagcaaatagatatgatttatgaaaaaatgagaacctaagttttaatgttatacgatataattagataatttaaaatatatgcataatatacatatactattatttttatttaatgtgttgaaggatacaaaattattaaaaccatagcgattacgtaatttattcactattcatcagtttcttaatccaaaagaaaaaaaagaagaagataaagaggtatttatatatcagatgttcaaaaaccctaaatcgcgtttcttctctcaaatctgccgccgccatcattgatccaggtattgctctaaccttgactcttcacgtcattcgcatattactctcctcctcgctgatccattcgaattctgcactcaaatcgtgtttttgtacatcatagtttcaagcattatgattctctctagccaatgacttttcttgcgattgaatccttttgcagtctcgttatcaaaagttgaagaatttagtttagtttggttgtgtagataagatttgtaatcgcaaaattcgatctttgttacagttatg

SEQ ID NO: 21698 - DNA, 3003 bp, Unknown; identical to SEQ ID NO: 17923
  misc_feature (1)..( 3003): 2750-1469P.txt file - cDNA_ID_2024980; gDNA_ID_1621094; Annot_ID_170847

SEQ ID NO: 21699 - DNA, 3003 bp, Unknown; identical to SEQ ID NO: 17923
  misc_feature (1)..( 3003): 2750-1469P.txt file - cDNA_ID_2024980; gDNA_ID_2926160; Annot_ID_198725

SEQ ID NO: 21700 - DNA, 3000 bp, Unknown; identical to SEQ ID NO: 1825
  misc_feature (1)..( 3000): 2750-1469P.txt file - cDNA_ID_2024994; gDNA_ID_1620452; Annot_ID_157500

SEQ ID NO: 21701 - DNA, 3000 bp, Unknown; identical to SEQ ID NO: 8037
  misc_feature (1)..( 3000): 2750-1469P.txt file - cDNA_ID_2025014; gDNA_ID_2926133; Annot_ID_197049

SEQ ID NO: 21702 - DNA, 3003 bp, Unknown
  misc_feature (1)..( 3003): 2750-1469P.txt file - cDNA_ID_2025014; gDNA_ID_1972068; Annot_ID_178492
tgaacccaacacctccatatgggaaatttactactagactaccaccacgttgtttacaatacaagaaaatgacatgaaaacgattgtagtttataacattgaaccctaataggaaccatgaatccgagagagaacatggcaaaaactcaatttctcattaatgaatcagaaagtttgttacatcaatgtatagacaacaaaccaactaaaccaaaaataaaccagagattcactttaattagaatgaataaaccgggactataccgaacccttaatgacttctattatgtacaaatatacttagtatagaaactatacacaatctaataaaccctaacactttcgagatgatttagaattgaaaaattagtataaaatgcacgttgaagaaaaagcacgattgacatatttttataaatagtaaaaaaatcttggtcaaattcgagtagacaaccttatcaaaaaaagaatttataaattagacgacaaagtgaagcaaaaacagaaaacgttatctagaaaacgattaaatgaaacatcacaacctaatttcttcgtcaaagtaaaaaacatcttatgattcataattatccaacggaaaacgacacagatattataaataacttttccaaataaacaaaaatgaattaaagtaataaaatatccattcctcttcgatcatatccacagttcccacaccaacatgtcgcgaaagttcctaaaaccgccacgtgtcagtcacttatccaacagtaatccaattattcgtcaagcctccggtttattaccgtctaaaccggtagctcctcccaaatcatatggctcactcacttctccgtctatataaacaaaacatctcttactcttcacaaaagaaaaaactctcttcggaatctgaaaagccataaatcagcagaaaaaaatcttaaggatcggaaattttataatcggatgaatagagtgattagtcagttttccggtaagttgatgaaggagaagagtgttaccggtgtaagcggcggagatacgactttaagatctgccgtcaaagaatcggtctcgtctccacagagtgcgtcgtcgtcgtcgtcggtgaggaggcttaaaggagatctggaatcgagtcgatttggtgcggcggcgagtgagaggctgaggcaagcggaggaatctttgaggacggtgatgtttctgagctgttggggatcttgttagatctggttgagaaaataatagatgagaaaacgaaaccaaaacgtttctgtttgtgtttttgagttttggatttttgttttctctgtgaatagttttttttttttttcgttttctttgtactttgtgttttatgtaaatcatgtataaaatgaaaagtaaatcaatgaagataatggtttgtcttcaccaaatcatgtatttacatgtggatttgaactatagattatacaaaaaaattagtttgataaagacgatgactcaaaatgtaataagtatgttattttggattttaataagtcgatttttagataatgtataattggtaaatcgttaaataaatcgatatataaaagttgtattctaaactcagcaaattgtcataccatgcctaaataaaaatgctgaaataggtagatttggtccattttggttgatactagaattgtttgaagtctacatttacgattataataatggataacaagatattttgtaagatgtgagatggtcatatagtttggagttgtcaagctataacgttaaaatggtacaattatttatcaagctaagcgaagatttacagcggatttttgacgcatttttaatcgtttttgataggtctgggcaaaatatctaaatctgaagaaccgaatcaaattcgataaaaatttttgatccaaacttgaattcaaaactttaaaatatccgaacggatcacaaatttcaaaactcaaaaatccgaattcgaaaccgatccgaatatgaacccgatcaagtatccgaacatatccaaaatatatacataaaaataatttaataatatttacacaacttaagttcctaaaatatttgaattttaaaatattttgtatattttggatacttaacctacttttcaatagatttggatagaaaatactcaaattttgttagaaaattttatatatttttaagtaatttaaatattttgatacaaaattttgattttggatactcgggtgaatccgaaaaacagatccgaatctaacttagagtcttaggtggtgttattcaattatggtgttaaagtcaattatttaagctttagatttgttttctgatattgcttttaagaatatgtttgtatgaatttcaaaatctctgcaatatgtcttggattttgattttaatgatttactcatgaaactccaaagagctttcatttcaaatcaattaatatacaaagattttaaaagtcttttagttttgaataacattggattttaatgaaatatttcaaatcttaattgaataacaccaaactttagaatctattaagcatgatttacaaatatgagttccaataacactagattttaaagctggatttagaatcattagttaaataacagtggattagtgtggatttcaattctattaaaatccattaacgaataacacccccttacaatatccgaatggatcttagatttctaaatttggaatacccgaacccaaaaaactcgactcgaacctgatccgaccccaatccgaatacccaaaaacccaagccttattttttgagtgtaactcaaccgtttttattgcttttcagaacgcaatcactacaacaaccaaaaagtaagctttaagcgaatccaaacgctatcgtattaaacgctattactatctgcgttttagctcttcatcttcttctccacttcagatgactttctcgcttaataaaaaaacactaacccaatcaaatccactttaatccttccctctctcgcgtccgattctccgatg

SEQ ID NO: 21703 - DNA, 3000 bp, Unknown; identical to SEQ ID NO: 8037
  misc_feature (1)..( 3000): 2750-1469P.txt file - cDNA_ID_2025014; gDNA_ID_1621185; Annot_ID_174404

SEQ ID NO: 21704 - DNA, 3000 bp, Unknown; identical to SEQ ID NO: 2084
  misc_feature (1)..( 3000): 2750-1469P.txt file - cDNA_ID_2025039; gDNA_ID_1620485; Annot_ID_158448

SEQ ID NO: 21705 - DNA, 3003 bp, Unknown
  misc_feature (1)..( 3003): 2750-1469P.txt file - cDNA_ID_2025043; gDNA_ID_1972192; Annot_ID_180216
agatatcttcgagctatccccctacctggcgcgccaactgttgatgcacgaatcacacaagtacgaaaatgggatctctagggaaggaagaatctttctattaaagacgagcctgcgacttaggcgaattggacggatttcaaaggatgatttcttcaacgagcattgatggagtaagaacgagctgattgtagatgaaaggcgagcttgaggccggaagacgaacttaatgtccgaggaagaatagagtttattcgttttatagctgaaccttgtaaaaggttgcctacgtacccttagaaagggatcaagccacacgtagttcatattagaataagtgagctaggccgtcattggaggtaggtcggcaggtagttgacgagggatgagctatagctagacgaggagttggacgagctgactagctgacagctaggcggcgaggacatggtcgctgtgatgggaagagcttgaagacgagctgaggagcttgaggacgagccgaggagtttgaagagctgaagagcttgacgaagaggagcgagctgatgaactacttgagaagggcccaatccgacccctaacaaagacttatgtttagatatgttttcatgcgatccaaactatactatatatttttttggacggattttttaataagttttatggagttcacagacgagtttgaacgaagcgttttctttatatatgtgctatgcgaaataaaaacttgaagacaaatttaaataataatgtgatgtagtagggcaattgcataatcgataaatccggataagtgtgccccgatacaacaaaagcaacaacgtttacgaaaatttaacaagtccaaaagtaacagacatgataataatatcctcattacaaaactcaacacacgatcaaaataagtgaaacataacataaaccataaaccctcaagtttcaatacgtatcaggagatttaatgggggggggggttaaaatcatatactcctccttgccgaactattaggggtcggattgggcctacttggcccaatgcccaaacccaagtcaaaagcccaaaataagttccaaaccaaggaggagtattaaggcgaagggtagtttcgtcaaatccctcgatgaatgccctacacgcgtagtgctataaatacggaatagcatgtcatgtcgaaggggggaattccgcctgacacgcagacacagagtagctcgcctttctcaagtagctcgtcagcgagcccttctcaagaagctcgttagctcgctcctcttcgacaagcttatcaactcgttctcttcaccaagtccctcagctcgtcttcaagctctccaactcgtctttaagctcttcaaactcttcagatcgccattaagctcaacaagctgctaagctcgtcttcaagctcctcaactcgtcttcaagcttctcagctcgtcttcatgctccactcaacgaccatctcctcgtctagctgtcatctatacagctcgtccaactcctcgtctagctatcagctcatccctcgaaaacaaaactcatctacctcctcgcctagcggcagttcgtccattgactgcatagtccacctatctcgtcgtccagctcgtctagaccttcagcaaacaactcggtttatccaactcgtctctctaccacggttcatccagcttgtcgcacatctgccggctcgtcaactacctgccgacctacctccaatgacggcctagctcacttattctaatatgaactacgtgtggcttgacccctttctaatatggactacgtgtcgtctcgcttgactatcaccgagacagcacattgtcagctcgcccgtctcacgaagatcgtccgtctcaaatagctcgtcagctcgtccttctcaagtagctcgtcagcgagcccttctcaagaagctcgttagctcgctcctcttcgtcaagcttatcaactcgttctcttcaccaagtcccccagctcgtcttcaagctctccaactcgtcttcaagctcttcagctcgccttaagctcttcagctcgcctttaagctcttcaaactctttagctcgcccttcttacaaaaacaaaaaaggatatcaattatgtagatcaaaacaaaaacaaaaaaggacttacaaggacgtagatatcaattatgtagatcaaagaataagcagtccaaattccagcgttgatgaaacgaactaacgatagccaaaacggcatgtacttgaaggtcttagtctccggcggcattttgtcctaattgtttcacgcattaaaaacttatcaaaaccagtttaatagtttacttatctatatattcatcaataagtgagagccagagagagagagagagcttactatggtaaataaaagatagatgataacaatgttgtaaacgttgcaaacaacaccaatgaatgtatgcttgccggccggataaactcccaaatccccagatagtcatacaatagactgttgccacaaaactaaactccaacggaagcaatagataaaagagtaatatctgcacatcaacatcgacatcatcaaaatcaatatacaatatttttctggatttgttttttttttctttgggatatttctatagaatttagtcaagattgtgtttgtttgttaccaccttttgtgcaccagtcaccaatccttatttttattattaaatctatttttgatactataattcgtgattttccttttagttttatatatatatatacttacagagatgcgagcttcatattattatttttatctttttgaacaccaaaaaaatagcctcgtattatttttaaatgatcaattatgtgatcatatttaaaaatacgatccggtttttaagggatttgaacggatcaaatgtgtttccggttcggttatataaaccggtattttaccatatccaaccgaaatgagtatcgacgggaattatccgtaaacagagtgacagtgaggtgtgaaggaagaagacgatg

SEQ ID NO: 21706 - DNA, 2557 bp, Unknown; identical to SEQ ID NO: 1644
  misc_feature (1)..( 2557): 2750-1469P.txt file - cDNA_ID_2025081; gDNA_ID_1620430; Annot_ID_156819

SEQ ID NO: 21707 - DNA, 3000 bp, Unknown; identical to SEQ ID NO: 2011
  misc_feature (1)..( 3000): 2750-1469P.txt file - cDNA_ID_2025094; gDNA_ID_1620477; Annot_ID_158203

SEQ ID NO: 21708 - DNA, 3003 bp, Unknown
  misc_feature (1)..( 3003): 2750-1469P.txt file - cDNA_ID_2025098; gDNA_ID_1620464; Annot_ID_157862
acctcccaatgaccatgttgacaagcttgcatcaaagccgtctgtttccaaaaatttcttgtattcagactacttcaaaaccaatcaataatgcaaagaacaaaaagacactaatcacaacacctgtccacggtagttccggagattaatatcaactcctgattccaccaacagagaaactatctgaagataaacaaaacccaaatcaccaatcaccataaaagtcagaactttagaatctctaatcttacaaagtattgatctttcaagtaattacagttacctcgtggtggccttgagcggcggagtaatgaagaggagagttacgaacgccaaaagtagagtaacgagcgagtcttggattgtaatctaagagagctttagcttcctgtaaatcaccgtctctggccgctgatactaagcgttcgccggacgcagaacaaccgaatgagtttccgacgaggcttagaaacctcatcgttttacgatacaaaattgaaattttgatcggatcaaccctaacaaatcaccatcaacacaacaacacgaacaaattttattggattcacaatttgcagcaaacccaattcgagaaccagctcggaagaatcgaagaattgaatttaatttcaaatgattgcaacaagaaaaatttggtttttattttcttcctctgtttttgttgttgttggtgttctttaattctcttatgtacagatcagatcatcatcatcatcatcataatgatccctctttaagaaagaaagaaactttaaagaattaaccaaaaaaaaatcaaaactttaaaagaattgaccaaaaaaagctttaaactttagaggaaagatcatccagaaaacttctctgacaattgtaatacagagaacatcaaaaagaatggtgaaattaagttgtgggattttttttttggtcaattgattaaggaaaataacaaacaataataacaaattggtgattactttatttttaaaccaaaaatggaaaagaattgttctaaattttttattgtgtgtggaggatctcttaatattttgtgatggtgacactaattaattgacttttaattatttgaacaaaaaaaaaatatgacaaagccaacgttgtagccagaggtttcgataaaccaatagccggaattcgcgcgtttttttgttttaaccaaaatcttaatgattataaagattctctaacaatgaaaaaaaaaagacattcttcatcacaccataagaaagctttctcctttattacatataattaaataaataatcttactatactgcgtaattgaataaatataggttctttttgtgccaacaaataatgattcaattagcaagtctccaaaagtaacatgacattagtggaaaaacaagtgtataataatgaaatgtggaggagcatgtgggtcgtgtcacgtcatgcttataattgcatttgcattagcaaacctataacattaatgacttcaaattttaacattagcaaatcagaatgatcatgccaactctcagcaaatatatttatcaaaaaaactctcaacaaatattacttgattttaaagatgacccaagctatcttcaatctcactttctgtagaatcactaatttgtgtctcacaattgtgcaaaactgtggccagttgctgtaaattgacagaaaattctttagttgacaatttgtcttgtactttggaacttgtagcagagtttctttgtccagagttaacactatccaaactaaactccaactcccaaactggatgtacaagcttaaatctccacttgtgctttatgtggaacttctccacaccaaaaatgagttgtgtaattcagtctgaaacatgtccactattccacatctatgttctctcgagtccacatcacacaatcaagtaggtgcatgtgcacatgttggaaccacaaacacaacaccctcactgtcctagtgttttgtaagagagagatgtgaagtagtctagaatgtctcatcaagtcgtcctccaaatgtaaccatatatcctcaccttctgtacacattttcaaaatagctgcaatggaaagtgaagttcctgaaaagtctagagtataaccagctcaattttgactttctgatatcctttgttgaatggccaactccatagacattaacacacactcatagtttggcttcatagtctgctttgacaagccagatccagacttttgaacattaattctcattccttcccatgcactgcttcaatttcgcgagaaacatcttgcataagcctatgtcccaaaagtttcttcaagttctcaaacaacatgcactgcagctttctcgaattccacctcacaacagaacttgttttttgtcattttgatctcctctaagctaaatttaaacttgaatttccaagctttagggaacttcatatggttcatgtctctgacatactgcatcatcctcattttgcacctactgttccagcttcccttgagtctttttatgttgttcttggtatagccctctgcaaatacgcatgcttgtaattttgtcaggctactttttttcttcatctcgttgacaaatctataacagattctgttaaagtgtctgtctttcgttcgtaagatcattacgttcatataacaatatctttgatgcttgttttgttattcccaattgtcttgattaacgaagaaaaaaacgaatccttttaattttttctcctctgtttgttaatccgttactgctctgttagtctaatgtcaaagaaaccacgttgcttttgaacaacaatacatctgtattgggaaatctatgaatacttgacttctatatttaggaaaaccacaactcactttgcactgaaacgtcaacgttttgtttctttactttttttggttacaataacagagtcttcctattattcactttttttatcttctttcacttatttccccatctccttcctcttgaatctttctcaagaaaaccatg

SEQ ID NO: 21709 - DNA, 3003 bp, Unknown
  misc_feature (1)..( 3003): 2750-1469P.txt file - cDNA_ID_2025109; gDNA_ID_1620412; Annot_ID_156298
agatttgcagatttatggagacaagtgtataagaaatcttcaacgatatataattatagccatcattgaaattctccatcaaaagcataaaaaaaacgaaagaaatgccgtctctcgtgaatctaataaaggcgaaatgaactttttgtagcaaaattgtttatataacaaaaacatgataataaagataacttacgcataaaatatcggtagtttttagtatccgcgtatagtttacttaactaaaggaaatatggtattatgactttttaacacaagattttaactgggcagaaagtaacatgaacggaaaaggtctacaaagtggggttatcttgaaaatgccgtatataacctgttatcgctattttactttacattatcgcttaattaattaatgacaacttgtgacatctttaattgcgtccaacaacattttttttgacttttaaacaataagctataatgacattttatttttagaagctatacttacacagtgacacataataattcaactaaacaacccactgtacccgattgaatattttacaagccatgaaggttttaagaagattttgttgctgatgcctcggctagcttgaaaatgttttatggattttacgcaaacacgtcattttgacagtgttttagagatttgtttttgtctacaactaatatataattaagctttggagccattgaaaatatttggtcgataaataataatcacaaagtgtacctcaatcatagaaatggaatgctatggtccatataacttgaaatattgtagtcataaaattacgatatcacctaacggaaaatagtcttaacatttgaacataacatgtgttcagagaagttataaataagtgttcagagaagtgattttttatttctaagttataaataagtgtgaaaaagtaacttatgactaaaaaatattttgtgaactttttaatattattatttttgcaaaacaacgcactatatatgtacctcgtacactctaattagctcatccaccacggtaaaatttatttattattttgcattttttatttggttaagctgaaacatatcattatcaccaagcaattatatatgtaccgataacccatgctgaggaaattttctaaccaaacctttgggatcagaatatatattagtaaataatcatactttaacttagattacactaaaaactagttatcgttttagagttttttttgtctgacgagatctcggatgcttcgattacacctgacttgttagatgggatgcatgaccacattttggctaacatggcgtgcaaacgatgacgtggaggcaactgattggctccactgattcccacaaatttgttgcaaaatcaaaagtagggccagactaattatattatttttttgtggatgtctataatatgaaatttgaatcaatacgtaatttatcgattctttgtctaatcgatgtcaactaaatttaacaaattatctggaagtcactcaacattttccttgataatgctagtttcttcgaatcttaaatgaggcaacgcattgtccattgaaattttaagcatatagtgtatatatgtatttatttttctagcaaattcaaaacggcctgggatcgtttggtttgtaatcaatatatgggttttttttggtcaacaatcaataattagtatttttgagaattcatgaaatactggatgagtaaatgagataatttttatggatgatcactagcacatggttgctaaccagtgaagcacctaaaaaatcactgcaaaaaagtttgtaatcaatttcgttgcagctaagcaacatttatgactaatttgagtaaatattaattgacgatcccatgaatttcacctaattgacgagtccctagatttgttttagagtaaattttacaacttcatatactttacattataattaacaaactaaaaaactcgtaaaccaaataagactttgtctaatggtccaagcatgacctctccaaagatataatatgttttgatatatacgtgataaccgatcagatgttgtatatacatattaatgtgtattaatttcttcatataatatttacaaatttttgtgagaagatatcaagtacacgtatatcgaataagaaaagctagattgtgtaaaacgttacggggcttgtgcattaactcacaagttggctatcacaagtttcaaattgtggtgtttagagcatcgcagttgtcaaacaaaaaaaaaaaaaaaaaaagaaagagtatcacacgtgattgttttccataactatgagaacttttctgactattttcttcttttgtgcctttgttatgtttcttcaatcattacttaattattaattactaatcgattttcgttgcctgtagttttcacatgttgtaatctagaaaactgaaaaagactttccccataatagtctctgctaactacatactagtccctatattttgcaattttaagtgtttttaaccactatcttagagactctaaacatgaggaccctaaaaaataaccatcatcttaaattgtacgtaagaaatatattcaatctacatcagatgataccaataaaattcggcatataagtagaatttgaaagaaacaacaacgtgggtagatatgcaccatttacaacaacaaaaaagaaaaatcaattttggtccaactttttcatatacatttaaattgtcaattatcatcataattagtaatacgacaaactgtcgtataaactagaaaaatacatacatctactatctaaaacgacagataaaaatacgtaatcatcaaaaagagttaaaaacaagttttggggttctcttagcaattttgttttatatgtctatttttatgtaacgcgacagctgtaacgttgtgtctatatatatactaacagagtttgtgcttcgaaatcttaagaactttcccagttttgttttttaatcatatcaaagcaaactgtgtgatg

SEQ ID NO: 21710 - DNA, 3000 bp, Unknown; identical to SEQ ID NO: 5552
  misc_feature (1)..( 3000): 2750-1469P.txt file - cDNA_ID_2025142; gDNA_ID_1620801; Annot_ID_168679

SEQ ID NO: 21711 - DNA, 3003 bp, Unknown; identical to SEQ ID NO: 19322
  misc_feature (1)..( 3003): 2750-1469P.txt file - cDNA_ID_2025191; gDNA_ID_1620655; Annot_ID_163615

SEQ ID NO: 21712 - DNA, 3003 bp, Unknown; identical to SEQ ID NO: 20915
  misc_feature (1)..( 3003): 2750-1469P.txt file - cDNA_ID_2025218; gDNA_ID_1620842; Annot_ID_170070

SEQ ID NO: 21713 - DNA, 3000 bp, Unknown; identical to SEQ ID NO: 5240
  misc_feature (1)..( 3000): 2750-1469P.txt file - cDNA_ID_2025218; gDNA_ID_1620775; Annot_ID_167657

SEQ ID NO: 21714 - DNA, 3000 bp, Unknown; identical to SEQ ID NO: 20917
  misc_feature (1)..( 3000): 2750-1469P.txt file - cDNA_ID_2025218; gDNA_ID_2926205; Annot_ID_202118

SEQ ID NO: 21715 - DNA, 3003 bp, Unknown
  misc_feature (1)..( 3003): 2750-1469P.txt file - cDNA_ID_2025243; gDNA_ID_1620418; Annot_ID_156506
aatgtaaaaaataagataaaataaatagaaattagttcaactataattagtttgcttgagtggatggaattttttttttgtgtggatggaaaatttatcatgtggatcaagatcacggatcaacttttaagatgtctgaaattttcgtcattttgttatgaccatggtaaatgtttaaatggaaaaatattcgacaagctatagacctcaagaatttgtttcggttaatttataattttatatatcctttttgatctaagagaaaaggatatattttggaaatttgaatctgatcaatgttaatcttagaagctgatttacgaaatatttgaaaaaatgtagtcaaggacattgcaatactctcattcgaatttagaaactgatatatttattttatgacagtgcttgcatcctctaggctctaacatgcaagatagtttgcgtgcgcatgcatgtatggccatctcaaaatgataagtttttttattaaacgaaaatattctcttaaaaagaaacggttgcacgttgtaaattagccatgcacacatacatgtgtagaaacatagatatacgtgcgtaaatatgttaccttcgaggaatttgctgagacgggtaacgaattggacacggcaagtgtcacagtaaactgatccttgaatctggaaacgatcgaagtcgtcagcatcagcggcggcgaaacctgccagagaagacaaacacacggcggagacgacaaagaaagagaagaagatagctttggaagccatttttattagagatttttgttttgtttttggtcttctcttctttttgatatctctttttatattcaaacaataagttgagatatgtttgagaagaggacaactattctcgtggagcaccgagtttgttttatattagaaacccgattgttatttttagactgagacaaaaaagtaaaatcgttgattgttaaaatttaaaattagtttcattacgtttcgataaaaaaatgattagtttatcatagcttaattatagcattgatttctaaatttgttttttgaccacccttttttctctctttggtgttttcttaacattagaagaacccataacaatgtacgttcaaattaattaaaaacaatatttccaagttttatatacgaaacttgttttttttaatgaaaacagttgaatagttgattatgaattagttagatcaatactcaatatatgatcaatgatgtatatatatgaactcagttgttatacaagaaatgaaaatgctatttaaataccgatcatgaagtgttaaaaagtgtcagaatatgacatgaagcgttttgtcctaccgggtattcgagttataggtttggatctctcaagaatattttgggccatattagttatatttgggcttaagcgttttgcaaagagacgaggaagaaagattgggtcaagttaacaaaacagagacactcgtattagttggtactttggtagcaagtcgatttatttgccagtaaaaacttggtacacaactgacaactcgtatcgttattagtttgtacttggtacctttggttcaagaaaaagttgatatagttaaatcagttgtgttcatgaggtgattgtgatttaatttgttgactagggcgattccttcacatcacaataacaaagttttatagattttttttttataacatttttgccacgcttcgtaaagtttggtatttacaccgcatttttccctgtacaagaattcatatattatttatttatatactccagttgacaattataagtttataacgtttttacaattatttaaataccatgtgaagatccaagaatatgtcttacttcttctttgtgtaagaaaactaactatatcactataataaaataattctaatcattatatttgtaaatatgcagttatttgtcaattttgaatttagtattttagacgttatcacttcagccaaatatgatttggatttaagtccaaaatgcaatttcgtacgtatccctcttgtcgtctaatgattatttcaatatttcttatattatccctaactacagagctacatttatattgtattctaatgacagggaaactttcatagagattcagatagatgaaattggtgggaaacatcattgaacaggaaacttttagcaaatcatatcgatttatctacaaaagaatacttagcgtaatgaagttcacttgttgtgaatgactatgatttgatcaaattagttaattttgtcgaatcatttttctttttgatttgattaagcttttaacttgcacgaatggttctcttgtgaataaacagaatctttgaattcaaactatttgattagtgaaaagacaaaagaagattccttgtttttatgtgattagtgattttgatgcatgaaaggtacctacgtactacaagaaaaataaacatgtacgtaactacgtatcagcatgtaaaagtatttttttccaaataatttatactcatgatagattttttttttttgaaatgtcaattaaaaatgctttcttaaatattaattttaattaattaaataaggaaatatatttatgcaaaacatcatcaacacatatccaacttcgaaaatctctatagtacacaagtagagaaattaaattttactagatacaaacttcctaatcatcaaatataaatgtttacaaaactaattaaacccaccactaaaattaactaaaaatccgagcaaagtgagtgaacaagacttgatttcaggttgatgtaggactaaaatggctacgtatcaaacatcaacgatcatttagttatgtatgaatgaatgtagtcattacttgtaaaacaaaaatgctttgatttggatcaatcacttcatgtgaacattagcaattacatcaaccttattttcactataaaaccccatctcagtacccttctgaagtaatcaaattaagagcaaaagtcatttaactttcctaaaacaatg

SEQ ID NO: 21716 - DNA, 3000 bp, Unknown; identical to SEQ ID NO: 2884
  misc_feature (1)..( 3000): 2750-1469P.txt file - cDNA_ID_2025284; gDNA_ID_1620612; Annot_ID_161938

SEQ ID NO: 21717 - DNA, 3000 bp, Unknown; identical to SEQ ID NO: 2068
  misc_feature (1)..( 3000): 2750-1469P.txt file - cDNA_ID_2025303; gDNA_ID_1620484; Annot_ID_158427

SEQ ID NO: 21718 - DNA, 3003 bp, Unknown
  misc_feature (1)..( 3003): 2750-1469P.txt file - cDNA_ID_2025310; gDNA_ID_1620437; Annot_ID_157050
gatgaatgtaaacgtcgattcagtgtgagactctggaaagtgtttacagattcttttaactgtctccctgttgctgctgttatagacgataagatattatgtatgcacggtggcctttctcccgatttgaccaacgtggaacagattaagaacattaagcgacctactgatgttcctgactctggtttgctctgtgatctgctttggtctgatccaagcaaagatgtcaaaggttgggggatgaatgaccgtggagtctcttacacgtttggccctgacaaagtcgcggagtttctaataaagaatgatatggatctcatctgccgtgcccaccaggttcgtcgtctacacactgttcgtttctattttactaaagatgtcacggaacttctataaaaatataactgttgtgtttttctttttctaaaaggttgtagaggatggatatgagtttttcgccgatagacagcttgttacgatattttctgctcccaactactgtggtgaatttgacaatgctggtgctatgatgagtgttgatgaaagtttaatgtgctctttccaaattcttaagcctgctgatcgaaagccccggttcttatgaagtaaagaggtagttcaagtcttttatactaacttgtgatgagtgtttcaattcctgtttcagtctttcagatttccagattgctataaaaagttcatcatgcatttcttctcaaattacttagattatgacatttgttcatcttttgcttacacaacttgtttaagatttgattgagtaaaacagaaggggtttcgttttgaactttgtgaatatgagctcagagcttggatctcagattcaatcacttacaggaaaacttgtttcatttttgcatgttgcagttgaaacctcgcgggaaagaagaggaaaaaggcgatacgaaagcgggagagacatttgaagctccctgagactttgtccggaggccttgcaaaggcaaaaaaacataatttacatgttatattatcttatttgaactcttgccatttcttttctcaaaacactttatgttcttatgatcttctcctctgactctatatagacagtaaaaaaagtctgcaaattttcattctttttcaacaaccaatttcctcagtgtacatactaaattgttctgtatccatacacacatatacttgggaaatcttcggtttcatggattcttcacaactcgaagcctctttaaaaacagattctttgcttagttgttgtcgtcgctgcaaattatttgacaagtggagagtttttgcagagctaaaaagcgaatacaagttgaccaaaaaaggtcaaatccctggttccatatgaaactgtcaaactttggacgtgcatggatacaaaagcttctgtcagtttactttcctggatttagggttttaaaaccagctgtgaggtttgctgcaatgtggcaatgtcactgcaatgtgttgtatagagtcttaagtcctctgtttactttaaaacccgtattttaacttgctgctattcacaacaagaaaaatgaagtcttgtctagctacttttgctctcgcagtgttagtaacacaaggaagcatttttagtttgtgtttggcctcctctgcttctacaaactctgttcctaattggtttcatcattggccgccgtttaaatggggaccaaaatttccatattctccacctaaaccgccgccaatcgagaaatatcctccaccggtgcagtatccaccaccgatcaagaagtatccaccgccaccatacgagcatccaccggtgaagtatccaccaccgatcaagacttaccctcatccgccggtgaagtatcctccaccagaacagtatccaccgccgattaagaagtatcctccaccagaacagtatccaccgccgattaagaagtatcctccaccagaacagtattcaccgcctttcaagaagtatcctccgccagaacagtatccaccaccgatcaagaagtatcctccgccagaacattatccaccgccgataaaaaagtatcctccgcaagaacagtatccaccaccgattaaaaagtatcctccgccagaaaagtatccacccccgatcaagaagtatcctccgccagaacagtatccaccgccgatcaagaagtatcctccgccaattaagaagtatcctccgccagaagagtatccaccaccgatcaagacttatcctcatccccctgtgaagtatccaccgcctccgtacaagacttaccctcatccgccgatcaaaacttatcctcctccgaaagaatgtcctcctccgcctgaacattacccttggcctccgaaaaagaaatatcctccaccggttgagtatccgtcgccgccatataagaaatatcctccggctgatccatagtaactcaaaaccaaacaaggacgtgtttgtctataagtatatgtctagttaaaaaactgttctgttctttctgttatgttctttctttttcttatgactttctgttatgatgcatcaaataaagaataaactgttctgttttgaatttgttaaataggagagtgcaagctcaagaacaagctgtttcataaataaataaaatatattttctaaaatcaagtaaagtaaaaaaaaaatagatattgtactaaatgaataaacttgattcaacaaagttttgtacgttgttataatttcacttaaataatttagtgcgtcaaaaaaacaaaattaaaacgtaattggtcaaggaaaaaaaaacaagtctcaagggaaaaggaaaacaaaaaaaaaggaaaatttaataagcaatctggaccgttcatactttttagatctgacggctgacagagaactaccattgggcatcttttataaacagagagatttgtttgattccggtcgaactcaaaacataatttgctctcaataagacattaacaaagtcccagaggcagagagagagaatcagagagagagaagtcgagatg

SEQ ID NO: 21719 - DNA, 3003 bp, Unknown
  misc_feature (1)..( 3003): 2750-1469P.txt file - cDNA_ID_2025342; gDNA_ID_1972118; Annot_ID_178863
aaataaccagtaaatttttgttttcgaatcttgccagacagttcgtacctgagcataaaaactagtgtatttgcaatgtaagcggccatttccctacaaaagttatagggcaatcataaaaatataatatatacatgtaaagatttcctttgatttgacgaaaaaagaacactgagttgtgaaataccagaagtgatgcagactctggtgactgtcccccttaaaagctgtccttgcaaatgcagcgaaaaacctattacaattatgttatgaacaatggctttttgacacataacaacagaaagaagggataatttaccacgacttacatccccaaaatcatgacagtcaaaattccagaaaccccagcccactcttgagcctgtacatagtagaaatttcttaggtttcctagagatttaagattctccattggggactaagttatgtagaagagaagagcatacagtgtaataggcgaaatagctcgctgaaagtgttacagtgatctgagccaccgtgtcattgaatatgaatttaagccaaaaaactgatgcaattccaaaagctagaccaatgcctacactaaaaaaccagaacaacataagcggagaaaagaagacagcgacatacaatactactaacaaaggaaaataatccatacgctccgaatgagttttggacaagaaatttgattatggaaccccaatcagagttatgccccatcaccatcttgaagaataattgaaaaaccacaaccgataccctgaataatccaaacaactaagcttgatcatatatgacataacatcaccttgatgctaaacataagagtttgacatggttacccatcgttcatgagagattccccatcaattaacgtggtcatcttcttactagcaccaagctcctttagcaaagcaacaacagccacggggtcggtagctcctaaaagtcctccaagcaacaatgatgttttccagtcccagttatatggaaaagtaagctacaagagcataactcgaaaaaattgttaagttaattgaagctcacttaatcacagtcgaaaatgttgaagctagttaaagtacctttataagagctccgagacaaaaggtggaaatcagaactccaggtccagcaagcagaaccatttgtcccatacatctctaccaatgatgtaaaacaatcaataccaggaaccaacacagccaaggaagtagctcaatcaggaaagtaaaaaccttgatctggtgcacatccatggagaatgagctctcgaaaagaagaacagggagaaaaacagccaaaagtaggtcagggttgataccattccctgtaaagttgccattttttagagctcgtaatctaacagtatggagaagagaaaatacagtagcttacagatacgaattccatggccgagcttcccaaggttatgcttagttccatattctacagaagcaaaaaaatccaaaatttaactactttctaaaatcttccacgaaattgaaactgagctataaagcttaatgagcaaacaaataagacctagggatccgagaaaaatgccgatgacgagaagaacgacggtgtacggaactctagtgccgttaaacaaatatctacaagcggtgccgagaaccagcgaagttcccgcgaaaataacagcatcaacaggactcgaatcgttctcagctgaatacgaagaagatgcaattgctttctccggtgatttgtacggcaacgccgcgccgattatactcgtcatctccggtagaaagaagcaaacgatcaatctttcgttttgccagtgattacggtcaaagatgcttttaccgaaccgaatctgcttcgtttaagagtgaaccaagattgaatctagtctggtttggcttgacctgttttatttcggttacgtctggttttctatcactaatttgaacgaaaatttgagaaatcttaatacgtttttgattaggtttctgttttctttgctagatatgaatgtagttactggattatactactctgttcaaatgaagggtacatatatttacatgaaccaaattatgaaataacaaaaccgactcactctagtctctaaacttaactagtgtcacttttgtttgtttgttttgatccatacttcaatgtatcttgttcaaattgtttgattttatttttggtataagtggctacattgtaatttcttgctgattcaatctataaatcgaaaaccttaaattatccatgcctcaaaacgatgcacgttgtgtataaatgagaattttaaattgtttagtttctataattgctgtcatgacgtgagatcatgcaaagcaattacgtacgataacgcacgtaaaggaaaaatgattatcagattcatatattttttttttcaaaaacttggtctcgtgtaacatcattcgtcattcttcatattcactatactataaccacaaaagatattaaaaaaatagtcactccactccacatctaatacaaagaagtaataatttaactattcaaaatttatgaagtgttaatacgataagattttcgacccaaggaaaaaaaacactataagatacataggtttggcagaacaattagttcgctcactgcctacatattctttttttggtttaattagcctacatatgggaaaatgatttgtattttgttaaatgccactcacatttgttataaataattagtcttggtttcaaaagccatatatttatgaatttatagacattgatatttatttttatggttggaaatggtataaagtattattgactatagtttttttatgtatttttcttatgaaataaagtgagaaaataataaaaatattaaaatttgtgtagctgactcgagtttgattgaagtctttggtatataaatattgtcgttatttcctccatttttctccctcttctcccaaataaaaaaagttactcagatctcacgatttgagcagaatacgcaatg

SEQ ID NO: 21720 - DNA, 3003 bp, Unknown; identical to SEQ ID NO: 21719
  misc_feature (1)..( 3003): 2750-1469P.txt file - cDNA_ID_2025342; gDNA_ID_1620801; Annot_ID_168649

SEQ ID NO: 21721 - DNA, 3003 bp, Unknown
  misc_feature (1)..( 3003): 2750-1469P.txt file - cDNA_ID_2025346; gDNA_ID_1620567; Annot_ID_160749
tacagctacaactaattcatttataccaaaaactctacaacaacaaaagctacgacaacagtcagcactaaaaaactacagctacaacccaaccaatcacctaaatagttgtttatcttcttggatcaattctgatcataacaatttatagtttacatatatttctgaattatttataaaacaagaaattttctaaaaaaaaaaaaaaaaaaaggaaccaaatattcgaatttaaaataatcgagaatatcgcatagtgatcaatatgaatatatgaaattgacttgtataatatgtaggattacaactgattatatacagaaacgaagagtaattatgctgagtaatgagtggaagaattacaaggatacgactcaattagaggaagctgaataagcaattcgtatatgtcaaacacaaatatggatcatctataccgttgcttgacttcatttgatatgctagttttggaattatattatgtaacacacagttcataagttttgcaggtaaataaaaatggtggagatctagagcttaacatcaagcaacatttgccattcttcataaagcagcagcatatgtatattgtatcagacgacccatgtaagagtcacatcatctagaaaagcaaagtaattgaaatttatgaagagtagaatagagagatacacattagcatatgtaatgtaatagtttaagtgacatttacatttgatgtaaaacagatttatttaatatatggaactttgattcagagtttcttttgaaatttgagttatatatatagagagagactattaatcagcatacaaacaatatataatttttaacagaaacaattaaagataaaaactatatacacgtcggtttacaaatgactcaaaagaataagatttacacgacagaacttaaccgatgttaagattactaaaaccgacgcaaacgtttcgacgtataagtaagcgtcatttcctaaagttaagttaattatattaacgtcatgcaatgttacgacggtttttaaaccgacgctattatgttaaagtcagtttgaaaatgacgttaaagtcaataatgaccgacgtcaaataccgtttctcttgtagcgatcataatttggaaagtgttgatcatataacaacatatacttggatattttttttaaaaaaagttagtgtcaaaacaaacatggatcataatttggaaagtgttgacttaagatgttacctttttttttgtgcaaaaagatgttacctatacagtataaatactgaacaagtttgattgaaatagttatcaacatatacttggatattttccaggattaaaaaaaaaaaaagtttagacgaattatgggttctcttgagacatgcttacttttctttgtaatggttatgtttatgagtgcaattatgtctcgagcctcgacgagtgtagtgatttataatgatcttggaggtggtttgccactacggcaccactgcaaatcaagagaggatgatcttggataccagagtttagcaccaggtagatcgtggtcgtttggatttacaccggatatttttggccggactttgttttactgtcgttttagttggggagctgagagtcatatatttgatatctacaaacagagtagagacaaagaatttcaagagtttggttgcaaaaaatgcgaatggaaaatacggaaaaatggaccttgcaagttttataagaagaccggcatgtttgatcattgctattcttgggattaatatccttattttataaaacatgtcgtaactatcaatctatgtctgtctacttcttcttctacctttttttttcttttttgtatgaggtaattgtgtcttaatatgatattttatggtttgacctacaattcgttttcttttttttttacttgttaatgacacaattatagtcaaataattttagagcgaagtaacaaaacattataagaatataatgtgaactacaatgagcttttcttttatgcttaacgttcattttttaacaaaaaaaaagaattataaataaatagagaacaagtgttgatcgaaagaacaactatgtaaattatacatttgtgcttaactaaacgcatatcgattagagtcccatttcatgaccccgaaactcaatgagtcaaacgtagtgcacaatctagtgtaatttaaaaccagaaaaaaaaaaaaactagtataattcgacataaccaaatggcatagttaaacgcatgttggtgaatggaggaaactaaacccgcgtgggaaggcttttctcgagtagtggaagtgaaatattatcttaaaacatatactttcaatgacataaattggtgaagatttactcccataagtgaaatgcattacatctagaaacttatctcttttatatttatttccgatttagcaaaagaagtaagtagaaagtctattgagtcaaacccaaattttaaaaaaaataatgcaaagaacttgcatataaatattttacattataatttgtattaaattttgatttagtaaacatatataacaaaattttcatctttcttttaataatatagtttttagtttgttagattttttttttttaatttgggcaacacaacagttgtgtaatagtataggcaaagaaaatggtcggacagctaagggaagatcgctctctcctcatcagacaaaaaattacaagcgagaatttctttgttcctttacgaccggacaagacacgtccgtcatcgtcttctactactttctatcttacgcctctccccttatcctacgccaaaacatcttatcctgcgcatcatcccttccattaagacctagggttttctctctctcccatcattctcttctcccgatctcatttccattacccaatcccgctccttttctctgattttgaatcgaacccttaatacccagaaatctcacggttccgaggagtgggtttttgggggttagggttttcgagagatgttgaatg

SEQ ID NO: 21722 - DNA, 3003 bp, Unknown
  misc_feature (1)..( 3003): 2750-1469P.txt file - cDNA_ID_2025381; gDNA_ID_1620655; Annot_ID_163625
ctgatgtcgaataaacctacataccgattgataaagttaaaccctgtgtcaaaaagtgacaggggaatgaatgtgcatttttttgcaaatacactaccttcacgatattgtctgcatatttcatcaccatcgacacagcaatgccacttcaaaacaaacaataaaagagtgttttggtgttagcttcactaacttacatcagagttaagaaaaaagtctggcctcttaagcagcttttacctgagagcatggttaagaatcatgagtaatgtgatgaaggagtaaccatggaagaatcccctgaaaatggaaaaccatcccattcaataccagaacagaagagtcataacagcataatacgcagttagtataatataatggaactataggacaccgaggatatagaggtgtagtactagtatgttctggcattttatagcaagtatgaaagaggatggtttttggatttacttatttgcaacggcatcaaaatcttggatcactatagcaacagcattgaaagccatcccaaagacatatagccagaagttctgtacatttatattccttgaaggtcgctttttaataatggcctgccaaaatggaaagcaaaacctttataagctttatatatcataagttaatttatcaatggaaggaaccaattatactgtattagtgttgacacacacacagagaaaagaaaccaaatcagctttgagtatttacagtatacagtcctaatatcccacctctgtgtacactccggcgaaaccacttaaaagagccatgacctagaaacaacgagtgattatattaattgatgtggacatgaaagctgcttcacaactcttagttgatattagcttgcaaagggggctaacagcttacaattgccatagtccagccaggaagagatgtctgaagaacacgatcagaactgcaaaagcaatttcaaatatgagacatatattggaaaaatcagcagagacctgaaagttcacagagcaggaaccggatatgagcttttgtgtgttacgcatcatatgcaagaatcgttaaagctcaatttaatagaattcatatgaaaatcaagggtaaagttttactttgaattcaactgagcagtggtgcatccgcaacacaatagaatgaaacccgcccactgaatctcgctcaatctgttagagaagatagtaagcaaagcagttcacacttgcaagaattgaaggaaactgaaacagctcactgatggatttccagaacaactattcattggaagctgttaaatccatttggatgattaaaaaaacctactttctcttcagtataattctgtacaagacaccggtacttatgatgttcaagttcttcaatatctgatagcctggggcgtctacatatgcaaaaatataatactgccacgtaaaaggtgacacaacaagtagttagagacatattaacatgaaaaacataagttaagaaaaatcgaccaaagccacagaaaaaaataacaaactcaggacaccccacctgtaacaaattcttaaaaagatacaatgctgcgggaattggaaagactttaacttcatcaaatgttgtgcttaacctgttatagagacaggatttgggtatcagtaacgaaaaattcagtgagctatctacggtcatgttcaaagaggaattagatataaaactcatggaaatttctctaaaactgataacaacagattgagtaacaaaataattcgctacctgttgtcgtcagtaacaccttcatttttccatatccttgtcaaagcaagaagagataacgcacatttcagagttcaacctgatgtccaccaaagagtaaacaaaatcactatatcatcatgattcagagattaaaaaccacacaaaactggcctcgcttgcaacacatacagtacactcaatttaatgcatctatgaaactcaccaaaaagttggcggttgtaacactatactcatacttcccagctcgtttcgaccacacgataagtatcgcttgagaactcgtcagaatcgtcagtgcacatgttactacacccctaattcaacacaagctatttaaagaacttgaattttccaaaaaaaaaatgaacaaaggaaaaaaacttactttcgtttccagttgatccgttcactggatccaacacccagagtagccattgcaatgttactcgaagcaactgtcaaatcaaagcaccaatgagcacattaaagaacacgagaagtggaatttgagaaaagaatatctcaccggtatgagattttcctttcacactctcgatatcagaagcaacgtcatgatcgtcctgaagaagctcggaacaaaattgagcattaaagagagtccaaatcttaaattaaaagcagcagaaagacaaagtgaaatggaagtaacgaacctcatctttgattttccggtactccattgtttcaagctctcagatctctgtgatctcttctccgaacatacacactcgatagctattaaaaaaagaaagaataaagtgcttaatttcgattttgggcttgaaatttattgggccttagtctaatacctgattaggcccgtctgggatatcttttttcttttttggatttttgtatgtgattgttcttttttctgtcaacataaatttgcttggctatggacattggacagattctgctacatttttctgatttttattataaaaaaatcaaagccaatgcaatttcaacagatttctgtactgggaaaataacctttaaaataaaattacaaagaatttttttaattaaatttgtattgtgacttgtgatggaaccctacctgaaaacaatgtttatctatattcactaaaaataaaattgttatatttccaatattataggtgcattcattcatacacaaaacaactaactatacaaatcaacaaataaacataacaatacaaattatttaatacaaaaacaaacagcaacaacaaaatg

SEQ ID NO: 21723 - DNA, 3000 bp, Unknown
  misc_feature (1)..( 3000): 2750-1469P.txt file - cDNA_ID_2025463; gDNA_ID_1621108; Annot_ID_171670
aaccctcttccctccactcggcttctttagttgttctgttttcgtagcgtaaactacgggtttcttcttctcactcttgtgaagaaattcttggtaaagatcgttgcttgcagcttctgttgctgtctttgaaggctcgtgactcgagctgtatcgtccggatttcgcaagaagagtaattacaattgcgtttccgatgaagaaaacgaatctcgggctaacgagaaacactgctgcttccttgaaaatgtccccagagatttttacagaagggaaagagagtttggagatcaagattacaagaagaagaagctcgaacagtctgaacaagctcgtgaacgatcttattgcttggaaattcaagattcctctggatttctccatcttcaagtgttgaaacttaattggatccatcaagatgaattcttgcaaaaagaaaaacacagaaaaaagcaagaaaaggagcttttttaagagatcgtggaagtgatttaggtcactcgaaagaagtgatatttacggaaacaaagtgagtagcagagagttttgtcatcaggagattaaacaaaggaagaagaacaatagtcatggtgaacaaggaccagtttgtatgtttcattaagaaaaacagaggattggggaatatgtatttgctccgttttgttatatctttttgtgtgttttttcttgggtttgtcttgtaggtgttggattgagttgcttacgcttattatatatagactatgaaaaatattcatgataataataaaaagtttattttaaattaaatcaattttattgcaataaaatgtagaaaattcaattctcccaagactttttattttggaaaaaaacatctaaataattgtgaacagcatttgctttcttttgtttttactttatccacaaaattattctcaatgctcccaaaagctgtcctagctattccttcatcgcccatgaggtaactcatgaccaatcacatcttcttcatattccctgatttgttttcatcatttattcgatcttcacttctacatatacgtgcatcttctagataaatctaaagacgctgttatgaaactaaattaatgtgaaagattaattgcataaatttatcggaagatttgtaatagtctttgtcgtgtttaggttaattatcattgtacaatttttacgtgctcaatttagactaatatttttgtttcaagaaagtgtgttttgtttaatccaaagatgaaataaaataacatatatgtaatcaaaacgttggcgtttacactttatagatgcgtgcaaaacaatacaagaagaagcagttacttaaaaaagccttctatgaaagtggagaatacaaatggaaactggcaagtgtaggatctttaacaaactaaataactaattaaaggtatatgcatgtaaagagttctttggcacaaaaaaaatatgtttcttaattcaagagtgacaagagtcctactatatatcccatgatcacttacgatgaatacatacgtcgtcaaattacgtacacatgatctaacaagatctctatgtctaacaacgtacacatgcaactgtaaaaacgacatagatatgaacaggcgttgtcgacagaaagttttggtcgataagaaaaggaaattaacagtcataaccttattttctttttatcccattttgatactcttttggaaagggaaattaaaaaaaaagaaagcgcaaactgaaaggccacaattaaattaaccccccaaaaaatctgaaaggccattatggatgggatttggatgtaagaagctctttttttcagtctttagtttgaaaattttaagttaatttgatgatctaataaatttctaactcctaaactctcaaacccaaaactaaagtaaaaatcctgtctatttgaagcctataacttgtttatgagaatctgagatacatgttttaaaactatgaaaaaacattagaatgtacattccacaaattatacagatatatattgccaatagatttataagattatcttctagcagaaagcccatttgtaaatgtggaacacttaatgagactgatttccttcttcactaagacaagctcaacattatacacttttctgtccttttttttggtgtctctctttaataatttatggactttaactttgcttttccgaaatatgaaagaccccatcttgtaaatagaatgcaattaacttctctttttgatagtttttgagtcacctattaaactttccgttatggacatgattgatctataaaagaaattttcaaattatgtggtggctggctaagttgataaaactctcccatttctttagattatccatttgtttcgtagactttgtatcatccaaaattttctctcctttattcagaattctggcgcttatgaaacttttcttgaacacaattttaaatgtaaaaaggtgaaattaatatacgtatggacccctcggaaagaaaaaggtcatatacatatggtccttgagcaagtagctttgatttgattctggaatatatggctctaccgctctagtctagtgatacacatcatatttacatattagtcgcttaattcattgttgacttactcgatccattgtcatgaaggatttctaagtttgatatgtcttcttctaagggatttgattggttggggacttgggactgtgactatctgcttgagttctatctcttcttgtgtaactaacccaagtaacaagcccagttcaacattattattgttcgatccaaactaggcctaatctgaacagaacaaaagtatataatttgagacgttattaaactatttattaataattaaaataaattcccgtcatcaaaaaaagtaataaagtaaagtatttcgccgtgagagaaagaacaatcaccatcgtctagggtttcaattcattgttccagtacttcatcgtagcgccgctcctctcttgtccagactccagaagattcaatg

SEQ ID NO: 21724 - DNA, 3000 bp, Unknown; identical to SEQ ID NO: 21723
  misc_feature (1)..( 3000): 2750-1469P.txt file - cDNA_ID_2025463; gDNA_ID_2926207; Annot_ID_202326

SEQ ID NO: 21725 - DNA, 3000 bp, Unknown; identical to SEQ ID NO: 2125
  misc_feature (1)..( 3000): 2750-1469P.txt file - cDNA_ID_2025487; gDNA_ID_1620491; Annot_ID_158618

SEQ ID NO: 21726 - DNA, 3000 bp, Unknown; identical to SEQ ID NO: 2248
  misc_feature (1)..( 3000): 2750-1469P.txt file - cDNA_ID_2025511; gDNA_ID_1620511; Annot_ID_159122

SEQ ID NO: 21727 - DNA, 3000 bp, Unknown; identical to SEQ ID NO: 7287
  misc_feature (1)..( 3000): 2750-1469P.txt file - cDNA_ID_2025553; gDNA_ID_1621137; Annot_ID_172717

SEQ ID NO: 21728 - DNA, 327 bp, Unknown; identical to SEQ ID NO: 341
  misc_feature (1)..( 327): 2750-1469P.txt file - cDNA_ID_2025553; gDNA_ID_1564117; Annot_ID_148882

SEQ ID NO: 21729 - DNA, 2584 bp, Unknown; identical to SEQ ID NO: 2615
  misc_feature (1)..( 2584): 2750-1469P.txt file - cDNA_ID_2025601; gDNA_ID_1620566; Annot_ID_160701

SEQ ID NO: 21730 - DNA, 3003 bp, Unknown
  misc_feature (1)..( 3003): 2750-1469P.txt file - cDNA_ID_2025614; gDNA_ID_1620320; Annot_ID_153303
aacttaagtgacaactaaacatcatgaatattcaggaaatcctgaaaatttaaacagaattatagtaatttctgaaaaactcaagaaattatggaataaaaagaaaaaagaaaaaactatggacacttttaaattactcaaactagtttaaggcttttggaaatttcactttttgcttttttttaactcgagaaaattacaattttatgtagacacattttgctcacaaatgtttatttatatattttccataaatttatttttcagccttttatctacaaaaatttatcttctaagaatgtttttaccaccaaaaataataaatataaaccacaaaaataaaattatatattttatatatatatatatatatatatatatataacaatttttatctatgatatctggcagtcgcagttggcttaagccgcctggccgcctctggagggaccaaaataattcaaatggtaattacgtgccttggcttccaaccaacgtttttgactagggctgactcggtagcttgttatgttagtataagagttaactccatctgatactcagctgaataaactcatacgtacaaaggaatattatctaaaagacgagagtacaagtgagaaatggcgttaaaggtgatcaagatctcccgagtcagccctgcaaccgcctccgtcgacccgctcattgtcccactctcgttctttgatttacagtggcttaaactcaaccctaccgagcaagtcttcttttacaaactcaccgaatcatcatcatctcgcgacgttttctactcctccatcctccccaagctcgagcgatctctttcactcatcctcactcactttcgcctattcacgggtcaccttaagtgggattcacaagatccaaagccgcatttagttgttctctcaggagacacactctctctcacagtggctgagactgatgcggatttctcacgtatctctggcagagggcttcgtccagagctagagttacgccctctaatacccgagctaccgatttattctgactcgggggctgttgtatctctgcaagtcactttgttcccgaaacaaggcttctgcattggaaccacagcccaccatgtcgtcttggacggcaaaacggctgaaaaatttaacaaagcatgggctcacacttgtaaacatggcaccataccgaaaattctaccaacggttttagatcgttctgtcgtcaatgttccagccggacttgaacaaaagatgctcgaacttctgccgtatcttacggaggacgacaaagagaacggaagaaccctaaagctacctccagtcaaagagattaacgctaaagacaacgtcctccgaatcaccatcgagataagtcctgaaaacattgagaaactcaaggagagagccaagaaagagtcaacacgcgctgagcttcacttgtcaacgttcgtagtcacgttcgcccatgtgtggacatgcatggtgaaggcacgtagtggtgacccaaaccgaccggttcgtttcatgtacgctgctgattttaggaaccggttagaaccaccagtccctgtgacatacttcgggacttgtgtcttagccatggatttctataaatacaaagctaaggagtttatgggagaagatggatttgtcaacaccgtcgagattctcagtgattcggtcaaacgtttggcttcacaaggggtagagtcaacttggaaagtgtatgaggaaggaacaaagacaatgaaatggggtacacagttgttggtcgtaaacgggtcgaaccagattgggatgtacgaaacggacttcgggtggggaagacccattcacactgagacaatgtctatctacaagaacgatgagttctctatgtccaagaggagagatggtatcggtggcgtcgagattggcatctctttgaagaaacttgagatggatacttttctgtctttattttacaaatggattggaaactgaaaacgtacggtcttaatcgatcccagcttttgcttatttgtatttttatttctagttcaataattgccctatatgtactacgcaaatttgtattgattctgtcttttgaattctattttttggggtacaataatcatccatatttgaaatattagtagacttttcatgatcagtgaatctatttccccctactttgaaaaatcgaaactttgatttcagaaaaaaaaagctgtgatacgcagtggcggaggtacagcttcaggaggggggtcacttgaccccatgacttttacaaaaaaaaatttaatagcttaattatttggtatttagtatataatttgggttcaaatattaaattgacccccttactcgaaattcaaatcctatttttgccccactcaattaccatattttgtgtaaatcaatctcattattcttcttctattaatttcctgaaccctatattaaattttggtaactggttttattattcccctaaaaatacatgaatttagatagacaaaacaattaaataatgtgggtactaatctttacatttagataaacaaaaaacaattttagtaacaaaaaagatgtatatcatttttcaccagatttttagtaaacttttaaatagaaaaatgatgaataacatatgactactcgtgtattttccacaaagaattttttttcggaaaaacaacaataatttacgaaattgtgatattattttttgttctatttttttatctataaaaaatttttttttaaaaaaaatccttgttttaattttctcagaaacgtgggaccacaatattttccaaagggttcagagtttagcgggccgaatatatgtcataggcccataggctaaaacaataagggtagttatgtaaaatccgctcacacacactcctcaaaagccctaatcgtttatcataattcctcaatcccgtcttcaagtatcgccgacgccgcagcacaaaggaggagaagaaggatcaaaggcgcgacaacaatg

SEQ ID NO: 21731 - DNA, 3000 bp, Unknown
  misc_feature (1)..( 3000): 2750-1469P.txt file - cDNA_ID_2025627; gDNA_ID_1620635; Annot_ID_47335
ttgggaggagaaacaatcgttcgggatgttgatcagattcattttgtcgttgagcatatatacttcaacctcattgaaggtaatagatgaatcattaggatgcattccatccaagtcaacggatatcatgtaataattaattacaataatgagtctatctatatatgtgtgttttcagtacataaactttacatcttctttttctttttaggatcactcacccataaaactttaattcatatgagctgtccgtatatatacggtcccccggttagtaaaggatttaatgtttaaattttattttgtatcaaatactatttactaatgcaatttatcatttatatttatttttctatctcattacccgagagattactctcaaatttgtggtagacgtgtaagttttatttacaacattttattattatttgttgttttatgttaacttaatactttctcttttcgttttctattttctagtcatatggaaaggatgatatttacaaatgccaaagtggcagcagcggtagcaaattatttgcccgatgtgctttttatttcacttcggaggactatctctccatttcgtcacattaagtacgttttgtttcgtaaattacttatcaattaaatttatatattaatttgtttacaatattcttggaatgcctttactcagagatatcatacgatatttgattttgggcaccgccaaatcggattttctctcgccacttccaattacgacgacctggaccacgaagacgacgtagacaacgaggacgacgaggacagtgtggacgacgtggaaagactcgttcactcatcaacattaagctttgtttttttcggtaagaactaattaagcttttatttttttctttgataatgagaactaattaagcttttaagacctttcatgagtgtgtaatattttatgaaatatctttataagatttaactgctattttttgtgtttgcgtttttatgcatttgacgttaatcacataaattgtttgtacggtttcgtaacatttcaaaatgcttaacattagaatcttgtttcatcgatcttttattatagtaacaagcgattgttttttttgttttgagtacatttgaaagtaacggaaacttagtaaaacgaattcacgaagagaaaatgaaaagtgattaagtcatctcctcaacaagcgattgttataaagtaataaaattatttagatgaattggttgttttaaaataaaaggttgaaaatgttgaataactatttattttatttttacgatttgaaatgaataggttggaaaattgattcaactcattcaacaaaaaaaaaagaaaaatgaacaaattataaaagaaacttgttcaaccatttcatctactcttttgtagatgaatgagttgaataatgttcaacttggttttgctgaaaatggttgcatagagatgaaataattggaaattttgagttgaaaaataaaagttgaatattattcaactcatttctctgtgaaatagaagatatacaagttgaaaaaatttctttataattagtttatttttccaactttttaagttgaaagggttgaatcatttttccaacttattcatcttaaatggtaaaaaaaatagataaatgctcattcaactctttcaacttcttaattttaggcaaccatttgcacctatttttccaatcattcaactatatgtcattcatttggagcaattatatttcttaaatctatatatttatttttatttctgctataattcaaactgtcaaaccattaccaataagatgtggagctaattcaacataagtatataaagtatatgaaatgtatagatctttccacttattttcaaatgattaaaattgtacatggtgttagagcccgaacaaacccaagataaatgagcataaagatgatctcacttctaaaaccatttttgaaccaccatttctactgcattgccatttttcttaccgccttttttttttattttgattttcataaccgctaaaaaacttttcaccacatcattatattatttggtccaaccaaaccaatggtccaagatggtgccttttttttttgggctcaaagatacaaatcctctcttttgatttcttctctcagcccatgacgtgtaatgaatgaagaaaaaatcaataacttacatcacaatcatatatcaatttcatgaatccttgaaaccaaatacataccataccgacctctgtttaaaagacttatcttttctccaacaaatgcgacaaaaccgtgtggacgaatcagagagacacatgtataccaatgccgacttctttttatgcaatcgtagcgtctctctcacgtggtaaacgcgtcgccatttttataatacgaccacgtttgtgactccattaatggcggtctcatgctccctcaattcttcatgatctaactactaagagatctgattcactttcttcacactctccgagtctcatcttcgcttcttccctagctcttatctggttagttcctctctttctctctctctggttagctaattttgctttgttcagatttacagagattttgcttatctagctttgaatcagtcttgggaacatagacaaaatcagaattcgacctttcaaattaatgggtctgattgggtttatcgagttcatcacccgttttcccagtcatctataaagtttgagtttttaattcggttatatactctgttttgatacggagatatctaattgctccaaccatttagctttctagatctcatgagatgtttgcttttcattgtacagtttaaattaatgttaagctaaagagtgaattttgatgtggagctatttggctgaatataatgctgaaacatttgtgaagatttagatgtttgattgattagaattcttgtgcaaagtctgatggcttcttgatgctaaagagttatgtgtattaattttgatgcaggacacaatg

SEQ ID NO: 21732 - DNA, 3000 bp, Unknown; identical to SEQ ID NO: 21731
  misc_feature (1)..( 3000): 2750-1469P.txt file - cDNA_ID_2025627; gDNA_ID_1620640; Annot_ID_47475

SEQ ID NO: 21733 - DNA, 3000 bp, Unknown; identical to SEQ ID NO: 21731
  misc_feature (1)..( 3000): 2750-1469P.txt file - cDNA_ID_2025627; gDNA_ID_1620635; Annot_ID_162846

SEQ ID NO: 21734 - DNA, 3000 bp, Unknown; identical to SEQ ID NO: 21731
  misc_feature (1)..( 3000): 2750-1469P.txt file - cDNA_ID_2025627; gDNA_ID_1620640; Annot_ID_163031

SEQ ID NO: 21735 - DNA, 3000 bp, Unknown; identical to SEQ ID NO: 21731
  misc_feature (1)..( 3000): 2750-1469P.txt file - cDNA_ID_2025627; gDNA_ID_2926178; Annot_ID_140430

SEQ ID NO: 21736 - DNA, 3000 bp, Unknown; identical to SEQ ID NO: 21731
  misc_feature (1)..( 3000): 2750-1469P.txt file - cDNA_ID_2025627; gDNA_ID_2926178; Annot_ID_200001

SEQ ID NO: 21737 - DNA, 1563 bp, Unknown; identical to SEQ ID NO: 2296
  misc_feature (1)..( 1563): 2750-1469P.txt file - cDNA_ID_2025638; gDNA_ID_1620516; Annot_ID_159269

SEQ ID NO: 21738 - DNA, 3003 bp, Unknown
  misc_feature (1)..( 3003): 2750-1469P.txt file - cDNA_ID_2025646; gDNA_ID_2936567; Annot_ID_194648
gaaccattctgctttcgtattgcaatctggacaggttggtagcttctgtttcacttaaaacctatcctgtgagtatattgtcgtttgccataatcactcatatttgaaatccggcacaggttctcacttgtggggataattcatcgcattgctgtggtcatttagatactagccgtccaatatttaggcctaagcttgttgaggctttgaaggggactccttgtaagcaggtagaattgataccaaccctatctagacctattgattttctaaattggttctatcaaacattgacaaacttatcttctataccaggtggctgctgggcttcactttactgtgtttctatcaagggaagggcatgcatatacttgtggatcaaatacacatgggcagcttggtcatggagataccttggacagaccagtacccaaagttgttgagtttcttaaaaccattggccctgtggtgcaaattgcagctggacccagctatgttttagctgtaacacaggatggctcggtttactcgtttggctctggttctaacttctgtcttggtcatggagagcaacaggacgagctccagccgcgtgttattcaggcttttaaaagaaaaggtattcacatactccgtgtctctgcaggcgatgagcacgccgtggcacttgattccaatggccgtgtaagttctttgtttctatctcgttctgtctccatttggtctcagaaaccaaaagaactcttgttttaataattctttcttgcaacttaggtctacacatggggtaaaggttactgtggtgctctaggccatggagacgaaaacgacaagatcactcctcaagttttggtcaatctcaacaattgccttgctgtccaggttagattcgtcccccatctgtaccatctcaatgtctgagataatgatccctttacaccttgttcctatattctctaagaccttcagcggtctctaagaactaataagtgatcagttcaattagaatcaaaacttagcacaagtattttagtttagaggattttcagtataacattcagtttatttttcggttttggtaaagaaaaccgaagctggatgtgttggcctttgtttgtatggagttttgctccgtttaggatcagttagtcagccctgatcatgactctgcttttacttgcaggtgtgtgcaagaaaaaggaagacttttgttttggtggaaggtggattactatatggatttgggtggatggggtttggaagccttgggttcccggacagaggagtttcagacaaagttcttaggccaagagtattggagtgtctgaaaccacaccgtgtctctcaagttagcaccggtttgtatcacaccattgtggtcactcaacgtggtcgcatttttgggtttggagataacgaaagagctcagcttggtcacgactcactccgtggctgcttagaacctaccgaaatctttctccattgtggccgttctcgtagccggctttgttgatccaaggtatagataaacaaccatgtttgtatgaaccggattgagattggatttaccggttagtgtatcttgtattgatttgtatctgtttgatttcttcaagttgtgagagtaatagaagatatttccagacaccttagtgcagagaattatgacatgagttaattaatctaagaagttttacaacttcaactacataataacaaataccttaactcttggtgatagtagatccactcaagacttagcaaaatatcttagtctttagaacattatagaatgtaaaagtaaaaaactgaaaacaacctagaagcaaatgaaggaatcattgtaacgaccaagatgcaaaagaataataaatcactcaacatcgatctcatcatcttcaggaaacatgtgtgcaacaacttcaatctttacttttatcttctccaatttctccagaggtgaattcaatatgctttgaatttcttcagcaaatgttttcatgatccctagatacggaggaacaccaacatcattgaggatttcgtagattgtggctttgatttgttcttcatcttgaccaatgaactcgtctcgaccatatctttgaagttgatttgtagtccttgttttaaccttactggacatgtagtcagattctccatcactatttggctcaggcacttttgtgtagacaacttcaaaatcaaacaaaaaagtctgacgatcttgagttgtttctttcgaataatagattggcgtcaccatacatgtactatccgatacatcatccacaatacactccataatctctatgcaatgatgggaaaaaaagaagttaagagagagttaggtttttcaagctatgagagtgtataaaaaatatttgtgtgaaaggaaaattgtaaccaggaatgagtaattgttgggattgaatacgagattttaggaaatagttacaataggaattcttcattaaattagattgatcataactacaaaagttaacattcatacatatcgttaaggttcgatgaaccataaatagatattccgatatttaaaatatcttatatgattgtattaataaaatatctcatatattcaaaatcatatttcacttaactatttcgctgtcaaaaaatatcctaccacttttccaacatgacaaaaaaaaaacatactacttttctatcgtggcacgtttaaaaaatcatatcattccaaaaagatttactcgtcagattaaatatctaatcatcattggattcacaatttgtttatttacctaccagacactttaaaaaaaaagattaactacagaataattttgtctaaaaagaaacggataagaacacgtaagacatgtcagtcttatcttaaaatccaagtcagcatctcgtgtaataataatctcgtacctttataaaacccctcattgtcttcaacaaaaacataacacatttcaagcattggattaatcaaagacaaagaaaacgaaaatg

SEQ ID NO: 21739 - DNA, 3003 bp, Unknown; identical to SEQ ID NO: 21738
  misc_feature (1)..( 3003): 2750-1469P.txt file - cDNA_ID_2025646; gDNA_ID_1620500; Annot_ID_158841

SEQ ID NO: 21740 - DNA, 3003 bp, Unknown; identical to SEQ ID NO: 21738
  misc_feature (1)..( 3003): 2750-1469P.txt file - cDNA_ID_2025646; gDNA_ID_2936567; Annot_ID_143719

SEQ ID NO: 21741 - DNA, 3000 bp, Unknown; identical to SEQ ID NO: 8751
  misc_feature (1)..( 3000): 2750-1469P.txt file - cDNA_ID_2026192; gDNA_ID_1971875; Annot_ID_176686

SEQ ID NO: 21742 - DNA, 2686 bp, Unknown; identical to SEQ ID NO: 253
  misc_feature (1)..( 2686): 2750-1469P.txt file - cDNA_ID_2026192; gDNA_ID_77261; Annot_ID_147167
  misc_feature (86)..(86): n is a, c, g, or t

SEQ ID NO: 21743 - DNA, 1814 bp, Unknown; identical to SEQ ID NO: 90
  misc_feature (1)..( 1814): 2750-1469P.txt file - cDNA_ID_2026252; gDNA_ID_2404; Annot_ID_145701

SEQ ID NO: 21744 - DNA, 1144 bp, Unknown
  misc_feature (1)..( 1144): 2750-1469P.txt file - cDNA_ID_2026339; gDNA_ID_1590999; Annot_ID_150387
aaacaaaacaagtgttgaaatgataactcccaaatttgaacttactttcctagcaaataagaaattgttttaattaaaaaaaaaaagcatatgcagtctcaaattgtttctaagaagtattcacgcaccaaggttatatttgtagtgacatattctacaattatcacatttttctcttatgtttcgtagtcgcagatggtcaatcttttctataataatttgtccttgaacacaccaaactttagaaacgatgatatataccgtattgtcacgctcacaatgaaacaaacgcgatgaatcatcatcaccagctaaaagcctaaaacaccatcttagttttcactcagataaaaagattatttgtttccaacttttctattgaattgattagcagtgatgacgtaattagttgtgatggcagtgatgacgtaattagtgatagtttatagtaaaacaaatggaaatggtaataaatttacacaacaaaatatggtaaaaatctataaaataagaggttaagagatctcatgttatattaaatgattgaaagaaaaaaaactattggttgatttccatatgtaatagtaagttgtgatgaaagtgatgacgtaattagttgtatttatagtaaaacaaattaaaatggtaaggtaaatttccacaacaaaacttggtaaaaatctttaaaaaagaaaaaagaggtttagagatcgcatgcgtgtcatcaaaggttctttttcactttaggtctgagtagtgttagactttgattggtgcacgtaagtgtttcgtatcgcgatttaggagaagtacgttttacacgtggacacaatcaacggtcaagatttcgtcgtccagatagaggagcgatacgtcacgccattcaacaatctcctcttcttcattccttcattttgattttgagtttttgatctgcccgttcgaaagtctcggtcatctgcccgtaaatataaagatgattatatttatttatatcttctggtgaaagaagctaatataaagcttccatggctaatcttgtttaagcttctcttcttcttctctctcctgtgtctcgttcactagttttttttcgggggagagtgatggagtgtgtttgttgaatagttttgacgatcacatg

SEQ ID NO: 21745 - DNA, 172 bp, Unknown
  misc_feature (1)..( 172): 2750-1469P.txt file - cDNA_ID_2026392; gDNA_ID_1591528; Annot_ID_151117
ttaacttcaatgaaatcaatgtttaacaaaaaaaaaacatttaagaaaggataaaggatccaacagtaaattgcacacgacagccaaacggatcccagtcggggctccgacaaagttttaatggtttcttaagaaaaatcaaaagccgtttgctttttttgaaatttccatg

SEQ ID NO: 21746 - DNA, 3003 bp, Unknown
  misc_feature (1)..( 3003): 2750-1469P.txt file - cDNA_ID_2026392; gDNA_ID_2684232; Annot_ID_192301
agaagggttttgaaactttgaatgatatgtatgaaatttgtctgagctctaaggtctcattctcctaggagttataatatgtggcttttgacttttgttatgaaagctgagaagcaaagattataaaaaaaaatgagtgtagcaaaaaaagagagaagtgtgttagttttgtagagaatgatatgatattttccccaaatttggtaacttatgacgattgatgatatttctgacatttttagattttgctttttttgacaccaatcttatttccaaatttttttctctatcaaattattatttttcaaaaaaatcataatactatgagtttgatgatttcaaattcacattcgctggacatgtgccacaaatgaagttagtgcttcctagagaattgtgctctcctcaagaaactcactctacatttggattctcattcaacaaaagatgaagtcgagaaactcctcaaaatcccaagagcctctaccaaatgtgaggttgtcttttatgaatcagtttgatgtaagaagttcttgctacacaggaaatgcatgtctagattttgaaggtacttttgtaagaaatcatgttttctatgcaatcaagtttattactctcttgcttagaccatgtacataggtgatttattttgggtatcagtagcccaaaaattatattttaatagatcaaaccatgtatttgggcctgatccgtataattgtactgatacctttgatacttagtatcaggtgatgtggcagcacacgattggtcagcgtttttgctcaaatcagagaaagaaaaaaaaaatcttttgtaatcctatgttttaatatattactttttgattttgcaaatttttttttttatatatttaaaccgatctcaccaatgcaaacacattttgtaggagtatcataaaaatctcaaacaataaacaaacattataaatagtactaaaaaattctttatgatactaggatcaattatgggattggcacaataaagtgtggtattgtaaaattggggcctttctcaaatgcttatgggattaggcacttctaaataatcaaaatacggatttaaccttttattactttgtttactttcaaaccaaagagatatgaagatcccgagaagcttggattgatggtgaaatgagaaaccagagatgaagaagatgatcgaaaggcttatcattattaggatttgaaatgattttgttgtttgaatcgaagtttgtgtttgatttgagaagaattaatggtggtggtggatgaaggggagatgaaattatgggttgacgacatgatggactacggtggcgatggtgagccggtagcaccgccgtacaaatacttgtgtatatacgcacatatctacacatatagaaggtgaagattgggtttgagtggatttgcatgatccgatgttcagaaactcatcatcaccatcaaaaactcatcatcacaatttggttattctctaaagttgaaacatttgggttccttatgcagtatctttttagggtttagttttcttacatcaaaaaccaattaattgtttattgggttcatcagacagtcgttggtggcggagggattgttggtggcggaaggatcgtgaagtcgaaagaagaagaaaagatgtgttgatggagctaaattacaggggtaaattagtcaatctcattcacagaaaatgctttatcctgttagccctttatgaaaatgctcaatccctaatttttgggccataaagtacccatatatgtaatagcccctatgatactatatgagtatcacccatatacatgctcttatatttttaaaatttaattctcttgagaaggttttcactcttttcttatcttccttaaacatgtataaacagtaagtactaaatataaataagatattgaaaacacaagcattcttaaaccaaacatagaaatcatgtgtcgcatttgttccaatatatttaagggcaaccgagattagatgttagtatcgcaactttagaacattttgatctaaagttgactttacgctttccatattctacgcttactctttttctatgggtgtacaatgttggctatcgacaagagaagtgaagaagacaaggcatttagcagtccctcaaatttgcaatacaaaaaaaatgatgggttttggggaaaatgcaaaagtcatcgtgtatgttgaataatatataatttttgtatttttttagcttgtagaaattgaattttgctaggttaagcagcattgtcacttgtaaattaattattttagagcaaactcattagttttagtgaaattaaaaaaaatgtgaaaaatgaggttattagaataaataaatcgaggattacaccaacaaataagtattactatttatttatcccaaaaaaaaaacaatcatttatatgttttccaaattagccaaagaagtctttcaagccaataactcttatgtttcatgcaaatcctccatgaggatcaaattagggactgttcttgatttgccattttggcgcccaaattttttggatttactatttacttcaaagatattatatttgtcattttggtcacttaaaaactatacatttgagaatattttttatatacaatatatacttaataacaaacactaaatcccaaaagaaatggaacaaaataaactcaaacataatatgtaaaattattttttagatataagaaaataacaaaatgtaaaatatttaaggtaaaatgacaaaatcctcaaatgcaaaataaaataaaataattcgtattgattcatcacattatgtcttcagtttctatttaacttcaatgaaatcaatgtttaacaaaaaaaaaacatttaagaaaggataaaggatccaacagtaaattgcacacgacagccaaacggatcccagtcggggctccgacaaagttttaatggtttcttaagaaaaatcaaaagccgtttgctttttttgaaatttccatg

SEQ ID NO: 21747 - DNA, 3003 bp, Unknown; identical to SEQ ID NO: 21746
  misc_feature (1)..( 3003): 2750-1469P.txt file - cDNA_ID_2026392; gDNA_ID_2684232; Annot_ID_137639

SEQ ID NO: 21748 - DNA, 71 bp, Unknown; identical to SEQ ID NO: 206
  misc_feature (1)..( 71): 2750-1469P.txt file - cDNA_ID_2026504; gDNA_ID_28591; Annot_ID_146703

SEQ ID NO: 21749 - DNA, 836 bp, Unknown; identical to SEQ ID NO: 182
  misc_feature (1)..( 836): 2750-1469P.txt file - cDNA_ID_2026537; gDNA_ID_24979; Annot_ID_146470

SEQ ID NO: 21750 - DNA, 1245 bp, Unknown; identical to SEQ ID NO: 439
  misc_feature (1)..( 1245): 2750-1469P.txt file - cDNA_ID_2026674; gDNA_ID_1590997; Annot_ID_150380

SEQ ID NO: 21751 - DNA, 3000 bp, Unknown; identical to SEQ ID NO: 661
  misc_feature (1)..( 3000): 2750-1469P.txt file - cDNA_ID_2026708; gDNA_ID_1620304; Annot_ID_152770

SEQ ID NO: 21752 - DNA, 3000 bp, Unknown; identical to SEQ ID NO: 10974
  misc_feature (1)..( 3000): 2750-1469P.txt file - cDNA_ID_2026721; gDNA_ID_2214468; Annot_ID_182910

SEQ ID NO: 21753 - DNA, 3003 bp, Unknown
  misc_feature (1)..( 3003): 2750-1469P.txt file - cDNA_ID_2026721; gDNA_ID_1972067; Annot_ID_178414
atgtacataagaaatcacaattacataagataccagtcgaaaaaacattaatattgtgtagcgtttcgaaaatatactctgtttgaaactttgaatataagcgggttttcactgtaagatgttaaatttagaaggatttttttttaaatctatcgtaatattaatgacagcaataaattgggttatcaaaaatgctaatggcgtttaaaagtttttaggtgttaatttggtaggagatgtatcagttgcgtgtcctacgtgtaattgtgaaagcaacaacgcaaagaaaatgaagccttgatgaaaatatatgtttaaaacaaaattaattgacggaaatagtatgttttaaattaatgttctaattgtacaatagaaaaagcatgtacatgtacaaaactcagttatattgtaatcaaatttattgatctgtaattcatgcttgtttatgacttttttgaccggccgatagagcggcggacgcaactttgggatctgaagatattaaaagaaaatgttcctaaagaattctaatatcgaagttgattctcatcgtttcttactttatttctttatgatctcaaaatcatcaccctttagaaaatttgtttcatgaccagaaaatatgcaagtgttaacatgttttaatttagactgttttcaaaatttacagttgttatttagtaaaatttagcaatgaatacaaacaaaacgatacaccaaattaatgtttgtagtatttactatttagtaaatgcatggtactgtggtagactcgctaagtaaattgcatgtgttacattttaatatgtaaccagtaacctcatgcatgtgtatctctttcaagtttcaacaacctttttgttttttagaagtaaaaacttaaaattctttaattggcggacagaaagataaggcgattactcaccagaccaacaaaattaaatggaaattaaatacatatagagtaattaaatggctctgtgaccaaaacatggaattaatgggcgttattcattagaccagtaaaattgactggaaattaaatatatatagtaatgatacgatggtcctgcgacgaaggaggagccatgtctacgcaactcatccaataagcaacacaagctattcttttttacttctttcatgattgtcagtttcttctttcatttattctatcattgcttgagatatgtattctttaatagaagttaaatagtgtgtacatataccatgttgtcactttttaacaaacaaaaagtcatatggtatcatcatcatgtcgcatgaagaggagctacaacatttcttgattcatgcgttacgtggtctaacaaagggaatgtgatgaattgtcgctctgggagtaatttcgaaacgaaagttttcttacctaaaactctttattaattatctgagtttctgtagagagaaatagcatcaatttaaagcttgaaaagtttaacacatctttgacaaaacaaatttaggaagaccaaaaccaaaataattactatttctctctatctgttttcagtggggggacgaaagacctttctttctttttggtaatgggccgggccgggccggtttaatccaaggcaaatggcaagatccgtagagttttacatacaaactttactctagtgtaaacaagaaagtcagaaaccgcatgcgttatagttagtgaaaggttcgatttctgtcaggtcttcgcatccgtcacgtttgctatctcgaacttcagggagcatattacaaacgtaaaagaaattgatatattacgctaattaatttattcccgttgttgtcaagaaactaatgtcttaattagccttttaggttaaaccctaatttttgtcgatttaagttttgaaaaacgaattttgattgtttggattttggtaaaaggagatcagagttcatcgctggtaccatgttggttaactggctcgccgggagacccagcaataagttttatgctctccaaaagtcaatagacgagctacacaaggtattatcatatatattggcaattgatgtttttaagttcctatttatttttctgtgacattgaatctattttcaaaagcacccaataatgtggttctcattctttttttctgatcactaatgtgtgttcacctcaagacgctcgagtctcttgaacaaaaagaaaaggtttctctgctgccgtacagtacaaggaagcgaaaacatgttacctggcaggttacaaaacatgttacctggcaggttacaaaacaagtatgaaacatcttttgattttgaagcacgaaaaagtaaaatatcttattatcttttatggatcaatttaaaacatgtgtgttgaatcttgtcatgcaggtgctaaactttgtttgaaagagaagaggattcacgagcgaacagctcaatataataggaattgtcagcttctcttacatgaagctgtgagttttttctttttctttttgtgtcttactaaattatttttttattaactactttttaagcgatgaattgaatttattgtcactatttttctttcttcttaattatacagctgattttgtgtgaaagtagaaaagaacaaatgattgaagctatgcgggatggagattttactacgcagaagacaatgcaagtttttatttatctttgtttgttccttttaatcttaacttatttgtatcaatctaactcatgtattatcctacgtctatctagactgatcggacggacataatgtgtatccatatttcttggctacgcgtgtccaccttttagagactatgcctttaggtagtagatgttttactacaaaataaacatatttagtcaaataaaataaaatttgagagaatcttctacataagtagctcacagacccaaccaaaggaccattgaataccatatatatatagatacacagacatataaacacacaaatattcgtgtttttttcaaactgtgagagaaaaagaaagagagaaagagatg

SEQ ID NO: 21754 - DNA, 3000 bp, Unknown; identical to SEQ ID NO: 9056
  misc_feature (1)..( 3000): 2750-1469P.txt file - cDNA_ID_2026743; gDNA_ID_1972047; Annot_ID_178244

SEQ ID NO: 21755 - DNA, 3000 bp, Unknown; identical to SEQ ID NO: 9056
  misc_feature (1)..( 3000): 2750-1469P.txt file - cDNA_ID_2026743; gDNA_ID_1971974; Annot_ID_177583

SEQ ID NO: 21756 - DNA, 3003 bp, Unknown
  misc_feature (1)..( 3003): 2750-1469P.txt file - cDNA_ID_2026764; gDNA_ID_1620549; Annot_ID_160255
tctaaacgaaagtgtatgatttattatgttgtttttgttaatttgaaaagtatgaatctattggcttatgcaagtatgggatatgtattaggtgcacagacttgacagagactgtagtggacttttggtgttggcaagaacacagacggctgcaacagttcttcattccatattccgagagaaaacaactggtgcatccgcatatgtaaatcctctgctttctctccgatctttccattgcttgtcatggatcgtgggaaataaacataagtttctcttccaatgacttttattttacttggcagggtgtcaaaaagaacgtaaaatccttgaaaagaaaatatatggcacttgtgatcgggtgtccaccacgtcaaaggggacagatttcagcgccactcagaaaggtcttcacactctgttttagctagagagttttatccatctgagtttttagtctattttgttttatctaggagttgctttgtttgttcgaattcggtcattgcttttgctgctttactggagtcaaatttgaaggtaaaatatatgttaaatatctgggtaggtggttgtggatgatggaaaatctgaacgtatcactgttaatgacaatggagaactcgtttctactcagcatgctatcaccgaataccgagtgattgaatcttcaccacatggttagtgagactgacttccatttctattcagttaaacttaaagcaaatgattttgccttgagtttttagcacattgttgaattgcaggatacacatggcttgagcttcgccctttaaccgggagaaaacatcaggtctctatagatattcagtttttgtttcaactttctctcttttttatgttctcttaatactaatctgttttcaactgttcttcgattgccacagcttcgtgtacactgcgctgaagtgctaggaacaccgatagtcggggactacaaatacggttggcaagctcataaagcccgggaaccttttgtctcttctgaaaacaacccaaccaagcaatcatcatctccttttggattggatctggatggtggagatgtctcttcgaaacagccacaccttcatctccattcaaagcaaatcgatctgccaaacatatcacagctcttggagaaaatgcaggtctcttcagactctgatatttcggatctcgatagccttaaattcgatgctccattgcctagtcatatgcaactaagctttaatttgttgaaatctagagtcgaaacttgtgacaaaaattagattttttttcttaccgagctttcttctttgtgttcattgaggcccaagtatttgtgtatttggacctgaatattctcatacaaagataaataattataattaaatgatttttcgcatataatcattattgtggtatgattaacacagttggtgtgatgactgattgacacaataatcaccgtttggattcgattcctttaatacttgtcactagagttgtttgactaaacagctaacttgtcactagagttattgtgtttgtattttgatctgttattaatctgattgggtataattacagatagagagacatctatattgtaattaagacaatcttaaagtgtaaactaaaaagatctctctgacctctggaaaacgaaaggtgggtgacacatcactctagctatgaatatgatgaatattcagtacctaaccgaacaaagactggtttggtatttttattggaaaaaagagataaataattgtgaatgtgaattatcctgtctgaaaggtaagctgatgacatggcgttatatgattggacgagcttcagaacaaaagagtagcgtcgaatcgaatctttacctactacactttgaactttgaagtacattacctacttcctccttgatcgaacgtcttttctcaaaactattttatttccccaattaaagtagtggtgataaattcacaaaaatacaaacacttttatttttgacgtcaaaaacaaatacttctttgaacaggctattacaatatttttaagaaaaaagtaagcaaaatagtccacaaaccaaaatctgtaacatattaaacgatttatgtttttttttttttttcttaactagagaacaattcgggcttttactaaggatgatgagtgtagttaccgaatagtgtattcatataatcttttaatgagcttaagatatgatattatttcgactaatcagataagagtagttagataatttcgtaatagagcaactctttcgcaaataaaaccattgtaaacattaccaattagtttttctttttttttggtcacaaccaattagtttgtttgttctattttatgaagtgcgtattaaagctaacgtgtttacagtaacgccacacaaataaaaataaaaataattatgtactttatggatttatagaaaaaacaagaatagtcaccaaaaattgattgtgtcatatatcttttgtcaactattttatcttatttttctatggatatgtatgtccaaaatgttagacaaaaaaccaaaaaatcatgtccaaaatttcgttaggctgccgatatctctgtttccctttcaacgactatctatttaattaccgtcgtccacattgtttttaatatctttattcgaggttggtttagttttttttaccaaactcactttgctacgtttttgcctttttggtatggttgtatttgtaccaccgggaaaaaaaagataagaggtttggttggtcgagcttactgattaaaaaatatacacgtccaccaaatattaaaacaatatatcccatttttcctcctctcttttggtattacattaatattttattatttccccatttgctctgtatatataaacatatgtcaatagagtgcctctacagtcatgtttccatagacataatctctcaccattgtttttctctgcaaaactaaagaaacaaaaaaagaaaaatcggagaaaccaagaaaaaagaaatg

SEQ ID NO: 21757 - DNA, 3003 bp, Unknown
  misc_feature (1)..( 3003): 2750-1469P.txt file - cDNA_ID_2026922; gDNA_ID_1621117; Annot_ID_56217
catgtcctcagaaactattcaagagagaataaaataacaacttgtgcaaagaagaagcaagtcgtaataggaggcctgtaatggtaccttttatcacccatgtctctaatagcagatgctggaggtccaatgaatgttagacccgaatcctcacagagttgggcaaagtcagaactttctgacaagaacccatagccagggtgtattgcctagttatataattcaaagaagacatcagctacaagaacacgattattctttttcggggatcaaaactcatacctgtgcaccagtccgagccgctgcctccatgatagtcacaccgctgaggtaactaagtctagccgagggcgggccaatccgtaccgcttcgtctgcagatttcacatggagcgaatctctatcagcgtcactgtaaaccgcaacggtctgaatccctaaacgcttcgccgttctcatgatccggcaagcaatctcgcctctgttcgccaccaaaatcttctcaatacattgctccttaggcttcatcgatgcggagccggaaatatatctcacgagcatcgagtgatttttccgacgaacattccgtcgaagtgcccacaccgtcatcatcgacatttgatctcgattttcgaattttccgagtgaagaaaacaagtgtgactcagcaactgcgttgtagataaaaccaaacaacgagggtatgttggtcaatttcgtaaaaactaatcgacgatgaatagtgacgtggcatatactttatcatggtttggtcggaatggatatgtgtctgatgtgccgcttgcgttgcgtctttacctgattttacaagtatgggctttattgttttattaatgggcctatctgcacgaagcattaagaaaggctgcaaggccttgtttcagttttgaaatataaatacttttgaatcatccatataaatcgcattgatgtaattttaaaattcacttggtcttactatatagagtttttaatataagatcaatttgactattaaagacatgtggagggatagttataaatgattttgaaaatcataattaatctttggaggcatgaaaaacgatacgagctggaactattaaaagtgtttgttaggtagtggctgttgagtgttgactcctctattcatttctttttgttttgcatttctataaccgacaaaaaaaacaatacaattaaggaaaatatacacaatccttttaattaattcaatattggcaacaaactgaacaagaatatatgttagtaataaacttataagaagacaatttgatttgaagtcacgctgttgattatttagtttacaattaaatgaatcttaacacactcgaaacgtttatgtaaaatagtatataaccgtttgtgatgcttaaaagtcagacaacctatttgttcccaataggtggatagtttatttgtccgtttcgtgaatcttcgtttgagtaacaaataaaggatgatatataagttgtgtcaaacaagtaatgcataccaaacaccaaaaacattctcagtcaattaaatttgaatttatcgtttttaatcttaattataatattattttttaaattataaattttagaaagctgaatgaaatgatacataacgataagccaccatatatcgtatatacttttttcttgcaaagtttaaataaaagttatgaacaacgtaactctaactccgactcaacttttagatgattggaaaaagtttgacacgcaagatcgcaataagtcgaatctaaaagcgaacgtggagaaaaaaacaaagggtgacgaaagtggaccgagagctcaccgtccaagacctccctgtctttgtcacttatctcttgtcagcctccttatcattactagtatttaatactttttttttttttttaaatcatctttcgtgatttaatactttgttattccggataataaaatgtattaaaattacaaaatcattttagttcttgagcagacaggtatagaaaaagaaaaagtgaactgcagacttgatataaatcaggggtaaatgggaagtatcagattgaaaaataaagaaatcaaataaaatgtcatactgtatttagttgtagttcgataaaagaatattttctttcggacatgaaagtcgtgtttttttttaagttggcagcgaaggcgatcccaaggaggcaaagtcacgcaacaagtgaattaaaataatgaaacagaacatctgtgagaactgtactggagggtaatatcgtcatttaaaagcttacctaaacaattcttcttcttcacaacgtaaaaagtaggaaccagagctgaaaaacgcctggagagagaaagagagagagatctagatgaagaaaatgagatgagaagaagaagaagaagaagaagtgaaagcgaaagctgatccgaagatttctgatttttgtagtacaagtattatttccggtaagcctcacagaattcttgcttttggacctgatttcactagtgttagattcgctttgtagatttaacctgtgtagctaatttcagtttccgactaagtgcgttactataacctctaattcctgtaagatcatgtggtttcacttgctattcttccctaggattctcgtctaatttccaaagacgaattgatttatgctgatccaatttttcatctgtaatgaattgtttgatatgttttctgaccaggttactactggatttggctagttaattatttttgtctcgaatttggccttcattgacttagtggtaattcgtttctattttttcttttgttttcttctgtatttgtcttttatatgactgttgaacttgttcattattatcaaagcttaacccttgctattttcttcttcttcttcgtcttcttaagttaggatttttttacagaggaatttggtgtacttggctttgagagagacttggttccggagtgttctaatatcctcataatttttgtgtgattttgccgggaaaaatg

SEQ ID NO: 21758 - DNA, 3003 bp, Unknown; identical to SEQ ID NO: 21757
  misc_feature (1)..( 3003): 2750-1469P.txt file - cDNA_ID_2026922; gDNA_ID_1621117; Annot_ID_171917

SEQ ID NO: 21759 - DNA, 3000 bp, Unknown
  misc_feature (1)..( 3000): 2750-1469P.txt file - cDNA_ID_2026996; gDNA_ID_1621174; Annot_ID_57295
aatgctgagttaactgttgatacttctgatagtgaagatcaaacaaagcctctggagaaacaccatgtttatcttgccaatgcagaggtgctgataaactccggaagaaaaccaatctggcaaaattcagaggtgccatctacgtctctgctggtcatgtcttcttactatatagaatgtacaatggctgacactcccttaaattttatcaattccagatatctttctatccgatgtatccaccagactctgatggcaagaacctgaattcgcatcaaggtggtggggagacagaaatcgggaaagtatctgcgaacgaggttgacattaggcgaaaggatcttctgccggtatatgataattttcacagtgtgtataccagtatgcgcaacaggtaagttacctcgctaactgcatcacatcttataaactgcgtctgtcattgatccaattttgaagtggttcttctttgcttgtagaggattttctggggaaagagattcagattcttcttcttcttctgaccctggacaagttaaagaaatgcatccattcaatggtaatcaaatttactttcttaatccatgcattataagatatgtcaaatcttaaaactgaagttttagcaggtatggtttaccccgaagatgaggaaagaagagggagtgcccattttgcactaactccaaaccaaaatcctcataccggaattgtaacatttaaacagcctgtagtttccatttcttctgctgtgaaagacactgattatatagacgacgacgctcatgtcttgccaaagaacgcctccctgcccgctgaaacaaaaattgaaaacagcagtgggataagtggagattcaaatgtaagttctaaccgttctgatatgagcatgaatgcagcagacgagggtgaaggacccattgacggctccccaaacttcgagcagtttttcgaggaggtggtctccaatgaaactgttacagaaactgagcataaggatgctccatctgatggaaaactcgatgatgatgaggacgatgacatgcttggtggtgttttcgctttctccgaagaaggtaagaagaatacatcccatagcctgtaatttttttcgatgatttgaatcctcttctaacggtattatctcaatatatcatcaacatttttggatgtgttacaggttgagtttagttaaactatggccaaagaaagctctaatggagaaggggtcacatactaatcccgtttgctgcaacttttactcactgatgatctttaataccctgaaaaaataacatttaaaatcaatttcttttatcatctgtttctgtaaatgcttgtaaatgtaatgttcattatcaacagtctctcgatttccatggactgtttctttgtaatctttttttttcgtgtaactctctctattcattcatcaaaaaaaaaagagaaaaaaaggaaaaaagcaggcaaaaaatagaaataaagatttatttcgtttgggtttttactaattgagtaaaggcattgtatattttgttgcattgcagtgttataatctcatgtttctctgcagggttaagaatacaacaccgaattttcttaatcgcgtcaactcaactctttcacattctctaatcagaccttaatattaaatattatcatttaattgtgaaataagttctcatttaatagattttagtggatatttaaaacttccaaaaatcataacaaagtaacacatagtctaaagcaatcttttttcatgtcacttaaacccaaaatgtttcccatgaatggttataatctaaatcaaggtctcgatgttgtttttaacggttttaccacttgaatttcacaatcaacgttgttggtttaccttgactataaagatcaaaattttgtagaggctatcaaaggattaagggaccgaatattcacatgttcaaagcaatgaaaccatttaagtgcatccacaacctgttttcatagaaaactttgccatcatcttctacggtcataccatcaatctcgagaatgacgtcattcttcttcacaaactggttaccaagtgcatgctgattgacctcagtcactacaacaccggtcatgatcttcttcatcttaagatactttcgcatcatcgcattcttcatcgactgtagagagtaaacaaaaccctatcttgtctccttcatcaatactagctaagaatagaataattttctttgtactgttattattttgatgaagataaacacccttgtatacaaaacatatcgaccttgcataagtcgcaaccattccatgtatgctataattatttgtcaataaattcattagttgtaacatgtggtcaaagtttgagttttagttgttcactcttttttttttttgacataagtgttttgactttttaagtttgactttataaaaacatgcagaaatgtacaaagaatatatacatataattatcttaattaatttaataactatcaatctgtcatactacaccactatcaatctatcatcatcaccaccattatgcttgacagtcactttttagttggcccatgttaaagctgtttgtgttatttgttattgggcttatccttcactaccatttgattgaaatttatctcatgacccaacaaattgagctaatttcggttcaacattggatgttaattttttttcaaaccgaaccgaattatagttttggtgcattttttctaaaccgaattttaacacaaatagtaatcgtcttaaaaaattcaccgacttgttaaaaagaggcggaaaaaaaaacccgcgagaacttacaatggtgccacgctggcaatccgcgtgactcacaactaaccaatcaaaatccattatctcaacgctatatatttcagaaatcacaacctaaaccctaaatcactccactcacaaaatcctcagccatctctaatcacattttacaatcgcctcttcaaatttcccgataaacaaaaaatg

SEQ ID NO: 21760 - DNA, 3000 bp, Unknown; identical to SEQ ID NO: 21759
  misc_feature (1)..( 3000): 2750-1469P.txt file - cDNA_ID_2026996; gDNA_ID_1621174; Annot_ID_174090

SEQ ID NO: 21761 - DNA, 3000 bp, Unknown; identical to SEQ ID NO: 9734
  misc_feature (1)..( 3000): 2750-1469P.txt file - cDNA_ID_2026998; gDNA_ID_2213619; Annot_ID_180910

SEQ ID NO: 21762 - DNA, 3000 bp, Unknown; identical to SEQ ID NO: 9734
  misc_feature (1)..( 3000): 2750-1469P.txt file - cDNA_ID_2026998; gDNA_ID_1972176; Annot_ID_180005

SEQ ID NO: 21763 - DNA, 3000 bp, Unknown; identical to SEQ ID NO: 10044
  misc_feature (1)..( 3000): 2750-1469P.txt file - cDNA_ID_2026998; gDNA_ID_2213619; Annot_ID_131959

SEQ ID NO: 21764 - DNA, 3003 bp, Unknown
  misc_feature (1)..( 3003): 2750-1469P.txt file - cDNA_ID_2027089; gDNA_ID_1620689; Annot_ID_48526
tcttgcttccgaggccaggcttcccatgggacatggtccactctatctacaaacaccttgaggtccgaaggtatgagttcatccctgaaagagactttgagatcgatttcaacagcgttagagagatggtagacgagaacacttttgcgatatttataatcaacccccacaatcccaatgggaactactacactgaggctcatcttaagcaggtatttacgtacgtattagtactcttggagaagtatatattcacatgattggctagatgatctagacttgagatcttttagtttgtgtttacgtttatattgacatggttttttctttaaattaaaagactacatctttgacttaattttataagaaatatatatttcaaacgttgtaaacgtaaccagcaaagcaatacacatttatttcgtttacaatttgcactatattagataaaaaatttacaaaatttaaattttacaatctaatagataacattattttagcaaccaaggccctaatatttacttgaaagatgaatcccagctcgctacattggcacgggaactcgggataatggtcgtttcggatgaagtatatagatggtccgtattcgggagtaatccatttgttccaatggggaaattctcctcgatagtaccagtgattacactcgggtccatatcgaaaggatggattgtcccaggatggcgaacgggctggctcgcgttacacgatctaaatggtgtctttagatccacaaaggtcccggtcactttttttgttttgtttaatatcgatatacgtgatatgcatcgttttcctatatactattatatttgattaactgtaaatgaaaaaattcatttcaattaggcttatctagttttatatggacaggtcttaaaagctgcgaaagaatttctggagattacttccaaaccaccaactgtcatccaggtttggatcattattggtttactctcgtaaatgaaaaaaatacaaaaatcgataatccatttattattgtcaattgttatagtctatggccaattcactatcataatcttatgatataggcggctattcccacaatcttggagaaaactcctcaagattttttcgagaagagggggatttttctaaaagacaaagtggattttggatattctaagctcaagaacataccaactctcacctgctacatgaaacctgaatcatgcaccttcttatgggtattctatcctataatcattacatgtctagtctactataacttttcttttaatgtattagtttgaaacaaacttctcattgtggataatccgcatagcgcagaccaagctggacccattgcattttgtagacattgaagacgatcacgacttctgcaggaagcttgctaaggaagaaaatctcgttgttttaccaggtaatataatcattatccctctctagagttttcagaagattgagatttaagttttagggaactatgatttaaggaaaaatatattcgattgtttttttttttaacttgtaatataaagaaatgtagactaagacatgtaatctagtggttcgtcattgagttacaacctaactttaacacgattaaacgcatgttgttggattggtaggaattgcatttggtcagaataactggttgaggcattctatcgacatggagactccaagattggaggatgcatttgaaagattaaagagcttctgtgaacgccattccgttatagttgaagcttcttcactcaaagacgtcaatggcgtcaactaaagggtcaatataaatttctttgccttaagtcttttacatatgctataataataaatgtgtgttttattgatatgagatcaatcatgaacacttttgtatctgtaacaaataaaattggtgaatttatcaccatgtcgtgtaatgttttctcatagtttgcaatatttcgatcgatgtatttctacttttcgaaacataagataaataatttattttcattaggtatagctagactggtgtgaaaataccatgggagcacaagaacatctatattgacctccttaattagccattcaaatacatttggtcatgtcttatatatggctcaaaagcatgttgaatcggattcgtactgaatagccaggagtacttcctaacccgaactaaccggcaacaccgatcgactagattgagattctaattaagaaaatgttagcgtgcaactttgataagtttgataagctttttatctacttttttttgttcagtttagatcataatgaaggaaaaattgattcctaccattggatattttgtctttagtaacaatatttttaggtttacttaattacataattagtcttgtatgttgatctgatagttttctcaataataaaatttagtattaactattacgtcacattaaaatatacttgttttaaaattaaatataaatttatgcatgacacggataaccttgtaaagataataacaacgagtaaatcatgaaatcgtacgttactatttatattttaaaatgggcaaaacataacaaaaaaccatgggtggttttcctcctctcgtcggtcgaagacagagacaaaaaatatttaaatacgtaagaatctttgcttcttcttgatgctgatgagtgatgagtaatcgacagagttattttgtttcttttgtataataaaggagattgcgactctacaagagagggctaatatagcatgcattaagatcaatcatacagtttacttaaacaagatttaagatcaccgaaggctcgagattcgagatacattattttctttttgtcttctatgttgatgttaatatcccacgtgagatatcaaatgtttagaacaatgtgaaaaccattggcaaaaaaatgaaaagtggttgggaattttcactatatattcgacttcgtagcaatgagagttagtcacccaaaaacaaaatctaatagagaaaaataagtagatatg

SEQ ID NO: 21765 - DNA, 3003 bp, Unknown; identical to SEQ ID NO: 21764
  misc_feature (1)..( 3003): 2750-1469P.txt file - cDNA_ID_2027089; gDNA_ID_2926182; Annot_ID_140626

SEQ ID NO: 21766 - DNA, 3003 bp, Unknown
  misc_feature (1)..( 3003): 2750-1469P.txt file - cDNA_ID_2027099; gDNA_ID_2684224; Annot_ID_191896
ggagagggaagttgaaggaggataaaaatggtaggccaccggaaccgaaccttgttttcattagttgatcgagcacgtgccactaaagattcttagagatgacgtggcacgggcacagcaacttttagattctgttataattgttcgaatactaccaaaagtcgggtgaagatttggggtcaatttgatgatcataaaggggattatattctccttctcaagcaagatgtggtatttactagtataatagatcattcgttatcttgaggtagacctctccgtaacgttcacaggtgcatgaccaagtaacaatttgattcctttccagcataacgtcatgttggttgcaaaaagaaggcaaagtagagcaagcaagcaagcaaagcatttttcttattttatattttgttgcggattccaccacccacttgaaaaattgacatgtcacaatgatttcgtatcctagtcttttattatttaacactctcacaatcccattactctacacctctttcattaagtcaacacacggttttcaaaaatccactaccctcccaccacctagaatcttttgttacctaccaacaccctcctttgttctctttatatattggtccaactaaatcaataagggaaagcatccttttggttggaggaattgctttcattctcactctttgtgtgttgatcaatggactagctaataacaagttcctcctctatatatttcaaaagaatggaacagaaacataaacgaaagacagagtacctgatgttgatgattcattgtctgtctggagctcccaaatgccttttatgcttacatattcataaccaacaacggctattaattataaaccaaaaacacgaaataagtttgtagcaaagtgaaattaggaatcttggagatggatccattagtagtaggataataggatatgatggaatttggttggggaacagtgataacttacgcttgcttccggcgccgggaaagttggaaaacctacaaagtacagaaatggatctgggccttgaagtgggctttttattaaagaaaaaaatacatctccgttatcaatcaccatcttcttctatctacaaattaaagaaggtaacaacagaacgtggtggatcatgtggttaggcattaattatttgctttgtttcgccgttttggtaacacacagacacagttccggtaagagcttttgcagccactctttatagttatttagaattggcgatcgaatcaatctcactccctccctcccttaagtcttgttgaatctgctgaattgttttataaagagttactttggcaaaatggaaaatccggcgaagagagtgttgatgacatccaacggcgacgaggtgtcccgaaacatcgctttccatctagccaaacacggttgcaagtgagtctctcattttgtcttctttcctcctatcctgtgtttcttcttctagccccgatttgtgttgtggttgactttggtgtctatagttaaccttcaaaaaatgcaatgtactgttgctaggttggtaatgatgggaaatgagggttccctaaggagcattgtagacaagattagagattccattgagggagccttccctgccgatgttatagcactcgacatggaatctgactctgaagttgcttttcatgccgctgtccaaaaggcatgggaactttccggccatttcgatgcttttctcaactcttatacctaccaaggtttaatttgcttcttgtttttcactaccctgcctttgatgctcttgtgtgttgatcattcctttattcaacaatctttctttcttgcaggaaaggtgcaggacattcttcaagtctctcaagatgagttccacagaatcacaaagatcaatctcaccgctccatggtttctcttgaaggctgtagccacaaggatgaaggaccatggatcaggaggctccattgtcttcatggccactatcgccagcggagagagggcgctttaccctggcgctgatgcctacgcttcaacttctgccgctattcaccagctcgtccgggtatgcatcctagctcctaattagacacatcgcgttcgtaacttgaatatgtttgttgatgattgggtttcaggcatcagccatgagtctcgggaagcacaagatacgggtcaacatgatctctagagggctgcatctggatgatgagtatacagcttctgtgggaagagaccgagcgcagaagctggtcaaggacgctgcacccctcggccagtggctcaacccggacacagacctctactccactgttatctacttgatcagcgatggctcacgcttcatgacaggcaccactgtcttggtggatggagcgcagtcccttacgcgaccccgtctcaaatcctacatgtgatcaatgcctagtattattataattctatgttgtgtgtaaaaagtgaatatgaatcaagtttgaataactatggagggatgaataatccatggaatcaatgattatatacttttgacaagtatagaagaaagcaaagagccaaaatagtcaacaatctcaacatcattcgagctcattgtttattgaattcaatcaagtttggtaggtgaacctcaaatacacgtgatattggatattatcttggaaaccttgctaatccaaattgtaaatcaaataagaaaagaatgattacctcagagatctagatgcatattgattcttgaccaagaaatatgtttgaaatttgaatccattgaaccaaaatttgaaggagttgcatatataataatataaatcagaatgatgtagccgccacacctttttgtttccacaaaactctttttctgtgatggatccgctaatgtagccatattttcaatatatatcactttctctggcatcttcgctaccgtgtacgtctctctttctctccctcccctccttggcttttttcaagttcccaccataaacgcagagggagttaagaaatg

SEQ ID NO: 21767 - DNA, 3000 bp, Unknown; identical to SEQ ID NO: 9262
  misc_feature (1)..( 3000): 2750-1469P.txt file - cDNA_ID_2027099; gDNA_ID_1972047; Annot_ID_178265

SEQ ID NO: 21768 - DNA, 3003 bp, Unknown; identical to SEQ ID NO: 21766
  misc_feature (1)..( 3003): 2750-1469P.txt file - cDNA_ID_2027099; gDNA_ID_1621111; Annot_ID_171791

SEQ ID NO: 21769 - DNA, 3003 bp, Unknown; identical to SEQ ID NO: 21766
  misc_feature (1)..( 3003): 2750-1469P.txt file - cDNA_ID_2027099; gDNA_ID_2684224; Annot_ID_137531

SEQ ID NO: 21770 - DNA, 3000 bp, Unknown; identical to SEQ ID NO: 3428
  misc_feature (1)..( 3000): 2750-1469P.txt file - cDNA_ID_2027168; gDNA_ID_1620733; Annot_ID_49439

SEQ ID NO: 21771 - DNA, 3000 bp, Unknown; identical to SEQ ID NO: 3428
  misc_feature (1)..( 3000): 2750-1469P.txt file - cDNA_ID_2027168; gDNA_ID_1620646; Annot_ID_47596

SEQ ID NO: 21772 - DNA, 3000 bp, Unknown; identical to SEQ ID NO: 3434
  misc_feature (1)..( 3000): 2750-1469P.txt file - cDNA_ID_2027168; gDNA_ID_1620733; Annot_ID_166164

SEQ ID NO: 21773 - DNA, 3000 bp, Unknown; identical to SEQ ID NO: 3434
  misc_feature (1)..( 3000): 2750-1469P.txt file - cDNA_ID_2027168; gDNA_ID_1620646; Annot_ID_163228

SEQ ID NO: 21774 - DNA, 3000 bp, Unknown
  misc_feature (1)..( 3000): 2750-1469P.txt file - cDNA_ID_2027168; gDNA_ID_2926179; Annot_ID_140467
gaatttccatcgatgtcacagatctctctcctttagagtgagtgaggagataacgtgtgagccacgggatccgaattaaccacaaaagacacaaaccttgtaccacaaaagaaaagccccactttgtctttaatcggtttctgttacatgatatgtaacttacatccagaacattggctcactggatatttgtgatgggcttcattgggcctttcaggcccatagttattactcaaattgggtatgattttgttggttaatgttgagatttgtgtgtttgggtggttttgtctcatatctctcttaagagggaagtgtaacctactaacctcctcagacaatccacacagtatctattgattaaatgatggctttaaatctactgaaagtaaaaaaaatggttgctaaattaactttacaaagagatgaaataaagctgtcacatctataactaaagagaaatgtgttatccgatcaaatcttgttcttataatgcttaaatccttcaactagctcatatcacatggaatttatacggtccttggaaccttctttgctatatatagcggttgctacttttaaagaagggaactagaagacatggcaactacttcagagttcatattcttcactatatcagtatatctggaaactaagaatttgagcctagattgctttaaaagtctggtgagagaaatatattagttaacgttttttttgtcttggtattgaatcttgcaggccccattgtgaatgcaacgttgaggacacggatgagtacagtgtccatttgtcagatgaaagatccatgattaactactaacttgtcttaattcaattttgataaccgggtttgtttggtttcctatacactggaacttaaccggttatcatcaccatgaacacaacagttttacatgttacacgtcaatttttagttagaacttgctaatcagtatttagtgtttagcactcgtggagccactgagctagagagtgacatcactagaaggtccccagagactcatttggcgacacttggataaggaaacaaagtgtcggtggtcacagttcattcatttttaattgaaaaaatcaaatttgttcatttaaaaaaaaaattggaaaatccaaatatccaaatttgaagtgaatttgaatctgcagattcaatgtgatcttggtaaaagcaccgatacttcccccagatgaaaaaaaaaaataaaaaaaattctaggattaagaaaagaagaagaatcgaattagtagtaatgtcctctcattttatagctctgttacatatttatttagttttaatcattctaaacaaaattagtcctttgttactgaaacgagaaacataatagttccgcaacaaataatagtggagcctttagcttttaattagatatctagtttacctctatgaaaattagttaagaatatgaaagataacataatttcagatttttcttaattttgcagggacatattagtatacctatttaccttcttagtttatgtgaaaaatatcaaaacaacgtttatgttaaaacataggaaaagttcaaaatgtactctaaactaaattcaatatttaacttcaacccacaaacagataaagtatagggaacactcaagagtgaagagtggtgaacgtgttttattacatcacatggatcaagattcattcaatatttgagaagactttacgatacgaatctactgacaattactacaataagtaaaatagttggatatataaataactacagaacaaaaagtaattgaatatgtacaaatggaattatatcttgaactaaataatcgaaatgtacttgaaaaaataagaatccaccttgagttcatcgaaaagaaagattccataacctaaaaggagcggtttatccgttgtattaaaaatttaacaataacaaatgtttcaggtaattgcaaatcgacccatgaatatattttgactttagctattccaccccataaatattatttgttatagccgccccctttgtgtgtattattaacaaaagaagcataagttttttttgtaagattctttttagtcataggggccactgatgccactcaatgagaccaaaatccaaaacttagtgattggttttttgtttgacaaaaaaatgtgaattgtttagttaaccaaaatactcttctaaatgaggtaaactatctaacaagccatccacattaatatctccaacctaaacttatttattttctcatagcactgtgtaggactctaactagcatgatctatggtcactcacccgtccttcgaaatagtaacaaagttgggttttagatttcttaccgaaattaaatttccagtagaacgtctagcatacatttgagtaatttcaatgaaactccacaaattaatttttatcagtttggaaaatatatgttttggcaacagtccatatgaaagttcatacattaaaaaaaaaaaacgtagaaaaactttgttattttttctcaaattcaaacttacactaatttagctgtcgcatcaattaagtatgatttttttttctgtttaaagcttataatgtgtctgcaatttgataaataataaaaaaaattacataagtttcttataataagtctacgcttttcaattttcattgaatatagattcttaatcacgactgaacggaacatacaattattgtagtcttataataatattgttggtttctcaaagtgaaaatgaataaagcttaatgatatatgatctgtcacgtacttaaacatatagaaacagtagcaaattcaccaacttgcctttaatttactataaccttcaaattaagcttcttttattttatgaaaaataaataaagaaaactccatttccctttatttaaggaggctgcattgcttgctcactgactcaactcaagagtggtgtagtgagagaagaaagatagagaaaaaaaatgggaggcaaaggtgtgatgaatg

SEQ ID NO: 21775 - DNA, 3000 bp, Unknown; identical to SEQ ID NO: 21774
  misc_feature (1)..( 3000): 2750-1469P.txt file - cDNA_ID_2027168; gDNA_ID_2926179; Annot_ID_200074

SEQ ID NO: 21776 - DNA, 3003 bp, Unknown
  misc_feature (1)..( 3003): 2750-1469P.txt file - cDNA_ID_2027229; gDNA_ID_1620843; Annot_ID_170123
ctaagggataatttgtttatctcaaaaaatttcgtggagtaatgtgataagatttatgattaatttcgtggagtttagaattcgtggagtaaaaattaatttcgtggagtattcgataatatgatactacattatattattcgtttctgtctaggaaacttgcaagtttggttgtaacatttcacgcatgtggtaaacacattttgaatatttggagaaattaggagcagtaacaatatgtaaaacataaaataagtcttaaccacaaatttatacgatcacaatcttccataacactaccccaaaatttaatgacagaaaagcgatctcatataccattttcaccttctactccccccttcttcttttttcggtttcatttaaaaaattgatgtatttttgtataaatctcttcatataacttgatataatcttctgatcctacaaaacaaccactatattttttctcaaccaagtaaactatatttgtctaggtattacaatcgaacaattcattgttcaattaatgtataattccgtaatttcgtcatctcattatgcgtacaatttttttctttctatcttaaatctgactgttaaatttcctttagcatcctttccgattcgagcagttataagcacacttttttgtgattaaacattgtcatccttcacgctagcttaccttttaaacgacaaatcagcaataaataaaaaacatggacaatgactctaatggtggagctacatatatcgtgacgaatcacacatgtaagagaatcatgtgaacaatagtggtaggcgaatctctatctcttaatttgattcttcaaaataataattaatgattcgatattaagccactttatcaacatttacttccctaacatagatatatgattctagcacagccaatcgatcattgtattagtgcacgcacacaataatcttatgcgtcatcggtcggaatgcattttttatgttgcacaagattaattttcttcgatgcgtagaattttagtaacattgtttatatgtttaatttacaatattactttttttgtagattaaaaatacaatcacaagatttaatggaagtaataactaattgaaagtttagagatgcgggaacatttatacaaaggagcgcatatagatgctccaagttataaaattctttaatattttggattagatgaaagaataaaagaagcatgtaaaattgtgtctaggtacatttggtttagtagtaattagatttgggacaagatgtataatcgttttttaattagtttgatctttctaattaataaaatcggatgtccattgagaaatacggattgagaccatttgtattgccgatggtggtgttacatagtttttgcagaacaagctcatccatgtctctccaatccggtgccaagatctagttggaatccatgaaccaaatcttttttgttggactgattcactcttagaattaatcaaacaaattaaattggttataattttcgaaattctagtcctcggtaaatcccatttcgttgctaacctagaatttccaaagttattaagaagcatgtaatagtcggtttatatatataaaggatttgttttaaatataggtctaagccataaaaacaaacccaaaattctggaatcgaatcaacctaaaataaaagtctagtttggtattctaaaacatttgttttgcggttgggttggatacgaaatctgaaatccgatacccgaacaaatatccttaaattattatttattattgctactttttatcatgaaacaaatgaatttatgttactagaacaatgaacttttttgtgtaattcggtccaaaaacctaaccaaaataggtttcaattctatgtcggaatgaaattaaatttcgaaaaccgattcgaacctgacaaaacccaaatcgacctatatagatcataaatctccctatttgaattattccaaatccgaaaaaaccgatttgaaaacctgaatgcctaaacctactttaaagttaaagaagcaacagtagccataagaagacccacaatataaagattgaaagaacccaactcgaaccaacaatgttcctaaaaatagaagcccataacctagatagagcccaaacccctaattcttcttcatcgacaacatgcaataaactttgctcttgctcgttagatctctcgctccaagtccaaatttctccataaagatgaagactattagagcatcattattgatgatctcttaaaacaattcttatgttaagaaacatgtcttataactaacaaaaggctcttatataagagacattaagtcacttttgttagttataagacatatctcttaacataagagttatgttaagagaccatcaataactatggtcttagtgacatttgagaagaggagcagccaaagaaatttcagatcacatgttcgattaccaaactactaaaaatagagactgtagagtatagacttattcacaaacttggaaaaaagattaagtttgttttatattaaaggtgaaaacttttgccaaataaaagcaataataatgtgtctcaaaaaaaaaaatcctttttttttttttttgtgcacccaaaaaaaaaaaaaaaaagaataatccttaacattctctctcacataagctttttgaattagacaaaaaaaaaaaaaggcactagtcaagtttttttttttttgtataacaaaaacagagacagatccagacaaaaggctagacatccaccacgtcacgcttcccaaccaagtgacacgtgtcgcatccacaactcgtcaaaacacaaacaccaaaaagtagatgacgttacaaagcatcatccgtaaatggcggcttcctctctctcgctctcttctcctctctcaaacccacttcgcagattcactcttcaccatcttcacctctcaaagaaacccctttcttcctcttctctgttcctctgctccgccgcaaaaatg

SEQ ID NO: 21777 - DNA, 3003 bp, Unknown
  misc_feature (1)..( 3003): 2750-1469P.txt file - cDNA_ID_2027264; gDNA_ID_2926242; Annot_ID_142914
tttcttctctcagaagaaacagagtttgtctttaagaactagtcgaagatcactgagtttaccagagtttcctctcaaaatctgccattacttcaacaaaggattctgcaaacacggcaacaactgtcgttatttccatggaaaaatcataccgtagaaagatagttttgcgcagatgtttaatccaaaagacaacaacctaagcgacgaagagcatgttgtttcccctggatcacttgagaagctagaaagagagatcattgagctgcttaaatcaagaagaggtgctccaatttccatagcatttttgccaatgatgtaccacgagaagtatggtaggagtcttcaagctgaaggatatctcacagagtcacaaagacatggcaaagctggttttagcctcaccaagcttcttgctcgcttaaagaacaccatccgcctcatcgacaggttagttacttagtcacgtaacacatattaacaaatgaatatacgaggaagtgtagtttatgcattgttttgcttaatggtgtttgaattgtaggcctcatggacaacattcagttatactagctgaagatgtatcaaagtttgtggaatatacgggagagagaagcgaacatggagcaatcttagctggttcaaggcaggtttacttgacatttccggcagagagtagtttcactgaacatgacgtttcaaactacttctctgaagttggaccagtggaagatgtaagaattccatgtcaacaaaagagaatgtatggatttgtaacttttgtttatatggaaaccgtcaaacgcattcttgctaaagcaatcctcatttcatatgcggagcacgtgttctcgtcaagccttaccgagcataattaggttcgaggaaattccaaaaactgttatcacatcatcgtctttgtctttggggttagactgtttggtcggatggcatgggccatggagttaggttttttagactatttggtttatgacagtgggtgagacacaaaacatatataaaggatctgttttcaggtgagcaagttaagaaacataaggtgcatgagttatctcttattgaacgttttgatatttcattgtatcatatgacaaatccttctagttttacgaacaatgttagaaaaatgtatgggtagtttcgcctacttaagaaaatatcgccatatcaacgatgaatagtctgtatgatcagaaacttatgaatgttgaacacttatatattgtacaatgaataagagatgaataacattgaaaacataattttttcgctaacaatgaaagaaatgaatattcaaaaaaatatttcatcgtgtcttgtgaaatgtagttaattctaaggttataaaaccaaaaaaaaaaattgatctggaaaatatacctgaacaaaataatagcaagatttgttaatagaaagaattgacaacaatctggaaaattttatagcagtataaatagatattaaatctaacgcgagccaccatttatatttcattcttcttctcgtgttccattacacatgcgatacgtagttacgtaccagaagacatgtatctgccgcgcattgtgagcgtttggatatcacctcctagcaattaacactttagccgaccaaaagcttgcacaagcgcaaagagatgcgcgtggtgattacttttaccccttctccacgaaatcaaactggtaaataaaaaatcaactacgttaataaagatcatccacgtggctacgagatgtttacgattttagtcctttaaaatttagattattgcagatctagtttttacggttgtacacttcaatagttttaattcgtttccagtccttacattctttttaacttgattttaatttaaggtataatttggatttcattacctaattaaatactaaaatgagatatgaggttgttaaattgttttctgtttgctgacaaaaataaacaccattttataaaatctggattaaagttcaaaatttagcaacaactatagatgtattatttctatacatatataaccatgccatatgttgagtaactaggatttaacccgcggattaccgcggacaatcggtttatttggttcttatactaaatatttgaataaatatgatattttaaacatataaatataaatttctagtgattagtgaaaaatcgtaatatataatttggatattattgattattgattttgtgattgaatatagtgtttttaaggatggaatgtgattatattttgatttaaaaaatgacatagattctttatttttgttgaacgatttagattaaagggaattaattttattgaacggtttagattgaatcggattatataaagtttaggagattgttaagaccaaattacccttaatgattttgaatagcaaagaacaaaattcaaaattgaaataaaaattgaggctaaattagacaaaattttaatttatatttcccttttaataataaagggatataaatatggcaataaataaaaattgatataaataaagagaaaaattaatttaaattgaaaatgttcaaacaaattcataacctatataaaataacaaattgcttttactttctacattagtgatggtaacaaaaatcaaaagagaaaattactagggtttaagaaaataagaaaaacaacatagggtataatttgaattaaattgagaatgtttaggttaaagagaaaataaaaaagcgtcgacttgttttcttttttgtcgttgttgttgttgtgagcaacttttatttatttatttgtcttccgttgcgtgagatattattgaacggtgtttgttattcggagaagaagaagaagaagaactgaagaagcatattcgacggtcaccaccaaacctcttccgtcggattttcactctccgtttatcgaacatctgagatctctctccacttccgtcaccgaagatgcattccagtcatcttcttctcgaggagccgatcaggatg

SEQ ID NO: 21778 - DNA, 3003 bp, Unknown
  misc_feature (1)..( 3003): 2750-1469P.txt file - cDNA_ID_2027264; gDNA_ID_2926242; Annot_ID_204129
ttttgaggattctgtgaccagtcctgaattctcaactagtttcttctctcagaagaaacagagtttgtctttaagaactagtcgaagatcactgagtttaccagagtttcctctcaaaatctgccattacttcaacaaaggattctgcaaacacggcaacaactgtcgttatttccatggaaaaatcataccgtagaaagatagttttgcgcagatgtttaatccaaaagacaacaacctaagcgacgaagagcatgttgtttcccctggatcacttgagaagctagaaagagagatcattgagctgcttaaatcaagaagaggtgctccaatttccatagcatttttgccaatgatgtaccacgagaagtatggtaggagtcttcaagctgaaggatatctcacagagtcacaaagacatggcaaagctggttttagcctcaccaagcttcttgctcgcttaaagaacaccatccgcctcatcgacaggttagttacttagtcacgtaacacatattaacaaatgaatatacgaggaagtgtagtttatgcattgttttgcttaatggtgtttgaattgtaggcctcatggacaacattcagttatactagctgaagatgtatcaaagtttgtggaatatacgggagagagaagcgaacatggagcaatcttagctggttcaaggcaggtttacttgacatttccggcagagagtagtttcactgaacatgacgtttcaaactacttctctgaagttggaccagtggaagatgtaagaattccatgtcaacaaaagagaatgtatggatttgtaacttttgtttatatggaaaccgtcaaacgcattcttgctaaagcaatcctcatttcatatgcggagcacgtgttctcgtcaagccttaccgagcataattaggttcgaggaaattccaaaaactgttatcacatcatcgtctttgtctttggggttagactgtttggtcggatggcatgggccatggagttaggttttttagactatttggtttatgacagtgggtgagacacaaaacatatataaaggatctgttttcaggtgagcaagttaagaaacataaggtgcatgagttatctcttattgaacgttttgatatttcattgtatcatatgacaaatccttctagttttacgaacaatgttagaaaaatgtatgggtagtttcgcctacttaagaaaatatcgccatatcaacgatgaatagtctgtatgatcagaaacttatgaatgttgaacacttatatattgtacaatgaataagagatgaataacattgaaaacataattttttcgctaacaatgaaagaaatgaatattcaaaaaaatatttcatcgtgtcttgtgaaatgtagttaattctaaggttataaaaccaaaaaaaaaaattgatctggaaaatatacctgaacaaaataatagcaagatttgttaatagaaagaattgacaacaatctggaaaattttatagcagtataaatagatattaaatctaacgcgagccaccatttatatttcattcttcttctcgtgttccattacacatgcgatacgtagttacgtaccagaagacatgtatctgccgcgcattgtgagcgtttggatatcacctcctagcaattaacactttagccgaccaaaagcttgcacaagcgcaaagagatgcgcgtggtgattacttttaccccttctccacgaaatcaaactggtaaataaaaaatcaactacgttaataaagatcatccacgtggctacgagatgtttacgattttagtcctttaaaatttagattattgcagatctagtttttacggttgtacacttcaatagttttaattcgtttccagtccttacattctttttaacttgattttaatttaaggtataatttggatttcattacctaattaaatactaaaatgagatatgaggttgttaaattgttttctgtttgctgacaaaaataaacaccattttataaaatctggattaaagttcaaaatttagcaacaactatagatgtattatttctatacatatataaccatgccatatgttgagtaactaggatttaacccgcggattaccgcggacaatcggtttatttggttcttatactaaatatttgaataaatatgatattttaaacatataaatataaatttctagtgattagtgaaaaatcgtaatatataatttggatattattgattattgattttgtgattgaatatagtgtttttaaggatggaatgtgattatattttgatttaaaaaatgacatagattctttatttttgttgaacgatttagattaaagggaattaattttattgaacggtttagattgaatcggattatataaagtttaggagattgttaagaccaaattacccttaatgattttgaatagcaaagaacaaaattcaaaattgaaataaaaattgaggctaaattagacaaaattttaatttatatttcccttttaataataaagggatataaatatggcaataaataaaaattgatataaataaagagaaaaattaatttaaattgaaaatgttcaaacaaattcataacctatataaaataacaaattgcttttactttctacattagtgatggtaacaaaaatcaaaagagaaaattactagggtttaagaaaataagaaaaacaacatagggtataatttgaattaaattgagaatgtttaggttaaagagaaaataaaaaagcgtcgacttgttttcttttttgtcgttgttgttgttgtgagcaacttttatttatttatttgtcttccgttgcgtgagatattattgaacggtgtttgttattcggagaagaagaagaagaagaactgaagaagcatattcgacggtcaccaccaaacctcttccgtcggattttcactctccgtttatcgaacatctgagatctctctccacttccgtcaccgaagatg

SEQ ID NO: 21779 - DNA, 3003 bp, Unknown
  misc_feature (1)..( 3003): 2750-1469P.txt file - cDNA_ID_2027268; gDNA_ID_1620322; Annot_ID_153362
aaacaattaaaaaaacaaaagaatttagatacgtagttattaatatagaccattagattgaaaagtaaaaattaagatctatggctgagattaaagacaataaatggattaattttttgatgttataaatctgattagaaaaaggtatctctcttcgtctctagaactaaatctctctctttaaaaaaacaatcgtttctccctttctccttcctgaagatcgatttttcataaatccatagtagtttaaaaaagaagcagagagatgttgaaaatcgtttctcatggaatcaatcgattattctctatgaagttctttaatccacacaactttcctcaggaacatgataatagtagtaaatggaggtttttcctatggttactctagacgaaggaggatctccttgtgttggacaggtttgtgatttctttccagggataaaaaaaatttgattgtttgtttatgatgaacgattttttggctacggaagagtgtcatggagttctggtgaattttttggctatgtttggtgatttcatttttaatcaagttgggaatcaataggaaacaactaagcatacaacatagattagaagagatatcaagatggatctgatttaagtaagatttggcgactaattctagatgattagggttatttgtgatttattacaaggaatttgtgttctcattgatttggcgagtaattctgtatgactagggttatttgtgttttcttaaaaagaatttgtgttcttgttgaaatcttgttcattggaattatttgtgtttggtaaatcttcattggtggctaaggatgtgtttgtagctcttacggcgtttgttattggtgatgtccattatgaatggcaaattatggatggcacattatggatgatgaatcatggatggcatattatggatgacgcatcatggattgtacattatggattgatatggtgagatttgtaaatcttttggtcttacatgttaagagtaaaagatgaagaattggagaagcatgtctaacatcctaaaaacaagctatatccggttgatttgctacgattttgtttttgtgaaacggtggctgtaaagcggtgaaaaactttgctgttctcctctagtataaacattgacctttatgatggttctacgacttagatcgagttggtctccaatgttaatgttcatcgtactattaaaggccacaaaatgttgatcatcgtgagattataccgtgtatcactttcttctataattccagaaattcttatacaaacacatatttaatgtccacgcgctaatgaccatatggtaatattctcgtggcatcaatatattgtcttaaaggtagagatctctgcaaattgaaagaaaaatcaacaaataatttatccagtatagattgtccatttaaacttgtccaaacggttcacttttatatttgcccttaaagtaatgaaaagaaattgtaccaatttgcccttaaagtaatgcagacgcaaataacttataaatgaagctctccttttttagtcatggccgttcactccagatgagatcgtgtctgagaaactatcattttttatcttctctgtcttccatgttttttttttttcatcattttcatttcctttttcaaaatcatcaatcatggtggttctctataattcttacaaatcatagaaattctgagattatctcaaaattctctatcataacttaaaaacgaaggatatattaagaatcaacaacagaacattgctgctacaattgatcttcttacacgctttatatacttaaacttgagtacttggacactcatcaatggacaactatgcttcagatgtgagttactagatgaccacttggactagagtgcttggacacttatcaatggacaactatgcctcaaatgtgagttattagatgaccatttggacttgaatgcttggacactcatcaatggacaactatgcctcagatgaagttacatcgacaatggcctttttgctgctactcgcgttctcaacatcacgaaccgtttcaagcccagattgcttagaaggtaactgatcatggttaacatcctcacttttcattgtaatcgatgacagagattccttaatcaaggagagaaataaatggaaccaaatcaaataattgttgagagacagggaagatgatgataaatcatatgaaattgggcttttagttttgatttggaatattgagattcccgtaaaaaattggttttgattttggaaagagagagaaataaagacgatggagaaaagagttgagagagaaaatgaggagaaagcgttgtggttcagagggcaatttgggaattttgatttggtaaagtgccttctcctttcaaagtgcctaaacgggtaaatagttttctaaaagtgtcttataatgtaataatctcaataaacaattcaaagctgtataccattcaagcccattattcaaaattttgtttgactaatactattcaatcgggtctatgggcctcagaaaataataaatgggccttaaatacttggaaacaatggatagatcgatctcaactttaaaatgcgtccaaaaatataaacaaacaaacatctctcgccgtcaggttacatctatcgccaccgcaaagagaccaccgtctcctccgcaatcttcataacctaaacaacactcatcccctggtaagctcaattctctaatcaattcaatctcctgtgatgtcgatctgtttctactcaagttcaatctcacgaatcccttctttgttctgtaaattagggtttcacgatttgtgtgtctagggattcaagatccctaatatctgatcatctagtaattgtgaaagtattgatttttgttcttttgatttgagtttagcaattattgagatttctttgaagttgaataccttttctcaatcattataaaagtattgatttttatgtgtgttttgtggcaaaggtacttaaacaatg

SEQ ID NO: 21780 - DNA, 3000 bp, Unknown
  misc_feature (1)..( 3000): 2750-1469P.txt file - cDNA_ID_2027308; gDNA_ID_1620391; Annot_ID_155608
atcttaattaaaatatcaaagaaattatggaaacccaatgtccacaaaattaatcttaattaaaatagaataagcattaaaactaaaatatggagcacgtctatgctgcaccgcatattaacacattcatatataactaagtatttcattaaccttaacgttaacctcaccgctcccgaggattgcaaattatttaaatatttttctcttatgctaactaaagttccaactactcactgccatttaacaaaacaaattcgtgtgattccacaagttaaactaagcatgataaaatatatatcttctaaaaattatgaaagtatttttttaaaaaaattattaatcaaggactagatacatctataacattttaagaacacttttgtttttctaggactaggtggatctttcatcctttcatactcgtcgattgttaagattgccaatgaacacgttctttgttccactattttctttatttttaattgcacattagtaaataattttgaacaatttatatgatttacgtaacaaattatattaaatataatattaatagcaaaagctgaggatgcggagatgattatgtgagaatgatgtcttcttcacctccattattacctttcgattttgattagtgcttttaggtacaaacaaaagcattgtctttttattatctatctttaacggaaaatattgtctattttgtagtcttccaagtcaaaactttcttcagtccactcgtttatattttatttcggcaacccggcactagccaccaatattcaatgatcattttttatatcatttgattttaaatataagaaattggaatcaactatttaattggagtatatgttgttgggagatgattatccgattgtctacatgtggacatgttgcggtagaatttgtaaccaaaattttgaaaaatatttggttctgcggataaatgctaaaacctaggcaccaatggcttaattccctagctatgcaaaacgcggctcgctatcctaagtaattatggcaaacaaaccattgtccgcatcacacaaagccgactaaatgcatttgtacgaagagtcatttacgtcaaacacgcatagaacgttccctcgatggatacaatatctacaacaagtaaaagactacaccaacacgaacccgttacatcgcacatgctgaaagcacattgcatccggtattctaaagtcatatgactagatttaccttacacaaaaaaaaaaaatttaagatatagatcatgtatgttgttagaaacactctctcattagtttataattaaagaattggaaaatatttggaaaagaggataaatattaaaatttcaaaagattgagtcgtacacacacgcctcatgctaaataaacgcttgaccttaattacgtcggtggcaacgtatcttcaatccgtcccttaccatcattctatgattggagtagtcgattaaccacactcgccacttggaactctccaacccctatccaggaacccttcttcgttcgctgaatccctaccaaactcactaaatatcaagttggagatgaaccacttccaaaactagatctatatatctttttttttttttcataatgtaagtgtaaatgtatacatacaagtaacaaacaatcgaagccttgttctaaaagaacttatttttgtaatcattaactatttgttggattataaacaaaaaaaaaaacttaaatgcatggcaaattggcattagtccatgtttttaaatttagttacgattttcatgatttgttttcgttaaatattataaagttgaaagtcacgtttcaacgtattcatataagttaaaaacttaacataacatatctcttaaaattatcaatgacggaaattatgggaattcttgttttcctcccggtaattgatggccattcgaaagaaaatgattatcacaattcataagacaataagaaacatgagtgggtcaatggtaggtatgatattctttggtttcgattatgtttggggatgggatggtctgtgttttctcatatgcttacaattatcttctaatataattctaagaattacattgattctgatatatatctttcaggtatttatgaaaataaatttaaaactttatataaattttttactatatatccataactgaaattctacgagtatagtgaattcggataactattttacggattcaaaacatgcggaatttcaaggtatcttcttaacatgccaaacatgaataataaatagagagaaaaacaaaaagagacaattcacatgaaacgaaaggagatcctttaagaacgcataatttgtctgcttgcacgctctttgattgcttcgtgcatttaacgctttgattgtcattattattgttttggtctccttttcctttttgtgtgtggacatacccaaacaagcatccaatgcaaacaacacaaaaatagatgttggagtttcctaaaaatctcatgtggaccggtcttattagtctcccaatatcaaagtttaagcccaacccatattcagtttctccgacccatattttatatcatggtctagtctagtccacacctaaagtcgataagttcgaattaaaatgaaagtgttaaaactattaaaatgaaatgaaaactattcaaatcaaaaagctaattttgcaaacgtttaatgtattagaaaacaaatcattgcttaattgtgtgtatgtaatttattatttattatattatttttataattactaaatttctgtagggtatataataaattgaaaaatattattttgcaaacgtttattatcttaagacctttttgaaatcacattatccaaaattcaaaactgattattttccgtaaataaattaggaatatataggatattaggattttcccactccacaaaattctgaaccagaattattaaaaaaaaaaaaaaaaacacattgtcatatctctggtcccatatgtgatatg

SEQ ID NO: 21781 - DNA, 3000 bp, Unknown; identical to SEQ ID NO: 6834
  misc_feature (1)..( 3000): 2750-1469P.txt file - cDNA_ID_2027344; gDNA_ID_1621108; Annot_ID_171696

SEQ ID NO: 21782 - DNA, 3000 bp, Unknown; identical to SEQ ID NO: 6834
  misc_feature (1)..( 3000): 2750-1469P.txt file - cDNA_ID_2027344; gDNA_ID_2926208; Annot_ID_202377

SEQ ID NO: 21783 - DNA, 3000 bp, Unknown; identical to SEQ ID NO: 5549
  misc_feature (1)..( 3000): 2750-1469P.txt file - cDNA_ID_2027359; gDNA_ID_1620801; Annot_ID_168683

SEQ ID NO: 21784 - DNA, 3000 bp, Unknown; identical to SEQ ID NO: 5770
  misc_feature (1)..( 3000): 2750-1469P.txt file - cDNA_ID_2027363; gDNA_ID_1974077; Annot_ID_180401

SEQ ID NO: 21785 - DNA, 3000 bp, Unknown; identical to SEQ ID NO: 5770
  misc_feature (1)..( 3000): 2750-1469P.txt file - cDNA_ID_2027363; gDNA_ID_1620816; Annot_ID_169277

SEQ ID NO: 21786 - DNA, 3003 bp, Unknown
  misc_feature (1)..( 3003): 2750-1469P.txt file - cDNA_ID_2027368; gDNA_ID_1620819; Annot_ID_169412
gagagtctttaggtctaaacacatgttacatgtataaaaggaatttaacaaggttgtatacgtagttacgtacattaggtgtttctctgttcgtgtgtacaaccgcatatttttaatctttggatcatatagtgttgatgaatgtgtacatcaactattggagatataatgtattatgctgtatacgtacaacagaatgttccaaaaatctttcttcttttttttattttattttaaatcggccccaatggtgctataataaacgagaaagccaaaaatactacaaataaaagcctcagtgatgggtttatcgtttaagcgaaagtgacgaaagagaggaaactagacagatacgacagtaagttttggtcatcgaagatacgtattgggatccgctcacaagaatttgttgtgtgtctttttgctaaaaggccaatacgaaaatcgttgataattcgtttcatctaccgcaatcactttatccttgaccaaaaaaagaaagaaataactcaaatatcaattttataatcaaataaaaacttaaataatcaaccaatatacccgtgtgtgtcaaaccatactgcatcccaataattgatcttttaatcattctttattatcttatccttggtattgtggctagtggggtattttcaaaagacttttttgacaaatcaacatcacactattaaaaaagggatctcgacggagaccaaccttcagctctctggcaatggcgtatcccggttcgcctatcttgatgaagctcctcgtcttcatctttttatcaacttttgtagtcactaacgtgagctcggaaactaagtgccgggagttcaaatcgatcatcagtttcggagattccattgccgacactggaaacttgcttggcctctcagatcctaaagatcttcctcacatggcgtttccaccgtatggagagaacttcttccaccacccaactggtcgtttctccaacggccgcctcatcattgatttcatcggtacttttgactttacagttttacttaaggtgtgagtaagtaagtgtgtaaaaaggtgaaactaaaagagttattaaatttcttcagccctttctttgttttcatcttctttatggttttacttgattaccaagtttgattgtgtaaaacctgaaatcatctaaatacagaaccattaagtgtggttaagtctttatgaccaacttacaggctgtaagttacagctcttagttcatgttcttttctttggttctgttcacagctgaattcttgggtttaccgcttgtgcctccattctatggatctcataatgcaaactttgaaaagggagttaatttcgcggtagggggagcaaccgctttggaacgttcctttcttgaagacagaggaattcattttccttacactaatgtgagtttaggcgttcagcttaatagcttcaaggagagtttacctagcatatgtggctctccttcaggttgggatgattaactatttcttttttgttttatagtgtttactgttatctatggttaggatatcaattctgatttctagtgcggttgctcttcaaaaaaaaaaaacattcgttctgtttttggttatgcttagtgatatcacttattgtatataatggcttactttatattcttgttttagactgtagagatatgatagaaaatgctttgattctcatgggggaaattggagggaatgactataactacgcgttcttcgtggacaaaggcattgaagagatcaaggagctgatgcccctggtgatcactactatttcttctgcaatcacggtaaacatttatctttcttaatatctcatcaagttcttgatcttctctgtgaacaacgaatattcgatagcacaggagttgatcggtatggggggaagaacatttttggtgcccggagagttcccagtcggatgctcagtattgtatttgacatcacatcaaacatcaaacatggaagaatacgatcctttaacaggatgtttgaaatggctgaacaagtttggtgaaaaccatggtgagcagcttagagcagaactcaacagactccagaagttgtaccctcatgttaacatcatatacgctgactactacaacgcgctgtttcacctttatcaagaaccagccaaattcggttagacttcttgatcgttttactgaacctaaacaaacaagtacattgatcagtttgctaaatattgagttaattatgcaatcaggattcatgaacagacctttgtccgcttgttgcggcgcaggaggaccgtacaactataccgtaggtaggaaatgtgggactgatatagttgaaagttgtgatgatccttcaaagtatgtggcttgggacggtgttcatatgactgaggctgcgtacagattgatggctgagggtatactaaatggaccgtatgcgattcctccttttgattggtcttgccgtagctctggagttaagaacagtgggtcatctgacacatagaattctttgatgagaaactgatacaagttggtcaaaaaattgagaaaaggatactgataaaaacatgtatgttccttagtattgtcttggatcatgttcatgtattgtatcatgttgttatgtgaaataatttaaaagggtatcatgttcatgtatactccactccatatagagagtaagtaaccggcaacggcattgaaaacttggagataaattggaatatttgttgattcaatttggaaaatggcaaaaacaaattatttagccaagtgaacatttgttgattcagtttggaaaatggcaaaaatgagaaagagacaatcatgctctcatttgtgcccatccctaaaccacataaagataccctgtctagtctctattgcatctaataattgatctttgttttttttggactttattgtctccgagcgaatagtggctctttccaaaaagtcattttgaaaagtttctaacctctaggccaccactcatg

SEQ ID NO: 21787 - DNA, 3000 bp, Unknown; identical to SEQ ID NO: 15024
  misc_feature (1)..( 3000): 2750-1469P.txt file - cDNA_ID_2027375; gDNA_ID_2684254; Annot_ID_193078

SEQ ID NO: 21788 - DNA, 3000 bp, Unknown; identical to SEQ ID NO: 15024
  misc_feature (1)..( 3000): 2750-1469P.txt file - cDNA_ID_2027375; gDNA_ID_2684254; Annot_ID_138079

SEQ ID NO: 21789 - DNA, 3000 bp, Unknown; identical to SEQ ID NO: 8802
  misc_feature (1)..( 3000): 2750-1469P.txt file - cDNA_ID_2028729; gDNA_ID_1971889; Annot_ID_58481

SEQ ID NO: 21790 - DNA, 3000 bp, Unknown; identical to SEQ ID NO: 8783
  misc_feature (1)..( 3000): 2750-1469P.txt file - cDNA_ID_2028729; gDNA_ID_1971889; Annot_ID_176834

SEQ ID NO: 21791 - DNA, 3000 bp, Unknown; identical to SEQ ID NO: 2887
  misc_feature (1)..( 3000): 2750-1469P.txt file - cDNA_ID_2029104; gDNA_ID_1620613; Annot_ID_161986

SEQ ID NO: 21792 - DNA, 3003 bp, Unknown
  misc_feature (1)..( 3003): 2750-1469P.txt file - cDNA_ID_2029214; gDNA_ID_1972175; Annot_ID_179986
tggacagcctgagcctgtggaagaccaagcgtgcaccaacgtctgttctcttgctttgttattagaaactttttgaagtaaactatacaaataagtggaaagactgataatactaatatgtgtctcttttggaaaatattttcaagtaaaaataaaataaataccaaatataggtgaaaaaaggttttaggataacaagaacgattatccacaaaggcaacatgaaagcagaaaccttttccctgcaaaagtgtatagtaaaacacactcataccaaactttcccttcttttctttttcttatcatctttgctcttttcccggaaaattccaaagatcaacagccgcagaaacatctcataaatcatgatgatgaagttctatacgttcactttcttaatctgcttgttctcgaagctccaaggtcactgcaaatcagatatcagccttggcaattctctgacgctcacttctcctctagaatacactccagggtttatggggaaagcttatatcatagagacagaatcatcgtcaacaagagaacctggttttaaagccgcgttaacaatggaatcaagcgacaaagatgatggaagatatttatgttcccttcaaattttccttggagatgtaagagtttggagctcagggcattactcaaagatgtacgtttctagcaaatgcatcattgagctcacgaaagatggagacttgagactcaagagtagctataaacacgttggatggagaagtggaacctcaggacaaggcgttgaggtataagatttgattggttgatcatttttaatgacagaaacatgtaacatgctaaactgtgtttggaaacaaaattttgtagaggttggagatacaaagcacagggaatctagtgttggttgatgctaagaatctgatcaaatggcaaagtttcaatttcccaacagatgtgatgttgagtggtcagagactagacgtggctacgcaactaacttcattcccaaatgactcgactctgttctattcctttgaagtcttacgcgacaagattgctctgttcctaaatttgaacaagctcaagtactcttactgggaatacaagcctagagagaagaacacaacggtcaacttcgtgagactagggttaaagggtcttgacctattcgacgataacagtcgcataatcggaagaatagagcaaccgttgatcagattcttggcgcttggaaacagaaccggtaatttaggactctattcgtataaaccggaaaagggaaagttcgaggcaacgtttcaagctgtgagcgacacttgtgatcttcctgtagcgtgtaaaccatatggaatctgtacattctcaaagtcttgttcttgcattaaggttgtaagcaatggatattgcagcagcatcaacggggaagaagctgtttcagtgaagaggctatgtgatcatgagatggttgagctaaatggagtcactacagtgctaagaaacgggacacaagtgagaaacataagcaaagaaagatgtgaagagttgtgtaagaaagattgtgagtgtggagctgcgagttactctgtttctgaagagagttgtgtcatgtatgggatagtgatgggtgttaaacagattgagagagttagtggattgagttatatggtgaagattcctaaaggagtgagattgagtgatgagaaatctaatgtgagaaaatgggtggtgggattagttggaggtattgatggttttgtgattttgttgcttatttctggatttgctttttatttcattcggaagcgacggaaaagcttgttactgccgccaccgccaccgccacctccaccgctatcgcagcagccggctaataccgattcttgatagttctgtttttggatatttcagattaacttgtgtcttacaagaatacatgtaaacattgataccgtttatagcgaaaaccgttgctttacatcgaacattgtaaaagcctaaagaaaatttattgattaatgtttctgaggattttgaaggtaatgcatggtatatcactcttacaattattttttcttataattattccatttataaccaagtttttttatgatatcaatatagttgattcgttggggataagaaaccaatttcttagagttttatgatttttctactaacctttgtttagctaaaatatttttgctattcaatcatatttcactattcatctaacatatatgtcaaaactcaattatttcatgtaaaacagaagaagaaaaaaaaacactgtttttccacatttctactgttaggttaggtatgggatatatagaatttagggctcatggatttatggtatgaataccagtgtagaattgtacgcactagtcgcaattcgcaaagcagaccaaggcacgtccaacggttagttgaaatagtgtcattttaaaaactgagactttcactatgtggcccttctttatgaccgttagtgatccccaccacaaactccatcattgacgcagctaactccggcacaactccctctataatccaacggtccaaatactctttcacttttctccaaataaagttatatttctaatcacatttctatttctagattagaagacaattgagaaaacgactacaagttcacacttttttattgaatccaacggtccaaagattctttcacaaatactttgaatttacttgaatcaattaatctcacttgctataatgataagatattcacctccctcttataagataacaaaattagattttataaaaagtgcttaaactataaataaagacaaaactagtaactgagaaggcaacggacacttgtagctttatgcaactttaattattccctacatgagaaaaagaccgttgcgataatataaagtcttcgttcacacacaatctcgaagaaaacaacaacagttttgatcactctgtctctcttactctatcttcttcccaagttcttgtcttttgatg

SEQ ID NO: 21793 - DNA, 3000 bp, Unknown; identical to SEQ ID NO: 6855
  misc_feature (1)..( 3000): 2750-1469P.txt file - cDNA_ID_2030742; gDNA_ID_1621109; Annot_ID_56064

SEQ ID NO: 21794 - DNA, 3000 bp, Unknown; identical to SEQ ID NO: 6855
  misc_feature (1)..( 3000): 2750-1469P.txt file - cDNA_ID_2030742; gDNA_ID_1621109; Annot_ID_171746

SEQ ID NO: 21795 - DNA, 3003 bp, Unknown
  misc_feature (1)..( 3003): 2750-1469P.txt file - cDNA_ID_2031118; gDNA_ID_1620418; Annot_ID_156515
cggttaggagaatatatgttcaaattatttgattaacctatctttaacccaaatgatttagattggtttgaaaccgaaccaaaccaatagctcaatcatgaataagatgatttagtgtagcttggttgtatttttcttttcaaatatataagtgaaaatatgtattaaattcaaagaaaattattagaaaatatataaaaaccaagaaaataacttattttggatttttttttttttttttaagtgaactcgaacccataatttttcttagtcagtgttcttctattgattttctttattttgataaagattattattctactgatttacaatgaataaaataaaaaagagagtagatctgtttccttatccacaataattcaatttggtagtgaattacaattatacgagtaagtaacagtcgatcgtgagagagcaagagatatagaaaagtgggtgatgtgtctaataaatataggtcacacaaccacctaatcttacgaatcattctactctccatatttaaagttatatagcaatcaatgtcagctacattttcttacgtatcttttttttggttataatatgccatgattcttgaaaattttaattcttgattcatagaattgtatactaaaggttgggatttatcataataatggaaacatgaattctatattaatacataatgaactggattctagaataatacagagatttgggtactggattaaatcgaaaaaataaaactatactgtttgataggtacatttagataactattgtcctggtattattttttaaattttttatttttaaatctgtcgcattttgtttttcctcaagtattaaaaagtaagaaatggtatccaattttgaaccgaaactgcattaaataaactgacccgaccttgtgtgtgtaaatgtatagagtagacacacattaatagttgaaaaagggcaatgctaattgttagtgaccctaattaatactccggcaaggatatatgaccattctctaactgttatgttccaacacattaggtgacctaaaactgtttggaaactttcatgtcacttaataagtaataacaaagcccatgtcaacatccttttttatgtgtttttccccaacattttggtttaattaatcactcattattatatattacttacctgatgaattagctatctgatgaaagtttcgttagaaatatttacatgattaaacacttaaagattaaaaaaacaaaaaattcgatgagatatcagctaagaaaagagagaaaaagataaggctaaaaagtttatggctgtaatataatatataataaattaaacagaaaaaaacttgaaaaaatctaagaggagtaattaatattgaaggaagacagatgaaacaattgtataaaaaatgaatgatagaaattatttatcaactataatctttttttgaaaatctattgtttgtagattataatgaacaatatttcgtttctattaaggtaaaaattacaacaccatagagaggacaacttagctaaatgaccatcaacattgaataaattaggtttgaatgattaaatcctttaacaaaaagtaggtaaatgtttatggaacattcttattaaaaaagcatttttattttctcaagaaatataaaagaatgatatttcttttctttttgcccaacactatgtttttataaattaaatgtttgtatataaaatagtcccaaacaacaaactaggcgtacaacggcatgttattcaaataaatagcactctgattacgtgtttttttttttgcaataaaaaaattcataaacttaattaactctctcaaaatggttacatatatatctaccaacttgacttaaaaggaagaatgatctgacttctgagttctgaaattcatatttaacaaattatccataaatgatgtgttggacacctattaacaaattagcctctagtgtacatgttagacaccgacgtattacttcttggtctctatccaataaacatttggcaaggatcttaaatatgtataactatttgatgtataagtctgttaattgtgaatgttaagaccgagagtataaaagagcttgttaccagtttaagtcattatttatgtatctttattcccatcatggccaaaaatggctgcgttaattactccaccgcaacacgacacttaaacctaatacttaaatgatagtagataagttggatatggaataatggatacaatcctcacaaaataaatacaatttagaacagagaatgtttgattgcttgatgttttaacattttataaaattctgttctttggcaaaagtgtcgttcggtggtttactttcactttattagtaaagacggtgacagtaatttatatatatatatatatatatatatatatatatatatatgactttctaaatttggaaggttagtatgaaatttggttcagaagaagctacaattcatctagtcggtgaaaataattgttgttgtagtcaaaccaaaattacttacatgatttcatttttatatagttaaaagttaaagtttgttatattattacttatatgttcggatttagatctgaagagagcagtacggatttaaagcccaaaattgtacattatttcacgaatataaatcccatatatatgttttttttttctcaaggaaatcccatatatatgtaagataccataaatagattatttgaaagacaagaaaatcatgaagatatgatatatcaacaaaaaattaacacaagaagtcaaattaaatttctctgttggccactttacattatgtctcaaccaacaacagaacgccaagctgtccaaaaaaaaaaaaaaaaaaacccctcaagagtctatatatataacaacattctcaacacaaaccatatgacatttacattctctcaaaagaaactttctacataatataaaaagtcacacattctctctattaattaaacatg

SEQ ID NO: 21796 - DNA, 3000 bp, Unknown
  misc_feature (1)..( 3000): 2750-1469P.txt file - cDNA_ID_2031469; gDNA_ID_1620567; Annot_ID_160745
ttaatggatatgtttattcacaaaatgtataaattcgaatcccgaaatatataaacacttttcaaaccaaattaaccctatattgagttggaaacaaaaattgagaattttcttatagagagagagaatgagagatggatttggctataggtagagaacctgaacttggcagtcatgaaacataagccttagcaaggctgcaggagaagtaggatcaagtataaacattgatgaaagtgaagatctcactatctcttcgactttgggacaagttttctcgtagtaactgtaagacaagccttcattattagtctccatttggtcaccaataatgcagctgcataacaagctcatgacgagaaaacatgatgcagctgtagattctgcaactttgctctttggtttcataactttctcttttgtttggaattttaggtaaatattaaaagagaagatgactttgcacacactaaaaaaagagagagaagatgacttgtgtatttgcaattggaagtgtatgtataaataggaagctgaagaaagtccccgtgaattcgtgacattaataatcccaaccgaaaagaatttttaaaacatgaaattggtttgagatcccacctagttttaaccgataggttattgatttttttgggttgagtttagtcatcctctcgactcattatacgaaacgaaaccagattgctaggtttactaatgtggctaatgttatatgcgttatttataaaattttgctaaagagatgtgacattagttattaaaaagtcaaccaatactaatttaaagactactatatttccggttaaagttggttaacagtttctgaaccgaatatatctgtattaatatgatgttggataaagtatatgttttcaattatattgtagagaaatagccaaaaaaaattcgtgttttgttttgtttcagtatagttgcggtacatgggaattgaaatcacgcatttgcttacataaaagtagcgaaccggtggaccggtttggttcaataaatggttataggtaacagttgatggagaagacaagacagagaatgggtaaaagcaacatgcatggataatgtgaaacagttaggttgattttcacgtttgcatccatatactacacacatatattatctatccacatgatgtctattaatgtattatcaaattttggattttttagccttctcttttaattactgttcttatactataaaataacatttcaattttctgcattttaatttatcataaactaataatgcttgattaaatatttcaacaacatacatatatatatatatatatatatatatatgatgatgtgaatgcttggttaaattgaattaaaagaagtagaaaagaaaaaatattctaaaatttaagtgaaacgtgaatatatatatatatatatatatttttttttatcatcaatcattggcctaaaacgtgagaaaatagcaaaaagaaattggcctagctagacccaaaaaaaaacattcattgttacaatcgtcaatggagggttcatatttcagaaaataaaataaaaaatcagataagcattatctatagtctataggctataagatataaataattggaatatagttatcaatatattgagaaaacagagtccaacagaagaaatatatacacccaatgacccaaaggtgtagggttagtagaaaaagacgagtagagattctagagactccagtgagtaatattggtggaagtcattaatacgaatttgcggtgaaattaatgtccctagctgttttccaaatgtggaatcaacactgtgacttcactatttcccttcgtcatcctaaaactctctctattgctttctcttaattctctgtgttcttttagatccgcaataacatacaaaggtccacaagttgaggagctagagtctccgttaagagtaataaatgtggtgatattagtaaacgtaaagcttttttttgttggtaagaaaacgtaaagctttcttgtgaaaatatatgcagcagtaatttaactataatacgaaaaattactttaatttaatttaatgtcaactagagtgtagagtgtagtggtaactggtaaacttccacaagcatagtttttttttttttgttggatactaataaagtagcatcaaactgatcaaagttataggtttcttttcctatgttcctcgtcaagtttgaggtttgtggattcgttaaggacaaaatatagcctttctataaacgaatatattggtcctacccttattacagctaaacacaataaatattttgctaacttaattacattaatacgttgaaaactagtaatacgtacatcgaatgtgaagttgtgaaccaataaaaagaaaaaacatgagagaagaagttgtgaaccatatacagattgaatcatataagatgatatatcactcccaaattgaagttttgagacaacttttatcgtatattatggagaatgcataaatccattgaatttttttaatcaagattttgattttcagtaatgtttttgtagggtataagaaattaattatgacaataattgacgttctattggtggattgggcttcacgagattctaatggcccccgactaaggtacttctttgattaccgttgattaatgaataagcggcttatacagtgtatcatttacacaacattcacaatttgtttttgtaattagttaccaaagatagaaatatacttcaaagtatttatcgtccattaatccttaataaatgtctaaaaataaaaaacaaaacattccaagtaaaaaccatttcttcctccaaaatcccttacctcccaaaactaaacaaacacaacaaagcaccctaaatttaaaaacctgttttcttaaattaaacctctcccttcaccaatataatctctttctcataaccccattccaaaagaaaagtagaaaccccaagaaaaaataaaaaaaataatg

SEQ ID NO: 21797 - DNA, 3003 bp, Unknown
  misc_feature (1)..( 3003): 2750-1469P.txt file - cDNA_ID_2031499; gDNA_ID_1620581; Annot_ID_161161
acttaccatttgtttcataaatcccgaaattgatttatacacaatcctaaccagttagaaccagttagctgccggtgtgcaactatgaagtccattcctgatcgatatttatatggttataggcttatagcctaagcttattcacctaaaaacaaatcaatggttagctctatagtcaagttttttattcatgtaataattgactaactttaataattcagttatgtcatccattatgtaaaagtgcatcaatcctcaaaatagaaaagttatatcggttattattttaattttcaatatataagatagttaaattttgtgttaaaaatagaatagaaaatggaaatttagtagagtgatattccatattactttattgaacggatgtcagtattgtttgtgctactgctatatatcgtctctaaagtttgtacggatcgaccagtattaatgtactatgtagtctagtatttgtgttagagttgttactgtatcaactatcaagtatcatcgctcatattcaaattcgtataatacatgttgatagaaaggaaaaaaaatatagatgattacttaatgtcacatgtatttcgaccaaatgttcttttatttataaacttaaacgttaaaagagttttcaaaacacattctacctacaatttttcttctttcacgttgttcttaactacagaagatttgatctctacattaaaaaatatatatataacgaaactctggaaacatcattgttcgattggtttctattgcaagttgcatgtagggtttaaaccgattttaatttatatggcacaaatccattattccaaaaaagaaatagaactttatgggtggattgtggtgtaccactactagtaaagttgagaggaaaaaagctagatctctgggatcaagcaaactattaattacataccaaatcaagaaaactaaccttaattgacttttctccaacaaaagatatgaacgtggcctgccatttatatgaaaactttataatataaaaaacatgaacgtggtctggcctgctttgcataaaccaacccatataataaatagtgagaaaattaaatgtaatgataatagtagcaatgtataaatcaagaagtagtttcgtaatgatggacacaacgttttcgtaggtgccagcttcatcaccttcccacattctctctctttctcacctggtacgatcgtaaccggcacgtgcgattcacgtggctcgcaaaaaagttgactttttagctttgatttaatctcaacaaacattaaaaagtttatgatgatgaatgattagtttgctttttcttttgtataacatgagaggttacatgttattgctcatatctttcacttacatagcgcatcgcacgatgatgatttgatctgatatacggtctgatggtcatatgttcagtttttaagctaactagatgagttcaaatacataaaatcataatatatgcgtatagttaaatatatttcaccatagaatagctagctaactaatacatggatcgatgccaaaagtcccaaaactatataagtgacgaggacaccaacaaactattcgtcacgtcgacaaaatttagaacgaacttaattatgatctcaaatacattgatacatatctcatctagatctaggttatcattatgtaagaaagttttgacgaatatggcacgacaaaatggctagactcgatgtaattggtatctcaactcaacattatacttataccaaacattagttagacaaaatttaaacaactattttttatgtatgcaagagtcagcatatgtataattgattcagaatcgttttgacgagttcggatgtagtagtagccattatttaatgtacatactaatcgtgaatagtgaatatgatgaaacattgtatcttattgtataaatatccataaacacatcatgaaagacactttctttcacggtctgaattaattatgatacaattctaatagaaaacgaattaaattacgttgaattgtatgaaatctaattgaacaagccaaccacgacgacgactaacgttgcctggattgactcggtttaagttaaccactaaaaaaacggagctgtcatgtaacacgcggatcgagcaggtcacagtcatgaagccatcaaagcaaaagaactaatccaagggctgagatgattaattagtttaaaaattagttaacacgagggaaaaggctgtctgacagccaggtcacgttatctttacctgtggtcgaaatgattcgtgtctgtcgattttaattatttttttgaaaggccgaaaataaagttgtaagagataaacccgcctatataaattcatatattttcctctccgctttgaattgtctcgttgtcctcctcactttcatcagccgttttgaatctccggcgacttgacagagaagaacaaggaagaagactaagagagaaagtaagagataatccaggagattcattctccgttttgaatcttcctcaatctcatcttcttccgctctttctttccaaggtaataggaactttctggatctactttatttgctggatctcgatcttgttttctcaatttccttgagatctggaattcgtttaatttggatctgtgaacctccactaaatcttttggttttactagaatcgatctaagttgaccgatcagttagctcgattatagctaccagaatttggcttgaccttgatggagagatccatgttcatgttacctgggaaatgatttgtatatgtgaattgaaatctgaactgttgaagttagattgaatctgaacactgtcaatgttagattgaatctgaacactgtttaaggttagatgaagtttgtgtatagattcttcgaaactttaggatttgtagtgtcgtacgttgaacagaaagctatttctgattcaatcagggtttatttgactgtattgaactctttttgtgtgtttgcagctcataaaaaatg

SEQ ID NO: 21798 - DNA, 3000 bp, Unknown; identical to SEQ ID NO: 3837
  misc_feature (1)..( 3000): 2750-1469P.txt file - cDNA_ID_2031704; gDNA_ID_1620669; Annot_ID_48122

SEQ ID NO: 21799 - DNA, 3000 bp, Unknown; identical to SEQ ID NO: 3837
  misc_feature (1)..( 3000): 2750-1469P.txt file - cDNA_ID_2031704; gDNA_ID_1620669; Annot_ID_164030

SEQ ID NO: 21800 - DNA, 3000 bp, Unknown; identical to SEQ ID NO: 3837
  misc_feature (1)..( 3000): 2750-1469P.txt file - cDNA_ID_2031704; gDNA_ID_2926170; Annot_ID_140095

SEQ ID NO: 21801 - DNA, 3000 bp, Unknown; identical to SEQ ID NO: 3837
  misc_feature (1)..( 3000): 2750-1469P.txt file - cDNA_ID_2031704; gDNA_ID_2926170; Annot_ID_199457

SEQ ID NO: 21802 - DNA, 3003 bp, Unknown; identical to SEQ ID NO: 20128
  misc_feature (1)..( 3003): 2750-1469P.txt file - cDNA_ID_2031854; gDNA_ID_1620711; Annot_ID_165439

SEQ ID NO: 21803 - DNA, 3003 bp, Unknown; identical to SEQ ID NO: 21198
  misc_feature (1)..( 3003): 2750-1469P.txt file - cDNA_ID_2032001; gDNA_ID_1620753; Annot_ID_166846

SEQ ID NO: 21804 - DNA, 3000 bp, Unknown; identical to SEQ ID NO: 5540
  misc_feature (1)..( 3000): 2750-1469P.txt file - cDNA_ID_2032139; gDNA_ID_1620801; Annot_ID_168657

SEQ ID NO: 21805 - DNA, 3003 bp, Unknown
  misc_feature (1)..( 3003): 2750-1469P.txt file - cDNA_ID_2032685; gDNA_ID_1972175; Annot_ID_179982
gagtcatacccggacaagttcggtatgttgaaccgtaaacatatcacctatgatccactgactaacacggtttgagtcgacttgtcataaaattcacctagtaaaaccgacaacctgccttaataattaaaccgtcgaattccggtttgtgtctcacaagtcacaaccgtccggatcccttgcccatttactttatcacgtgtttttccccataagtttatattttttattaattgatggacagaaagtttttggttttgggatgaagtcacgaggacaagaagaaatggaaaaggcatcatgacttgtaagggttaacaacaagagatagaggttatatgcttacgcggtcctaagcacgaatactagaagcttagggttaggaccactagagatataatgcaatttggaagtcaccacaatgtttaagaattttatcagcaactttggttgaaaataataaagaagaatctagttcgaagttttctctccatgattttttgaaactgatggaccatcaaaacatctttggcgtatggtggggcctcagaacacatgggccgggcttggttacacatgagaaaattgttgtttttagttagattttggtggactagtataaatggataaaagaagtcgttggaagaaaaccaaattgatagaagaaagaagaagaaaaatagcaaattgttgaaacagggacagaggctgtctttaaggaaaatcccgtatgattaaagtgtacgtaatcgattagtgttcctctgtaagcactaagtcaaaagtaaactctaaagccaaaggtttcaattttcaaacattgttaaagcgaagtctgtccacgagaattagcacatactggtccaccatgttatcaagaaacgccaaaccttttttttgacaatttatagtttttgaaatatttagtagaaatcttttatcttaaggaagagattgacaaaaatagataaataaacaaataagaataaaagattgaaatttttgaaattaacatatatttagccatagtggaaagaaaaatttataataaggttggtatatcaaaaatcaaagaacatgtgaaaaggtttaataaaataaaagctatagaaaattgataagttttgtccttatgaaattaatgtcatgatatatatatatatatatatatatattattgtactttttaattaataatccctttttgaaaagaaaagaaaaatatgtataagaattttttgtagtgttcatattcagttttctagaaaagctaggaaagcgaaagtggcctggcatggttttgtaatttccttttttaatatgatcataaaataaaatatgtaaaatgaaaaaaaaaactcattaacaaggtaaggaataatgagttgacaacaaaacaaaggtaagggataaatgatgaactattcggatgaacatattattgcaaaattcagttatatactatatggtccaacgctactagcaaagtagcaatacacatgttggtcataattattgaaattagttacaatttgcgtgaactttcttaattaataaatatttaatttgtaggttatgggaatgaactggaaagtaataaagttgaaccgcatgggtgaaaagatgattgtttttggctaaactaatgtgtttttatattgctaatttgatcggatccccatatattctcataatcactccctcttattacgttgaaacttgaaacaaaatgctaagctgcctaaaactcctttcgctttttagaatctagaggagagaactaacaaaataataacgaacttattttaagatcttaatatgcgaatatgcgattaccaaaactatgcctatatatcaccgtgagtctttctttttttgggattactttgccagtttgcctataaccatgtcattgagtctatgactacaacatggcattgggtttagatgtagtggtcaacatcttatagttattgagatattgagtccattggtaataaaaaaaactcggttaaagaaaagaaaaaccggtttaaaaacggtataaaacatgtggttgaatgattatgattagtgaaaacaaaaatttgactaaaaaaacttactaaaaaaactttaattagtatacacacaccttgcttccacttaactatcatgaagccatcatcactgggtttacatcggctaagtttatgaaagtgaatgtctctataaatgcttactctctttttaccatacatattagcctagagaagtatgtagagttcaagtttccaacatacattaatttgaactcaatacgtacgtgaaagcaagccttcctacatcaataaagaccgacctactagtttcttcataaatcagatagaggccgtgtttgaacgtagatgcgacttggtgtctcaatgagtgtaaaataaaaacctaaaaaaggaaaaaggtaggaccaaacacgccccatcccttaatctcattattatcacctcttccacacgttacctccctgcaaacctcacgctccttccctcataacacgtgactctcacgctcctccacctctcaaaaaaaccaaattttccttgtaatttacttgaaccaaattcatatattcacctaaacataactaattcttgatctaactttcgaaaattttcaaattaaaacatctcattgattccaaaaacatactttattgttttatatggttagtattttaatctttacgtaaataaaagacgttggaattggaaattactactagtagattgctttatcagaattttataatctatacaatgtaaaaagccgcgtcatctgttcaaaaattcagaagatcagagtcacgcctatatttctctctctcccgtcactctcactcttcctcttctgcttcttattattacatcgatcctcgttgtccctcctctgtttcttcaatatctctttctctccaacaaaatcaaaatcaagaaaacaaaaaagaaaaactctcaagaaacaatg

SEQ ID NO: 21806 - DNA, 3003 bp, Unknown
  misc_feature (1)..( 3003): 2750-1469P.txt file - cDNA_ID_2032694; gDNA_ID_1972175; Annot_ID_179980
cgaatccccagccaaatgttcagagctcacaggttcccagtcaagtttcctcaatacgaacctttgacaatcccatcagttttgggctcccatcgccattcaccataccggtgtactctagtggatccactaccagtagtttaggtttctcacctccaacagaacttgtttttcctcaacccggtgaagatgagcgttttgaagatccatgttatgttccggatccgatatctctactgggacctgtttcagaatcacttgatttaagagctgctgggtatgaaactggcataggacaggtaaaataccaggcgatgaagaatacaccttcttgtgaagccaacaagccatctccaattgagtctcccttgtctagatcacgggctgcggatgaaaaacaagctaatgatggaagctggcaaatgtggaagagtcctctaggccaaaacggtcttggtttagttggtgggtcagcaaactgggttataccttccgaaataagtagatctatcgaggaaagtgatatgcatcacgcgcctcagcatagaacagaatcattattttcaaaagaggattgccagcttcatcaaggtgcttattcacaaaggaaggactatcttgaacatgatcagagaagtggcgttttcagccccattactggtccaaccactactgatccttggtctcagaaaatgttcttccctgcattatctggtattgagagtcctttttctactaccacacaaacaaaaagcgtcttgaacaatgcggcagggtacagaagtccaacgggatctggttcagacaatccatttgaacatccttctcctaatcactggctcaagtaagtcctgaaaacttgttgtttctgtagttttctgagatggcaagacaaagtgtaaatcttgaaaagaagcagtaatgatttggtagaatttgtgaatgtacaggaaggtgaagagctcagggaatgggagtgggaagcaagttttagcggccggtgaagttgagaaccaccaaaaagatgtagaatcattctggtagtcacaaaattaaacaaaatgaggtcaaattttttgcagatacacacacgttgactgtgtctgtctgtctctgtcttttgtcctctcgggtcttcaatggagatatagagataatttagattacattttatgcatttaccattacagtgataacttaatattcaaataaataataagaattaaagtatatttctaatcttgatacgacgaaagttgtttatcatctcgtatcaaacgtagaggcagttgaacaatttaacaaacgaaaatgttcttagattggtataaccattcgtcgaaaactataaagatttacttttatttaaccataagatgatatcatctatcaaaaagtgttaattatagttgatcatatataataagaacaaattataaaggctatatacaaaggaaatttgcgttaattaggttatctaaccgcatgcatccaaaacaaatcatgtatttaaaaacttgatcacaacttgagcaaaatatatggagagcaaagggccatcgccaatagttccacttgtgcttgtggtactcttcggatggttcctatgcggctcgtaccttgtctcactattagaagatgttgtattaccaatcttacaaaccggaacgttcattgtaggaatctttctcttgcttctccttttgcttctccatgtcttatcttcttcttggatctatccatggatcccttctctttttcttttaccatctccggcttccaccacttctactgactccgacagctttggccttggatcctttcttttgctcacactttttttcatctccttctggttgtttcagtcagtgtaattaatgtatattcttcttgtacacaaatagtttctctcattggaatttgtattttcctgattgttcatgcaagatattattatacacttttttacatcttataggaaagaccacttgataaatcatgcaagattccaacatataatgtttttctttttgtaatgtttaaataattaattactgcatcactcatatttcattttgcttgtaaagaaactgaatacaacatatatatatcatctgtgaaaacaagatataagaaaaagaagtaggggtgaaacaaatcaaacacaataaaaaaacctagctagctagctaggatcggagttgcataataatgagtcgatagaagatgttatataagtctccgtgcaaccacctttcacgaccaaccagcacgaaggacatgaaatgaaagcaacaacatgacacagagggaagatcacatgcattgccttgggttttagattcaaattttagggtcagattttgagtactgtaatatgtgtgtttaaataaggtaaaaactataagaaatttttttaagaaacttcttacttgatttatcattttttccaatatttttgtgaagatgtaccaaacatatccaagaaaataatttcaccaatctggtagataatgaatgattcgatatagtatgtatgtgctataaaaacttttatcaatgcttaaacttaaaatagctttgaccatatctaaactatgttataaaataacttttaaaatattctttttttaaaaaaattcttaaaatgttttatatgttatttgaacatttctttgaaatgcccattattagtccattagcccaacaaaccgttggatatatgggtggggcggcgtttaagaggcactgacttgacccgactacccacccggttcgttccttggttccggttttgccttgtaaacattttctttcgtttttcttcatcatcttcttctcaaatctttcgcgtttacggtttcttcgttagcaggattcgaacgaaagccacgagactacgtgattcaacccgaatacgatccgaatcaggattctccttccatcatcttccatccccaatttcaaagctcttctctttttggctgatgctttgcttcaatg

SEQ ID NO: 21807 - DNA, 3003 bp, Unknown
  misc_feature (1)..( 3003): 2750-1469P.txt file - cDNA_ID_2032704; gDNA_ID_1972175; Annot_ID_179977
aatgaatcagaatcctccagttcgtctggtgctactggaaatggtagacatgaccaagaagactcgttggatgcaggagtaagtataccgagtacaactgggcctgatttaagtggatcacctggtgaaacagtgccttcggtttcagaggaacgattttcgggagacgcaaaagacttggctactttgaggatccaaaagttagagatttccgatgatgcaatgaaatctccgtgccttagtgataaggaaagtgactctcctttgaatggtaagcatcattcttttaatcagatgagaaatggagaagttttaaatggaaacggggtggggaaacagcaagagaattcctggcatactggttccagaagagttaaagatatacatattaatgagaatgagaatgagcatgttggttatgaagacctgccattcgcaagtgcagtaccttggccacaggaggacatgcatctccactactcaggtcattgtgtttctggcactccgaatatgctgtctgacctctcaggcgattacgagagtcagcttaacagtttgcgatttggtcgctggtggtttgattatgtccaaaatggtcctatgtctccactatcacctcctgggctgcctcagctgccgaacaacaattcatgggaagtaatgcggcatgctctgccattcagacgaaatgcgcccactccagtaaatgcaaatggagttgttccgagacaggttttctttcatgtgaaccctcagatgattccaggtcctggttttggtatcgaggaattacctaagccacgaggaactggaacatacttccccaatgcggtaattacttatttgcctctctaacatctcttacagacactccgtaaatggccaagcttctaacgtctcctttatgcagaaccattacagggatagaccgttctccccaagaggaaggaactcacaccaagctaggtcgccgcgtaacaatggccgaagcatgtcacaagcgcactcagaaatgaattttcctgacagaaacacccgtgagagacagcttcattatcccaaccaaacaaatggttcatgcgatatgagtcacactgattcacttgatagctttcctgataccaatggctctacaaatcatccatatgaaaaggctccagactttaggcctacagagcctctaccagtggaagtactctcccctcctgaggacagcaagccaagagatagcattgaaggtcatcataatcggccacatcgtccaaaacctagaccctcctcaacacaggaagaacggtacagcatatatctcttacccttaaaaacatattgtcttcactgaattattaccatggatcaccaaagccactatctaattcactgtagtgatgtacatgtagggtaacacctacacagtcataccatttgacggatgatgatgagttccctcctttgtagctctggcctgaattacaaatgcatgctctctagaccgttataggaacaggtatagttttctaacttggtttgtctcctaagttatttgtttttacctcctgcaagcgcaaaaaaaaaaaaaagaagaagaatggagctgatatgttttgggctgtggttctttcttgtatgttatctctggtgctatagaataatttatatgtatctttatcaaactctctggacaaaacctttgcagagctttgtattttctacttagacaggtttgctgagtgtattataggatgtttttttttttctctcagtctctattctatcttggtaattctccttcttgtttcttgattcttcttcctaatggatgataaaaaaaaaagtaacaaggttttggtcattataagttgattccatatcatgtcttcttttagtaaaatatgtcattagttgaaaagtgcatgaaatagtaaagagttttaaaaaaaaataaataacagcttttaatatggctaatgcgttcagtttttgtgattggtaactatcaaaatggtaaggtccaattgttgacatcaaatcgtaagatttttttagggtgagcagaagtataatatcgctattttttccgcttttgtgattggtaacaatcaaaatgataaatcattcattgtgaaaatcatcactgaattccttatgttttgttttggtctatgtatagatttagttgaacccaatgtgacaagtttattattctctcaatcagtgctggattctgcaaatcactttcaaaaacattgaattcgaatattgtaataagaaaaacaaaaattgtggggaggggaaatagtcaaataaaagggtaatggtgtcaaagtcacgcaatcatcggttacatacattactcttacatatcgacatacttaacgttaatcaaatctcgtttgacaaaccatcatcaataaagagcacaagaacaaagaagaaggaaaaagtagagcttttttgggaatcagaatcatcatcgatggtgaatccaaagcgtggcaataggtttttcaaatacagaattgtgtaaattgctctctatcttcttctctttcaaattctcttccttttgttgtattcaataactttttccccactttgatgggctgcaaccacatattcttcttctatctttaacttttcccaccaaacttctccttttttttctttttttttgggttctgggtctgcttttttgttgttgttgttgttgaatgaaggtccgtaagggaagaagacagatgattgcgaaagagcaagacgaatacaaattacgccaacaaggtcttgtttttcaaatggcttctcttttcctctctttcgattactccttactcttcttttggttgctcttccgcgttttcttatacgagaatcacgaacgaaaactccagattttctagcacacctcttctctctgcatcgccatcttgttttttcccccaaattttcgattttttttttgtataacttttgagattctgatagatccggtacggagtcatg

SEQ ID NO: 21808 - DNA, 3003 bp, Unknown
  misc_feature (1)..( 3003): 2750-1469P.txt file - cDNA_ID_2032711; gDNA_ID_1972175; Annot_ID_179975
cgtacagctatgaggcatgtcgataacttgagctgtgactccaagcagatctcctccagaatatctctgcgcaaatgaaaaaatcaacccacaccgaaaaatccaaaaactggtattacataaatctgccttttttcctggtagcaaataatctaatcaatcaaagcttagataaaaactcaaaatcaatgctaaacataccaaatttacatcgatcatcggaacttctgagctcttacgattaattaccaaaagccagtgaatcagaaatttctcacttccaacttggaattttctgcatgtaaaaatcatccataaacacacatcaggcacaaaattactcttaatttgcatatgaataatgtacaaacacgataaagatgtagccatgtcagtactccatgttcagcacagataagacatcagaaaaacacaaactgcagtaagacagagctaaaaaaaacatacgaaatggcttaagctaatcaaaagagatgagagaaatggcgaaaacatcacagtatcttcatcatttcctttcagagtagcaacaatcgaaattgctaaatacaatctaaaagctggttaaaccagtaatgaactaagcaagtaaactcaattcaaaagcaccaaatagagctatacaaaattttcatttgaaatgcaatcaaaataaataccagaaaattctcacatcttataaggatcagttcctgtgtagccaattggtttcgctattgggatcaacacctaaaaattggcaaagaaaggcaagcttcaatctaaatttccaaattatccatcaaatgtcttaagcctatttgcacacagtacctcgcgattgacggcgaagatcgggcaatgctttccgatcacatcatgccaagtcgttctcgactgccagagaatcaatagatccttagtctccgatcaaattagaaaataatctcagctaatatgttaaagagaagtacgaacagagtgatactgccccatcttgctcatccggacgatatctccaggtcggtaagcgctggagagaaagggaaatgatagagatatcagaactagagcttgaataaaagcgttccacggtcgtaatcctgccaccgcagccatgcccgccataactccgcttcgttggcgaggtttctccgtgaaatttgccggtaattttcttcgccgggagatttagaattgaagcggaggatgtcaaatgtgagaactgagaactctcatccgtgttattattgggccaaaatatcaggcccaactttattgtttccaactcagttttgaccaggtatagggcctagtaactgatatttgttttggtcggagggcctggtaactgattattgacgaaaccaaaaaatcaacttatatcagaacaaaaaaaaagagacatggtttaacatattttagtgatgtatataatttcgttttaaatcattaccaaaaaaaaaaaaaaaaaacacgaccatctgatctgtagctaaacggattgtgttatgagattttagataagaaaattttacacaaagtattagaatacattagtacattgcttcctaattttgatttaaaagaccgtgttatatatttcgaaatagaaaagtattcacaaaaaattatgaaaatatagtttcggggtgaaatgtcgttgttataacgactaaatgttaaaacaaatatgttttgttatatatatttaagatataacgatgttcatttttggactgttatattcacatcagtaaaatctgttgctttaaatattatacataagtttttaatattccatgtaaaattcttaaattttgattttgttttgcagattttctatattgttttgttctgtgtataacaagattttgatttttgttttcaaaacgggactaaaattagagatttttatatatttttttttccaaaacaaaacgtttactagatttttgtaattggagttttcaatttaaaattcttttatagaacaaaattaattattaatttatctaattattggagttatttattttgttttactaaccatatcattatatgtggataccacgtcaaaacaaaatcatattcgagaataacaggtgatcaaatttctggaacacgtgaaacacagttggatccccttataacttaactcgaataaaggattttgaagacaatgattctcaaatgttacctttttcgtttttaaaagcataatcagttatgataatcgagcttattcaatagaaaaaagcgcgactgcgttagttaaatcataaaaaaaaatttatatttgttaaggtacatgagaatttagtatgtcatagaaaaaaaaagttaaaagtttctaactttttgaatgataaaaaagataaagctaaaccatgaaaacatgtattaaaatctttgacatttctcttaaaacattcataagaatcacaactctataaaaacttaatggaagaatatctgaactttacaatttaaccaactatagtgaaatcaaaattctgaacaaataacttcccaagtcactctaatcaaacttcaaatgatgtcttaagaatttaatgctggtcgttgtttctaaatactgcatcgttaaggtaaataaaaaggtacacaaaaagagcgacatctaaaagggtttcaagttgcatacacaaagttaagacaaatttgttttttttttttttccgatgcagtgaaaacaaaaaagagagagaagaaagaacaatcaaataacacaaaatcggtcctcaacagtaatcacttgggatctttcaaaacctagaagaaaaaactcatctttcttcttcttcttcccctgagacatctctcgattctttgtactcgcttgttttgttcgaactcaatcggattttcaatttcctgggcgtagtttacaacgaactgattccttggtttgatcaatcggtgtgttcttgtatcaatcgatttttttggttagtttttaggtttttgttgtttttcatg

SEQ ID NO: 21809 - DNA, 3000 bp, Unknown; identical to SEQ ID NO: 9718
  misc_feature (1)..( 3000): 2750-1469P.txt file - cDNA_ID_2032744; gDNA_ID_1972175; Annot_ID_179967

SEQ ID NO: 21810 - DNA, 3000 bp, Unknown; identical to SEQ ID NO: 9737
  misc_feature (1)..( 3000): 2750-1469P.txt file - cDNA_ID_2032781; gDNA_ID_1972176; Annot_ID_180011

SEQ ID NO: 21811 - DNA, 3000 bp, Unknown; identical to SEQ ID NO: 9738
  misc_feature (1)..( 3000): 2750-1469P.txt file - cDNA_ID_2032789; gDNA_ID_1972176; Annot_ID_180009

SEQ ID NO: 21812 - DNA, 3003 bp, Unknown
  misc_feature (1)..( 3003): 2750-1469P.txt file - cDNA_ID_2032791; gDNA_ID_1972176; Annot_ID_180008
tcttgcagagacagcttcgcttgctttagtgcggtcagtacagtttcacaagtatcaggcttcacatctttcactgaaactaatggatcatctacttcatgaatggtagtggtagtactgccaaagaaaccacctctcgagtttggttgcgttacaggaggcgaccgaatagttgatgaagaatgctcattgatacctttactgctctgtggttgggaatactcacttgtagggctctcagaaatatgttttcctttgtctcgagaagaataagcatcttgttccacagatctggaaccacaactattgcagcacttatcaggtgacgttactgaattatcaggtgaaccatgcgacaaagtttcaaacgattctctaaagtcaacttcattagctatagaccttgtatcacggagtgaagggactactgtagaaccttgaagtggagattgagctttttctccgttactttcatccgtcacatctgaatggtttccaacgtcacataaatcctgaaagattggacaagaagtattgttcaggaattccagtgaattaagcggagactaagttcaacctttgtgaactaagatatcttcatagataatgtcttcagaaacaatatggttatataacagttaatacaaagaagaaaaaaagcatacatttttcataactttttagcacaatggagagaagacagaataaaagaatcaatgtatacgcatgcaaaccaaatatagaaaactgcagcatatgcacaattatcaacgccacataaaagaaactttgttggttgattcatataaacacgaaatataccataatcacaattgatgaaaacaatttctaaaggtcaaagcctgagatatagggcataccagggcagatgatttattctctctgaaatttttctcccattccctttgagtctcttccatttcttcaaaagatccgataacttgagcacggttttctaacgctctctccaagttgatgtccgtactgtttcccttctctaaaccatttgaatttgacaacttgttcaaactatcgtctcccttcacaacagcaacatccaccacggttctagatacttgatcattcttttgaggaagcatttcagtgcgaactccattttcttgaaattcaaccggatttccatctctcttgtaatcctcagatacatttctggaaagttgaaaaatgttggttattctattacacaacatacataagcaagctttacaattgctttactaataaagcgatttatgatgtatataattagagagacgatttctaagcatataaccttcaatctcaaatttctaagcactgtgtttctaggcaatgcttgcacaatttgtaatagtaaaccactcataaatcactgagcagctaaagataacaaaacagaccttgcttcaccacgtctaatttgccgacaagatcttccttgacgatgtctcggtgaggaaaaataagcacactcgaaacctctgtgatgtctcctattccggttttccttgatcttgtcagaagaacctggttccctcctgcgacctttccaggacaaacttttgcctaacactaaaaaacaaacaaatctccgacactgagagttgctcaaatctcattaaacccatgaatcagaaactttcctcctatcacataaaaactctaacctgagttactctgagagtagcattcatgatcagagtttgaatcataatcatcagacacatcattatacccattttcctctaagatcgcaagaacatcagcagttgcctgttcagccttcttcctctgtaaagatacaatcttgagctgttcctctaactcagctacctaaagatattaagacaggacataagactaaagaacatttcactggatcatccctacaaattataaaagaacatactttatcagcgagaccatcaagctttgctctagcactcttggaaacagctctttcagctaataaacgtgcacgaagaaactcaatagtcactgaagtaggatcttgtgcctctgaatcaatacacctataaaaatgtaccaaaacccaaatctaaatttcgattcgcaaaacgatcttattcatctggaaaaaaaaagacagaactataccgatgatgatctaacttgtcttgattcgccatcgtgtagacgaaccaaaagatctacgaacttcgaagatcggtgtgaagaagaagacgtctctctctttgcttacacaagtcaatgaagatagttttttttttaatctttcactaatgtattttactctcttctcattggttgtaagtatttactaatttcgattttatacttttttgtgtagtagacaaagtcatggatttggattgagatttacagaaaaaaaaaagtaaaaaaaaaaaatgtctttttcagaataggagtaaaataatataaatagagcggacgcgaaaaataaaatgaaatagagtttaattggaatctttaggttacagggattattttctctttccttcttcttcttcattgttctctctctctctatctcttcttcttcttcttcttcttcttcttctttggattttgtgagctaataaacagagaggaatcgccataaaaaaacctactttgtctttcaacaccgaaattaaaggaaatctctttttctctattgagcttttttcttcagcggtgaaatctcccttccttgtctctcagtagtgatttttacatacagctccgctctcaggtttcttcctcttttgattctgtttccgctctttttgggtttacttcggattttaatcttcagattgacgaaaccctagtttgattttggtttcagaaacgacgagtcttcattgatttggtttccccaccagctcttcttcttctttttttgttccgagacctttttgacggaggtaggtacggagggaatctggagttgggtttgaaggatactcttatgcgattcttctggataacttgatg

SEQ ID NO: 21813 - DNA, 3000 bp, Unknown; identical to SEQ ID NO: 9735
  misc_feature (1)..( 3000): 2750-1469P.txt file - cDNA_ID_2032797; gDNA_ID_1972176; Annot_ID_180007

SEQ ID NO: 21814 - DNA, 3003 bp, Unknown
  misc_feature (1)..( 3003): 2750-1469P.txt file - cDNA_ID_2032805; gDNA_ID_1972176; Annot_ID_180004
tataaaaggggggatggtggttgagaagattccagtatttacctaaaatccatgtcccggatggatttgtgtgcctttggctcatccaaaattacacttaggtttggccactccataattctaagacatccatcctgaaaataacttgtagtaagctacaactaaattgtcgcaacagtgaaagaaaaaaatcccttatattgcagttccttaccactcccccaacagctaatttagacccatcaaagctgaaggccatacacttttgtagtccagcattttggagaggaaggagttctttggctaagatcgtaatacctgttgctcctccgacaagctcaaataacctgaaaaccaaataaagttttaattaccatctagaccgtaaaacaaaatttgtatagacaatggggtagacagtgtccaaaaatggttgaagacaactcctcgtatccatgaaataagtggaatagtagagttgctaaagatgaatgcaagaaagggaagtcaaaatattatgaaagagaccaattataaaaggcatcggcaatctccaacaaaagtataggcatatataaaataaaccaaaccttaaacacaagaaattcaagcctcactacaattaattctacatcagcaaacatgggaggtgggagatcgtctgatgtaatgagagaagtaatgtaaagttctagtaatctgatatctagttctcatcataggtttaacaataccaactcaacaaatttagaaacatagtatcagaggaaggaactgtaggatgtctagtaatcataagttttgggtggtaaaagcagagatagaaacgtacttgcaaccacctttggaggttgagcaaacaaagtaatccccaccagggtgcactgaaacagccacaggatcaccatcactatccttaagcgtgtgtgttgcctttggtcaaagaaaaaagagaaaaaaggttggtttttttatttcattagtccacagaagtaaacaccaaaagaaaggggctttgctctgctttctcagaatcagaagaaaacaacttgaagaaccctagatttattgcatgattcagaagaacccaagtttcgcaatccaaagaactatagtagatttcaccctaaacccaataagatttcgaagctctcgattgaaaaattcaaaaggtgtaagaaaaatttaccaaaggagaggaggaaagagaagcagtaatggggtcaaaagagaagatgttgaggagagcaggagaagaaacagatgagccacggcgtttggaagctttagcgataagaacccagtttactttcttcgggcgacgaatccatgatccgcacacaacatgtccactttcacgactcgcttcttcaatctccattcgttgttggattgattgttattaatttcctctttggtctctccctaatttggatccttaatatatatatagacagaaaattgtttttttttgtgtgtgtgtgtagttgttgttccagagtagagaagaggaaaacagaaagtaaaacaaaaaccaaaaaggagttgactttggaaattggacagagagattttgttgagttattatataatgggattgaaaaatctcagatttaacaaacggacatttgcggtggtgggaaaggatattccttaagatccatgttccgatgccgaatttaatacaaacaagttaggtcacatcgtgcttccgtaatctatagcagactttcccattggtgtcaatctcgttgtttaaaaaaaaaagtaatattagaaaagattgaacgtaatctgaatattaagaaaaaggataaatatgaaaagatatgatgtaaatatgtaatcgatgcatactcttaattatgcaatgtaattctttttttgtgacattaatacattatatatcctttatcttataaaacacaagtcacttggcaaatcatgttttgacatgtggcaaatttatcaaaaacaaaatccacaatgtaaaacaaaaatgaatttttcgacaaaactcaaaataaaattaaatgtgaaaacagtgtacaaaattaaaacattatcgtcaattttcccacgatcactctcaaaagaaaataaaaatcaacccacatattctccatactcccacaatttctttttcttctattcaaactatgtaactcttttttttcaattaaaacattcaaactaactattgggaaacaaagacagatacgatctcaaacctatatatacaaatctcggtatcatctttctattgttgatattggtttttaaaagaaggttgagagtaaaatcatttaggagcgagaccttctttgtaacaagagtcttcaatctctaatcagttcatataaggcaatatggccagcgtatgttatatttcttttattttattgattgcgtttagatgagtatattaatgctttctgtttttgaattatcttttattatgtatgtttaatatctttttgcttcatagatcaaccactaaaaataaacaagcaaacttgatcgatagaggataaaacacaaacaaagtagaagacttgagcaagaaaaacaccaatggcaaagtagtaggaggttgaagacgaagtagaagtgtacaacattaagacataaatgatatcatctatgtattgagtcaacttcactctggtaacttttttttgtctatgactataatctatgtttgtattgagtctttgaataccatatgtaattttttattttatagcttttgtatgtattctagaaagcattgaagttggaagctaattctctatatttggaagactaataattttgtgatatcaacttcaattctccattatatatcaaattatcatctgaaaaaataaaatccacaaatacatgaaacgatatatttttccctacacgattatatactaatctatttataaaattaatttttcatgtataaatatcgataatatgtaacatatcataacatttaaattcaaaaaaagaatg

SEQ ID NO: 21815 - DNA, 3000 bp, Unknown; identical to SEQ ID NO: 14520
  misc_feature (1)..( 3000): 2750-1469P.txt file - cDNA_ID_2032898; gDNA_ID_2684126; Annot_ID_137200

SEQ ID NO: 21816 - DNA, 3000 bp, Unknown; identical to SEQ ID NO: 10720
  misc_feature (1)..( 3000): 2750-1469P.txt file - cDNA_ID_2032973; gDNA_ID_2213670; Annot_ID_132762

SEQ ID NO: 21817 - DNA, 3000 bp, Unknown; identical to SEQ ID NO: 10720
  misc_feature (1)..( 3000): 2750-1469P.txt file - cDNA_ID_2032973; gDNA_ID_2213670; Annot_ID_182267

SEQ ID NO: 21818 - DNA, 3 bp, Unknown
  misc_feature (1)..( 3): 2750-1469P.txt file - cDNA_ID_2032973; gDNA_ID_1563882; Annot_ID_148455
atg

SEQ ID NO: 21819 - DNA, 3003 bp, Unknown
  misc_feature (1)..( 3003): 2750-1469P.txt file - cDNA_ID_2033129; gDNA_ID_1972067; Annot_ID_178406
aacggcttcttcatcacaaccgcaaacaccaacttcccggcaaaatccatctcgctctgcggtggataggctaaccactcgaactcttgaaccatcctcgctatcatcaaatgcacatgtaccgtcgccattcccatccccggacagatcctacggccaacaccaaaaggcatcatcttcactccagcaactcctgttatatcggcgtcttcccgccctgataagaaccggtcagggtcgaacttttttggctctgaccagatcttcgggtcttcactaattccgggaagataaaactcaatgttgaccccgacagggatgttatagccagagagagtcgttggttccgttacaccgtgacttaatgtaaagtaagtcggtggatgtcgccggagaatctctttgactacagcttgtaacaagaccattttgtccacgtctctttcatcgaccgcacgatctccaaccgttgatttaatctcatcgtacagtcgagattgaatctcgggattcgctatcaactctgcgattccccactcgatcgccgccccagtcgtgtccgtaccggcattgagaaactccgaacagagcgttacaagatcttcatcagacggcgtcgtttcacttccttcgatgattctaagatcaaagagtgtatcaagatacgagaaagacgataccgttgcggtccgaatcgccttccgtcgtttctcgatgaatccgacgacgaaatctacaagttcccgacgaagcttaagagcacgatttctctcattgtagttaaacggcgttaagatcggaaggtaatcgtggagttttggatcaacggcgtttaatatcgccgtcatcaactgatccatcttctcaattgattcctcttccatctcaactccaaaacagatatctaataaaacacaaaacgcagcgtatctgctgttttgcagaacccagacgagtccatcgttgtctctagcttcagatttgattctctcgatgagtttatccatggcggattttctaacagaaccaaactccttgagccgattcgagctaagcatgttctgaaccatgttccgtctcaatgacctccacacaggtccatacatagcggaatgaactgtgatttcactggagctgaagattttccgggtcggagtttcaacgggtcgggtcgcgaattgtgctccacgttcgattaacgcttcgtgggcgagactggcgtcggagatgatgatcattgttcgagtaccaagcctgagagtaagaatcggaccgtagatctttacgagatcctcgacgtactcgaaaaactgtttcccggagcgcgtgaactgaaataagtttccgatcaccggccatcctggtgggccgggcgggagatttaaatggttcgaattgtgtttccggtacgtaatggttttaagtaaaccggatatgataatcgctagaatggttaagaagacattactagataataagtccagagaaataggagaaaatgataagaatgacatttttaaaaatcttcacctcctctagtgttttcttttagcttcggatgaattgaagaagaagaaaagaggaagctttataattataagactgaaatatttttgtagtaggcaaataatttttgttaggttaatcgtcaatgttataaagccgtaacggtcgttacttgacttgtaaatcttaatttgatgtttgttttcctatttcttcgtataattatctttttaacgccttcgcattattgcttaccatttctatttgcgatatagtttcatttatttacatgtataataatcatattagacgtgtatacagcatgttatagcaatcggttatatgttatatggagtataaaatcattacttagaaacagttagacgttatataatctgatggaaattgagaatgggctcagcattatatggaaacgtttcttataagttactgcaaaaaccacgcaagattgattgcttaaaaagctgatttggccgatcagctcgagaggataacgagttacaatggttgaaaacatataacatgttgtagtgttttttaagtggtaagaggaggcaacatgctatgtgttatagaatattgacttagttaggttttaaagtggttataattttacaaattagtaccgacatatcttttggattgaagtggtacatatgtattgaggaacggacattcgaagagcaccgggaaatggtgcaaaaagtagtgtgtgctttttttttcttttacttttttttttagtcatgtattttctattttcaagtattccggggtttagtgattaattttaatatgctgaaattattattttttaggtaaaaactaatgagaaatatactattataaatcaagggggaaacgattgcggaatttttctgaaccgacagagtgttgcaggtaattttggtcttttataaattcaacttggataattcaggtgacatggctttgaagattattgatgttgatgtttaatacaattcaaattgttgataaacacctgtggattatttagtagtttgtgactttttgttgttaagacggtgacatataattgtgcacaactagagataagttcttctaccgtccaaaatttaactttatataagaaaaacatttcgtacattatatctaatacgaaaaacagtattttgaataatttaactttagttaaatttctaaattagcgttaagataaagaattattatggaaaaatattttggtaaatattttgattgacctcagattattttgccttgattttttttttttttggttgccgataaatacaaatagataacactaaacaaaataaagtacaaaaggaaaaaaacgacaacttcgtaccaaaccaaaacagtgtcgtattaattgattggtgtggcgaaacaaatccgtcgttttgctccgttgatcggcaggtgatcaccagaagcctcgtcaccgtctctttctctcccccctttttcatg

SEQ ID NO: 21820 - DNA, 3003 bp, Unknown
  misc_feature (1)..( 3003): 2750-1469P.txt file - cDNA_ID_2033137; gDNA_ID_2214468; Annot_ID_182913
tgtacacaaactcgctaagctagctgtatatttatgtaattaattattacatttgctgagtaattttacggcaaaatatgacatattttggacatgccacgtagaaaagcatgtgatgatgatatatactgtatatagagtagatctgtgtaagtgagtcagtggtaatatctaactaaaaaagtacagaaatggaaagatctatatgatctctctcgcaggatctcaatctctggcccttttttttgtcaacccttcttcctctcttattatgttcttctctctcttttcttttggttactgtaatttgtttttttgtttattgacattgacacgttttcttgcttcgatttttacggaaagagagatatgtatatgaggaattaggataagtcgatgtaattttgtaaggccacgaaaccatacgatcacaatcaaacaatctgtagcatttagaatccatcaattataatcgatgttgaagtttcggtggtccaatatacttacggttgttaaaactttggccaaaacgaatcgtctaaaagcaataccagatttaaatggaatgtaaatggaaaaggaatcgagaaataagaacaactgatcttaaagtctcacaatgtcctacaaattaaaaatgcacttgtaataatagtaataataattaattatattaaaaaaactccttgcaataaaatcataatttatgtaattcaaaatagatcttgtctgaattagtttcaacatatttcctagaaatgcaaagattaatgaacaaaagcaggacatatataataaatcagattagagaacttctagatctagttctattacttagtcaatcgattaaaagttctatacactcagaaaaaaaaggatatatattcataatatagacagtttaacaacttgagttgaaggaaagattctcacatatattttcgaggcataagacacgatggccctaccattacaggatgataacaaggaacgaacattgtagacacaagaatcactgttacaggttggtaacaaagaaaacgaacctaaattgataagaatgaacgtgtcttttttttttttttttttggcaatccaaattttgttgcatatgcataggattccaaatcatttctgtttgttcttttgtttcgaccgtgtttttttgttaactttaaattatataagttagatgcataaaattagtacacacccatatagaagaagacaaataatcatgtgtctatcacatgaaattaaactgtttgagtatatatattagaccggaatttaatatgtaattttactaattaaaaaatgctttcaaattcgtaataagtcgcaaatcaaatttcgttgttacatttttaaaagaaagtatttcttcttttcaaggaaatattttttaaacaagatcaataaaatacgtattctaaatatagattaactctcttgttccatgtgtatctgtgtttggtgatgtaaagagctcatttacagacatttctttttcttgtaaagcggatatattgtaatgatcgcatgtgaaacgtaattacgtaaagcgacatgcaaatctgagttatggtatattaattacagtttttgtattgacgtgaattttaaaaatgaatttgtttagcatccactgccgttttaacattttattcgttgtaatgtacaatgtcgacaaagaaagcaagtgaaacgtaacgtgcatggcctccaaatcatgaacttattcgtaaaatatcatttctataataatatagtttagctatatatcgcaataataaatagaaaaaccataaaattccaaagaatatattaccaatcgacaccaaaaagtaaagataagggtcataatgggctctcccttggatggtttagaatcttcgtaaccaattgtctccctagtccctattatagctttgagagatgaacgagtaatactgtatcaatcatacaatatatatatatatatattaatttgacatatatattagagctaaccaaaaacaaatatcgcaatagcttagattagtgaatgatagttaattgttacatttgataactcattattagaccgccaagagtcccatcaaactagcaggttcatgcggccacgccgggaccaagatctggttcttttatttcccataacaagaatctttttcattttatttatattatagagaacttttaaagcagtctggttatgttggatctggaggaaaatcaggaaagtacatttgattttttaaatgtactcatatgaaaatgtaaacaaaacatgaataatcctttatatatgggagtgggacctagattttttttgttgctatttaacaaaacaacatttctccaacattctgaaaaacaggatcacttgttttgtttcactgtacagtagaagagttttcactaactagtaaactaattaattagtgatttttatttttttttaatcaactcaggcctaattgagataacttgttcgtgggtatcaggcccaatataaagtattctaaggcctactcaataatatctccaatatttttattttcggacagatcatttatttatttttgtaatattttgttttttcttctcgtaaaaccctaaaatatacaaaaccctcaaattcagtctaccagcgaggatcgatgtcggagctcacagtatctcctttcacgcattaactcaatttatctgctaaaccctaaatagcttcacgccgtttttctaattctcaatcaaagcttcaccgccgccgtgtgttgttctttctccgagtcgtgttctctaatctcaggtgaagcttctttcttcaatttgcctttggtttcgtttcgaaaaatcatgtcttttctaagatttatctccggtgctaatcagaattagtcggtatctaatgggtttctgaattatctgtctggtttggtatcagtgtttaattgtaattgagttgtttggttcgtttaggtgataaggatcaagatg

SEQ ID NO: 21821 - DNA, 3000 bp, Unknown; identical to SEQ ID NO: 9300
  misc_feature (1)..( 3000): 2750-1469P.txt file - cDNA_ID_2033137; gDNA_ID_1972067; Annot_ID_178408

SEQ ID NO: 21822 - DNA, 3003 bp, Unknown
  misc_feature (1)..( 3003): 2750-1469P.txt file - cDNA_ID_2033414; gDNA_ID_1974077; Annot_ID_180420
ggtgaccttctagataaaggtcttgatgagcttaatactacagctgaagatggaagtgtcgatgaggtatttcggaatcttacgctaatttcgtgattctttctttaatggggactgataagttttggtttgtgatgctactaaaggtggcgaacttactagtagatttgtacgaagattgctgtaacggtaactatgaaatgcttgaggaactaagggcaacttattctcagacgagtgcaagtgttgtcaaggttaggttctttctactacttccgatactgtcttgtccctttcactgagtttgagctcatgtcaagtctactttggtttggtttttaacaatctagttaagatagtttccgagagttagaattgaggctgtttagtttcttataccaattatggtgtttcaggtttcaaacggtgatgacgaggaaagtgatgatgaagatgatgatcaaaccactgacatgatggtggatgcgtctaaccagaaacaagaagccatgcctgttgatgaaccagtagccgatgatggttggacggttgtttcgtctagaaaaaacaagggaaagaggaattaacccggttttgatccccaaggtgttgtgtaatttgaacagttttgtttgggttgctttgtttatttattttgataatattatgatagtatgacttgtgtaccgtcactttataaactaaaatcataagattgagttttcacatattaatctactctcacataataatcttatgatcccatctttgacgcctaaaaaaagactcttaccagttatcatctcctccgcttcaagataaatgtttttttttctttttaatagaatgtaaatattcatttcagtggaaagtttgagttacacaattaagcatagccatagtcaaatatggtcacacaaatatggtcacatgccaaaaaaaaaaacagaaagataaacagcatggaagcgtaccaccttcttacaccaaatgatcaagttggcttgtgggtcgtgggttcgtgtgctcttggggctcgccgagtaattttggaccgtggattggcttttgagagttgaatcttatggaaatattctattttggcaacaacttgggaatcactacaagtaacttggggaatattctaagaatattctctcgaaacctacctcctctactatataaagaggcattcgtctctcattatttctcaagctgtcaaacagaaaatactcttagttctaaattctcgcatctattatgtttcttaaaagtaagttcttagtttagtagttttttagaatatatcgtagattaagtttgtttgagcctattattgtgtgctcgggtataagtttgtaatcggttgtatctaggaattcataaaccgtgattgtccgaaagcacttatggtcgacgatttattgaattaagaaaaaagatataatatcttgtttatgtgatttactttttgtctttaaatacagttgttgtaattcgttgttcataccgttattttaataaaattggcatcttttctcaatttggttttgcattcttacaattttattatggccgattaaatgaattaagattgtagaagcgcaaaaacaaagttgagaagaaaatacaaattttattaagataacgataacatgaatgaattacaacgactgtatctaaagacataaaataaatcacggaggcaggatctgctatctttttctttaatttattaaatcggctgtaactactttcagacaatcatgatttatgaatcccaagatacaaccgacaaactaatacccgagcacatgagtaatagactcacaatgactggatctaaagacataaaataaatcacggaggtaagatctgatatatttttctttaatttattaaatcggctgtaaatactttgagacaatcatgatttatgaatcccaagatacaaccgacaaattaatatccaagcacatgagtaatagactcaagcaaacttgatctacgatataatctcgaaactattaaactaagaacttatttttaagaagaaagagagaggcgagattttagaactgatagcgttttttatttgagagcttgagaaataatgagagtcaagtgcttctttatatagtagaaggaggtaggtctcgagagaatattctccgagtactccccaaattacttggagtgaactccaagttcttgccaaaacatagaatatttttgtaggatttaactctcaaaattgggcctatccacgatccaaaaattactcggcaaggcccaagagcccacaagcctatgtggcccaaaagtcgacgatctgatgaccatccctcgtgcctagcttggttcgatttagcccaagttactcactttacaccctttttctcatataagtcaactccgtttttgatgtatgagtataacatcttgcagtactcattaccatatttccattgcacaattgatctgacaatttcgtttggcaggaattggcaggaaagccgccggaaagtcactttttcaaaaacagttccaacaaaaccatatagacaaaatcttagtcaaccaaaaagattaataaaattatacaagaaagagatataagcacaatctacatatactaattattgtacatcaaactggattaggcttattgtagcgttacacgcaatatactattttttcatgttttggtattttattagattttagtaaaatatctatatttatagtaaaataaataaatagtaaagtatactatatattaatacatatttatagtaaattaattttatatatagtaaaacatataaaaattaaatgaaaaatgtaaaaaatggaggttccttttcttgagattgaaatgcaattaataaataatagtcaacaatattcactatttcctctatataagaaggccactagctctaaccagattcaagttaatcaaaatgcttgtgtggaaaccacactagtgaaagagatatg

SEQ ID NO: 21823 - DNA, 3000 bp, Unknown; identical to SEQ ID NO: 5771
  misc_feature (1)..( 3000): 2750-1469P.txt file - cDNA_ID_2033485; gDNA_ID_1974077; Annot_ID_180395

SEQ ID NO: 21824 - DNA, 3000 bp, Unknown; identical to SEQ ID NO: 5771
  misc_feature (1)..( 3000): 2750-1469P.txt file - cDNA_ID_2033485; gDNA_ID_1620816; Annot_ID_169271

SEQ ID NO: 21825 - DNA, 3000 bp, Unknown; identical to SEQ ID NO: 9837
  misc_feature (1)..( 3000): 2750-1469P.txt file - cDNA_ID_2033821; gDNA_ID_1974083; Annot_ID_180473

SEQ ID NO: 21826 - DNA, 3003 bp, Unknown
  misc_feature (1)..( 3003): 2750-1469P.txt file - cDNA_ID_2033838; gDNA_ID_1974083; Annot_ID_180468
tgagtacacaatttagggttattcctcatctctgcgctcaccactccctcggcatcttccctcgtcacagctctgtctgccgataacttccctgctgcaccctatataattcattcggttcgaaaacatttagccactactttaaaaggaaaacatcaaaaacattgatgaaaatgttttgaaaattagggtttaaccgtcaaaacatcacgaagcttgattttcctctcgtcacgatctacggtagcgttgtgatccgctgcagattgagctgaagcggcgactccagctagagcaatgacgttggtaccggaagctctcatctctgccgcttgaatcgctgcggcgtcgctttgatccacaggtttgtttccagctgtcttcacagttgcttccagtgcttctccaatcgttattgtactttgcaaagcttcttcgtccgtacgcgcagcagcgactacacgcctcggttcaacgtgttgtccaacgacctaaagcttcaccattactccaaaacaaaaaacggatatatgaaaagaagtactagtacttttcgaaacaacttgtgacctgtccaccgacgaattcggttgtgacagttgcagcagggaccgtttgctccactgtggcgcctcgttcagcgacaagctcagttttgtcatctggatggacaaagccaccgcgtatattggtggtggctgcagattgcatgaccgcagctggaccgcctttctgagtatggccgaacacatgtgtctccgcggattgcatcatctttgcatcctcaggtgctatgggcttatcagcgagttcaccggagacttcaaaaacgtccccgtatttgactggctctcttggcctccttggttgctcttggctcatctttgttttgttacgttaatgttctgttacaaactacgataactcctacctgaattgagtgtctattatataaagagaggtgcatgagtatgggatcaacgttctgagattttgacacttactcgtagatgaggtgactaggacactcgtgtcagtttgcgagtttgtagctaaaaagataaagcttagattgagatagggattttacttttctttttgtaaatttgtcatttagttttaagagtgaatgaaaaaggacatgtttccaacgttaccacatatgagtcgtataacattggacacgtttgtttcaatatttgtttttgttcttgtagacacgtttcaattttaagacaaacataacagaaaagtcaaatgttggaaacaaaggtcaccaatatgtcggaagtcaaataacaaatctttgtcggtctaacaaaactcataaacttcccctaactcttcggatctctctagatccttgtttttcgttgccttaattatctttctcttctcttatttcatgttagaaaacagagtatacaacagaaaacacaatcgtttatttttgttctctgtgttcccatacacaaaatcttccagcttctgtttctccgttttgttcaacggagttacaaagcggaagaacctttgccttcggcctgaaagaccaaagatatgggaactggtggaataacgtccaacgctcacgtggtctctcccacgtggcatcacaagcacgtgcctcctatggatgacgactctgttcttcaaagagacatcggagagcttctttcacggtggggcgggcttcaaatggccgtaaagaaccagtggggaggccatgattctctcaagaaatctcaagagctagctcacaatctttttcatctcatctctcaatcaaatggttcgattttctttttacttctttagattttatgttatgatcatgaatatattgatagtttgattccaacattatgatatgagcagtgattacggtggaagaaatagagaatttgctacatgaaagcttgcttctttctttcaacacagagattgaagatggcagcattgaagaggtacgtactatttcttgaaaatgtagacgatcaatttacttgtgaattatgtcgactaatctttcatcgtgtgatttcgtcaggtagctgaacaattgatgatactccatgaagaacatttacgtgggactctttaagcagtagcttgaacgatttatatcatttttggtgtataattagatcaatgtaagatacaaagaattgaaaattgggtggacaacaaaatattattcatcagaaatcatagaatataggaatacgtatcaaaatctatgtttatttgatgtaatcattttgtagttgtgatgaacagtttttcctaatgtaatttcaaattaaccagtaagacactccatcatgattaatgtggggaatatggaccgagtgaccgataccacgtagaaaatatatatctaaattttccaatataatgcaacaaaattcatattgaagcaaaaactccatgtaatttggattcttgacaattttattatggtcaaatcatgtgtgtaatatgcaaataaaaactagagagatggcaataacatcattagtatgaaccactaggctataaattggtcaaagtagaaatggtgcaaatgaaagactaatttacgtgagtgcgattacggtaaaatcggtcattaaagacaaaaagacttaccgtacaacaagtcatttacatgaaaaccaaaaaaaaaaaaaaaaaaccctccaaaaagggattgtccaacataagggcacaatagtcaatttcaagcgattcctcgtttattcgtgtttcatcttgatctcagctagaggaggaactaaaccacatctacagagtcagaaaataaaaagtagaagaagcagaagcgagagtgcaaaaaggttagatctgctttcaaaattgttcgtactgcttctttaccacataaagttcatagctttttacgtttctaccgataattttgcattccgaattctccattttctcaattttgcttaaatgggtgtttctcttctgcaggaaattaggttttgagtggtcatg

SEQ ID NO: 21827 - DNA, 3003 bp, Unknown
  misc_feature (1)..( 3003): 2750-1469P.txt file - cDNA_ID_2033897; gDNA_ID_1974091; Annot_ID_180617
cagcttatcccaattactcttctttatcccaaattctctttgatttcttgctacttggtcttctccgattagatcttcgaatctgtttctctcctctccgggaaccggtggctacgtcatgtgtctttctcatattccggcaatcctcaagaggaaatctagaatcctccatacatttcttatttccttactagggttttgtgtgtgttggcaggtggaagctgacgaagaacaacatcatatatcattcaccaagtaagtaatgtaaagtaaagtagcagctctatttattttctttcctatgattgagatgaaaaattcgattgttgttgtgtgagacagtggtacgagaaaaagatatctgctgggaatacgcagagaaactagatggtaacaaggttaaatgcaagttttgctctagagttcttaatggcggcattagtagattgaagcatcatctctctcgccttcccagtaaaggggttaatccatgtgccaaggttagggacgatgttactgatagagttcgttccattttatctgccaaggatgatccccccattaccaacaagtacaagcctccaccacctttatctcctccgtttgatgctcctgcgtccaaactagtctttcctagttctcctcctaatgcgcaggacattgcagagaggagtatttctctcttcttctttgagaacaagattgacttcgctgttgcccgctcaccctcttatcaccatatgctcgacgccgttgccaagtgtggtcctggatttgttgctccttctcccaagactgaatggctggacagggttaagtcagatattagcttacaactgaaagacactgaaaaggagtgggtcaccaccggctgtactatcatcgctgaggcatggaccgacaacaaatcacgagcactgattaacttctccgtctcttcaccttccagaatcttttttcacaagtctgtcgacgcctcctcatatttcaagaactcaaaatgccttgctgatctctttgattctgtcatccaagatattggtcaggagcatattgtgcaaatcattatggacaacagcttctgctacactggtatctcaaaccatctcttgcaaaactatgcaaccattttcgtctccccctgtgcatctcagtgtttgaacatcatcttagaagaattctccaaggttgattgggtcaatcaatgtatatcgcaagcgcaggtcatatctaagtttgtctacaacaatagccccgtgctagatttattgagaaagttaacaggcgggcaagatattatccgaagcggtgtcacaaggtctgtctccaattttctatcattacagtcaatgatgaaacaaaaggcaaggctaaaacacatgttcaattgcccagagtataccacaaatactaacaaaccacagagcatttcatgcgtgaatatcctagaggataatgatttctggagagctgtggaagaaagtgtggctatttccgagcctatcctgaaagtgttgagggaagtttctactggaaagcccgctgtaggttctatatacgagttaatgtccaaggccaaggagtcaatacggacatactacatcatggatgagaataagcataaggtcttttctgacatagttgatactaactggtgtgagcatttgcattcacctcttcatgcagcagcagcattcttgaaccccagtattcagtataacccagagataaagttcctcacttccttgaaagaagattttttcaaagtgttggagaaacttcttcctactagcgatctacggcgtgatattacaaatcagatattcactttcactagggcaaagggaatgttcggctgtaacctggccatggaggcgagggattcagtttcaccaggtatggacaataaatacatttatattttctttaagtcatgactagtgaacagagatgtataggtagtctgagtcgggagaaaaataatccacttatctatgaccgcaattaaagctatggtcttattacacaactaaataagtccaggttgatatagcctggcacgtagtaaaccgaattgcaaaactagtagatatcttcccctcaccaggctattaggggtatggtctgggatctttagaattggtaacgaagcactagaagactagaagttgatgtctaataatggtttgcttagtaatgcaggtctctggtgggagcagtttggtgactcagcacctgttttgcagcgggtggccatcagaatactaagccaagtttgcagcggttacaacttggaacgccaatggagcacattccagcagatgcactgggaaaggcgaaacaagattgacagagaaatattgaacaagttggcgtacgtgaatcagaatctaaagttagggaggatgataaccttggagacagacccaattgccctggaggacattgacatgatgtcggagtgggtggaagaggcagagaatcccagtcctgcccagtggcttgaccgttttgggaccgcccttgatggaggcgacttgaacaccaggcagtttggcggtgctattttcagtgccaacgaccataacatcttcggcttgtgaagtcctggtaagaggttttcataagttggtccagcgtgttgagtgtttaaccacacacctcggttcgctatactgtacataatgtttgagtaattatcaatgtagaaaataaatattttgtgttcctcacacagtcacacgtcgatgagcttggtggtacaaagcatgtttcgttcatatttgggattcataaaacggtgagcttaagattgtttttgtttgtattgaagccgtaattatcagaacccatatgatagtagcggttattgggccgctagtgaggcccaaattaaagtaaaaaggaaaaatcagtctgaccggagctatataattaatatatatcaagaagactcgttttagttggtttaggtgattcagatcacaaagtacaccgagaatg

SEQ ID NO: 21828 - DNA, 3000 bp, Unknown
  misc_feature (1)..( 3000): 2750-1469P.txt file - cDNA_ID_2033909; gDNA_ID_1974091; Annot_ID_180615
gcatcacaaaaaaaaaaagtggaagtaaaaccatataacaatcctgcagattgtcccatccccatccaaggaatagataaacataatgacggaatgttcagtgaaatcccaacccttacctctccagccccgaggaagaggaatctgtggtctgacaaggatccccccacaaatctaagagcagcgataagtccagcaagcacaactgatgctgtgccctatatatgaaattacagtttcacaagttggtaaatatgtaatccaagccgaaatcacctcctgtctcacaacttaaacaggatatagttatacctgaatatcgtcattgaaaacaagatgtgttgtaccatacttagctaacagatcaaaagcattatggttggcaaagtcttcaaactgcaaatcatcaaaagaaacatatctggttacaagacagcagattcatgttggtggagtacacttatcccacttatccatgtctcaagctaacctgaataacgactttctccccatagttctgcttgactgctgtcatgaattcatgcataagttcggagtattcctgtagaaagaagaggattaagggttcagtttcaccataattttcacaggaccgtctaactgaaaggtgaaaggtgccaattacctctcctgtagctctcctttggcggagccctatgtagaactcatcgttcaatagcttttcgttgtttgtcccaacatcgattgttacgggcagacactggcaaccaatatacagagagaaaaagatgagtggatatggttgaatgcaataaagctgattagcataaaactatacttacggcagatggccggacacctccaagggctgtgtagagagaaagtttcccaacaggtattcccattccctgaagacattaatgatggcatgtaatgtgcaaattagtaagaggataaaccctgactcaccactctcatgaaagcagaaaagaatcaaacaacttgcctgacatccaagatctcctaaccctaaaatgcgctccccatcagtgacaacaatgacctggatgttcttctcaggccagttcctcagcacttcatgaatcttacctctattattgaaaattgtatcctcacttaaaagatgagaacaagaatagtgaaagtggtagttgatttccgtataaaaaggctcacttttctttcaagctgataaaaagcccctgtggacgcaggaaaatgctaccatacttctggcaggcttccccaaccgttggagtgtagataacgggtagcaactcctcgacgtgatcaatgagaagtttgtaaaacagcctctcgttggtctcctgaaatacaaaagcattgtgaaagaagttgggtaacaaaggaaggcacttggtgtagttgagatagcgagacttcctaatgagttagtttacctggagatccatcatagccatatacttctgcaagggaacttgatactgacgaagagtgtgcataatttttttaacctgtagacaaagcgtgcagtaaaaggatcaaaagtccaaatctccagttgcatatatatatatagaaagggtaagtgaaacctgacaagacgggaaacctgaagatcttgtgagataacagtgggggggaggaggccgcgtagatagtgagcgtcacgctctctgtggctaaaggcaaggcctttgttgtgatgtggatcacgcaacaacgtatacccactggcgacagagagagaccaaggagtgataggcatgtcctcggtggcggcatcctcgccgtagacatcctgaactccaccagatacggtggatttgggaacaatgtcggcggcggaggtctcgagagaggaggatgaagtggcagtggtctcaatcaaaacgctgccggtgggatcctggttagatccgagagaggaaaagactctcaaggaagcaggaggagtaattatagttctaggctggcgcagagagaggcgtgtggaacatccaggaacaaccgtcttgttctgagaaaccaaagcaatgagactttttcgtatataaaaaaagatgagacatggacgatggatggagaaggaatgatgtaaataataccagaaacaacgagggagtgagagagatcatggcgtctggggatgccttgtctcttagacggaggaggagaagggaggagacggagagagtcttcttcttcagagcggccgtggtcgtggatttcagcgcggccgtggtcgtggatttcagcgcggccgtgatcgtctctcgctcactttctctcttcctatctccctcacacgctctaaatctgctgggagagagtcttcttcttcagaacctccattgttgacgtgtcttcttccttttctatctcttcccaaattgcgtctccactccttggcttctccctttatttaccaatttgccattgctcaccggtccctgtattggtacgcttttgtcaattttagcccacaaaatctaaattataacttttcgttgactctgacctctctctcttatttcttttcaattgaaaattgtgactcaaactagcaaaaggacagacaatttcaagcgaaaatgcaactaccatcaatgtactggtactaagtagatttagttggtttggaattggtatgagagagattcaccacttgccctctctacttgacatttatttttttatttatgtgacagaaaaggactcttccaacttggacttgtgtcacactcgatgcccatcctgtgaggatccacgtcaattgggtaaacaaaaggccgcttaaggcccaacttgggtccatccataatatgatgaatagtgtcatcctctctggtttttggaaaaggaaaagttgcaatgaataaaagcaaacaagagaattgcatctcatcattatgctctcgctttatttaacaaaaactttttctttggccaatgatcgatccttgctctacatatatacaagtattatcacgagtaagaccccaaacaaaaatg

SEQ ID NO: 21829 - DNA, 3003 bp, Unknown
  misc_feature (1)..( 3003): 2750-1469P.txt file - cDNA_ID_2033909; gDNA_ID_2926306; Annot_ID_205873
cctgcatcacaaaaaaaaaaagtggaagtaaaaccatataacaatcctgcagattgtcccatccccatccaaggaatagataaacataatgacggaatgttcagtgaaatcccaacccttacctctccagccccgaggaagaggaatctgtggtctgacaaggatccccccacaaatctaagagcagcgataagtccagcaagcacaactgatgctgtgccctatatatgaaattacagtttcacaagttggtaaatatgtaatccaagccgaaatcacctcctgtctcacaacttaaacaggatatagttatacctgaatatcgtcattgaaaacaagatgtgttgtaccatacttagctaacagatcaaaagcattatggttggcaaagtcttcaaactgcaaatcatcaaaagaaacatatctggttacaagacagcagattcatgttggtggagtacacttatcccacttatccatgtctcaagctaacctgaataacgactttctccccatagttctgcttgactgctgtcatgaattcatgcataagttcggagtattcctgtagaaagaagaggattaagggttcagtttcaccataattttcacaggaccgtctaactgaaaggtgaaaggtgccaattacctctcctgtagctctcctttggcggagccctatgtagaactcatcgttcaatagcttttcgttgtttgtcccaacatcgattgttacgggcagacactggcaaccaatatacagagagaaaaagatgagtggatatggttgaatgcaataaagctgattagcataaaactatacttacggcagatggccggacacctccaagggctgtgtagagagaaagtttcccaacaggtattcccattccctgaagacattaatgatggcatgtaatgtgcaaattagtaagaggataaaccctgactcaccactctcatgaaagcagaaaagaatcaaacaacttgcctgacatccaagatctcctaaccctaaaatgcgctccccatcagtgacaacaatgacctggatgttcttctcaggccagttcctcagcacttcatgaatcttacctctattattgaaaattgtatcctcacttaaaagatgagaacaagaatagtgaaagtggtagttgatttccgtataaaaaggctcacttttctttcaagctgataaaaagcccctgtggacgcaggaaaatgctaccatacttctggcaggcttccccaaccgttggagtgtagataacgggtagcaactcctcgacgtgatcaatgagaagtttgtaaaacagcctctcgttggtctcctgaaatacaaaagcattgtgaaagaagttgggtaacaaaggaaggcacttggtgtagttgagatagcgagacttcctaatgagttagtttacctggagatccatcatagccatatacttctgcaagggaacttgatactgacgaagagtgtgcataatttttttaacctgtagacaaagcgtgcagtaaaaggatcaaaagtccaaatctccagttgcatatatatatatagaaagggtaagtgaaacctgacaagacgggaaacctgaagatcttgtgagataacagtgggggggaggaggccgcgtagatagtgagcgtcacgctctctgtggctaaaggcaaggcctttgttgtgatgtggatcacgcaacaacgtatacccactggcgacagagagagaccaaggagtgataggcatgtcctcggtggcggcatcctcgccgtagacatcctgaactccaccagatacggtggatttgggaacaatgtcggcggcggaggtctcgagagaggaggatgaagtggcagtggtctcaatcaaaacgctgccggtgggatcctggttagatccgagagaggaaaagactctcaaggaagcaggaggagtaattatagttctaggctggcgcagagagaggcgtgtggaacatccaggaacaaccgtcttgttctgagaaaccaaagcaatgagactttttcgtatataaaaaaagatgagacatggacgatggatggagaaggaatgatgtaaataataccagaaacaacgagggagtgagagagatcatggcgtctggggatgccttgtctcttagacggaggaggagaagggaggagacggagagagtcttcttcttcagagcggccgtggtcgtggatttcagcgcggccgtggtcgtggatttcagcgcggccgtgatcgtctctcgctcactttctctcttcctatctccctcacacgctctaaatctgctgggagagagtcttcttcttcagaacctccattgttgacgtgtcttcttccttttctatctcttcccaaattgcgtctccactccttggcttctccctttatttaccaatttgccattgctcaccggtccctgtattggtacgcttttgtcaattttagcccacaaaatctaaattataacttttcgttgactctgacctctctctcttatttcttttcaattgaaaattgtgactcaaactagcaaaaggacagacaatttcaagcgaaaatgcaactaccatcaatgtactggtactaagtagatttagttggtttggaattggtatgagagagattcaccacttgccctctctacttgacatttatttttttatttatgtgacagaaaaggactcttccaacttggacttgtgtcacactcgatgcccatcctgtgaggatccacgtcaattgggtaaacaaaaggccgcttaaggcccaacttgggtccatccataatatgatgaatagtgtcatcctctctggtttttggaaaaggaaaagttgcaatgaataaaagcaaacaagagaattgcatctcatcattatgctctcgctttatttaacaaaaactttttctttggccaatgatcgatccttgctctacatatatacaagtattatcacgagtaagaccccaaacaaaaatg

SEQ ID NO: 21830 - DNA, 3000 bp, Unknown; identical to SEQ ID NO: 9846
  misc_feature (1)..( 3000): 2750-1469P.txt file - cDNA_ID_2033914; gDNA_ID_1974091; Annot_ID_180587

SEQ ID NO: 21831 - DNA, 3003 bp, Unknown
  misc_feature (1)..( 3003): 2750-1469P.txt file - cDNA_ID_2034117; gDNA_ID_1972137; Annot_ID_179144
ttggttctggtggtataatcatttaattaagttagttctggtggtccaaaactaggccacgagtttcattattccaccagaattatataatttagttagtcaagtctgattagccgaagatggaaatacgaaaaaatgtcaataatacatgaagtctttgtcttcttaccaaaactgtacgatctcaacgatggaagataagaatctaaaaccaacgagtgagatggaatcggaatattactaaaattaggatgagatgaggtttgggtccatacttaacagtgacaaatgacaatgatggagctgactttttcgttcttaaaacgtatcacaagttttctcctactttaaatttcatctccaaattgttgaccaaacgacatcgtctgttgcgacaccttaccccgatgttttttcctacgttgcatggaccttttcttatactttcaaataattatttgtctttttttctcaacatttatatccacattttaacgattttctcaggatattttctatcaatatgcttaattttctttctttttttgttaaagaaattaattcccatagttaacatgagagggtttagcaaaatatgcttaattttcttgttcgctgatgtttttatttttatttattattactgattcagcattcaaacttatcatgtgatttggatggttattgaagtttcatattaattgataaattaaatgtgttgggatgatgagaggtgatatagaaatacatattgtagtgtttaaatagatatggattcaagtatataattaattcttcttaatcaaattaatttgagttggactagtagtctagtaagtagtaagagaacatattcggatggtatcttaaatttatgaaatacagtgtgttttcagtttttattggtagcaacaaatttatcggttcatacctcaaagatagtattatacgtgtctacgattatataaaaaaatcaatacaaaataattgttcattcaagaaacaatcggacgatatgaacattatagttacaaactagtaaaaagctataaatatgtaaagtgaaaactatttaaaagggtgaaaattaaaacgtatcaacgttggagtgtttcaaaaatatttggttggataagctcaaactagtcaaattgtctcccctcccaagcgggaacatcacgccatgtccacaataaatccatttttctttctctcaaatatatatagagatacatacatcgatactattctatatattatgtaacaaattagaaatatcatataccacatggtaagttgtataaagagaattattagtgtttgcttattgcaaaattaatacaaaacattttctattgaagagctacaaattaagaaggaaactgaaaaatataataaaaagcagaatatgttacgatatttgtatgagtgtatgagacaacagtatcagataagatcataatccttgcgaccaacctatccaaaagtctcttttttgttttctaatcaatttacaaaacatttaaccaataaaaatataaagatggtgaaaaaaatatggtcatacaacaattgcttcaaagggggatgaactaaaatataccaaaaaaagaagtgaggataggttcatgtgagcccccatcccacttgaccctcttggtaggtccacatttaccatgaacatgtaacccattggttattcatttgtatgtattgttttttgtcaatgacttaattttattttattttcttcttctctgacttttttttgtttatctgactcttctatgtatgtcaaaatgtagcaagataattgaacatatttggattgttgaaaaacatatcgatatttagtgaattagtttctcctccaagcatctagaatgtcataactgtgttgaattgtacataaaatttgatatggattgatcattgataataaatcaatgaattaatgatctattagaatatgaacttttcattcaaatttaattgataataagtggatttgtctatatgtaatattttagtcaaaaaaattgtttcttttcaatgcgatattattatccttaaaacgttttctcgagataatttttttccgagccattaattttagtatgttcagatatagatcgacagaaaaactataattacgtcggaccaattgtagattggattgaatacatatggatcagattctaataccatattagaatatgaggtatctaattcaaaaccaactattaataaatagattgactcatatatgtcttatatactagtcaagatttctttgtcttttctaatgtgggatattattatccctaatatcatgaataaaatcaagagttaatgtttaactatatctaatctatactacccatcttttttcggaaactatatataagttataaaaccaagaaattctcgttatccaataaaaataataattttgactatggttatatatcagtttcaacaacttatatgatgattgatgagaaccttattttatgaaagtacgtggtaatgtgttgtaagaaaatgttcttacgccgttgaaatatttttccaaaaaatgtacataacaaacgtacgatatgtatgtaaaagccgtggtactacatttatttttgtctgcccttctcggaaacttccttcaaagttatttttgccgttcttgaaagcgttgaccctacctttccatttttaaaatgttctctcattttgacccatttttttccataaaccaatcaaattttaactttcaaaaacataaaactaattagatataaaataataacatgtacatgcacttgcctcgtccattcctcacatcatcatatgtctttgtatatatatagatgaaccaaagaaatgaaaaagtaacaacgtcacctaaatctctctcacccaatttgtgtttcttctttctgctaaaaggttataatttttgtttcttggtttggtgagaatcttcaagaaactgaaacaaagaaaatg

SEQ ID NO: 21832 - DNA, 3003 bp, Unknown
  misc_feature (1)..( 3003): 2750-1469P.txt file - cDNA_ID_2034153; gDNA_ID_2684254; Annot_ID_193064
cttctattcttgaggaatatgacaaaacagagattagtatcaactgtggtgaaaaaagtaaagaactaaattgtttctatgaatggcttcacctttttttttacagtgattgtggagtccatcttggtaagtaacagctaagcaaagcaagtgtgggagaaatgaaaccatataacattaaaaacggtgaaggtgtaagaagagtttgacccctcttttgagcatttaagttaaatcagtttttggcctttatgaaatttgatcctcatagtacaaataataatactcattgtgggtctcatgaatggagatatattaggatttattagaattgtacacatcgttaatgcctccaagctttgttttcttttagggactctctttggattttctcatgtgggtctttgtactaccattcatcctacacgtgtgagtactgtttctctataataatatcttttgttttgattagtaattggattagcttacacttaggtgggtgagaatagttgagaagaaagagaacatggattcacttctctttcactcgaatattacttatgttgttagaaaatggggtcaaagaacttattagagcttaataagaagtgcttaggtggttttgttgaaaggttaaaaaaggtggggatgtttcttatagcaccaaacttttagctttactttgaatgagcctgattttgtcaggtatacttccccatgtattcatttgtctcttacttcataagtcacccatgtgatgtgaaattattatatagaatgtatctatatgtgtatattagtttggaaacttctctcatttaaattagacacaccactatacttgttaaagccttttttcatgatttggtttccatcttagataagatgacaaaaaatctctgctgtaacatcatacctttcgattagatttctcgtcccactttttttttggtttccaaaaagtttcaataattgaatacattttattggttgcagaattctctgctgttactgttttgtattttctagcatttattttacaattttgttcctaaccttctaacatagcaaattagcaatcataaacttttatgcatatatataagtgtaagacagtaaatcttgtatgtggaaagacattttccttcaaaatataagttcataaacgtcaagtcaattatggtcgactctctttagagtacatactacatagattagattcagtcggatttaatgtgtacttaactttttaacttgcaggtcttgcatgacaagagtcgtgtcacaagaccattaaagtcactgaagtttgtgtttatggtgcacattgacatcatgtagatggtattttgatgtaaacgaatgatatatttgtaatattacaacttcaaaggttacatctaaattttgagacttcgatgatttgttttttcttcgaatcactcctgcgactatgcatcagccaaatcccaaatgtgtgtcaacatctcgaaagcacaatcctcattcgttttttactgagtgtgtgtctttcccaagcaatatattcaaaaaaagtagaaagtaaatggcccatgcaggtttcgaacctgcgaccttcgcgttattagcacgacgctctaaccaactgagctaatgggccattttgcaatgacttgttttcttctaataatactattttcaaacttgtgattgcacagttgcacattctcgaggcttggagatgttattagtttaaaaaactctattaaggtgcataagtcaggttcaaatctaagaggtcaacacaatcctctaccattataccaaaaccacctaacactagtttttttcaactaatgcatgtagccctgccaatatataaccttgtttttaaccgtttttaagactgaaaatattcttaaaataataacaagttgacgacaaataaataattcaaattttagcgaagatcgcgttgttactattttaataaatattggactttcatttttttatgtaatcgtataattcaagatgccgccaaagagtggatcttattttccctcctactttttcatctagatttttcgtcataggaagaaagaacagagaaagagaagaacacttagcaaaattatttccaaggaaatgatataattaagctcccgctacacctacacaaagtttacgaggttgagagtatttaataaaatttataaagctcgacttaaataactcaaaaagagttgggaacctatttgcgacctatatatctcactaattactcatgatattattcttaacaatagacagatttagttccaaactaactacggaaacattgaaaaagaagtttagttgatttatctaacatgcatgaaataatatggacaaggatttgtactttgtagttgccatggtcgtgtcaacaacatagttcaaatcctattgagactatgcaaattcatttctggaactacattatatgtattcttttttatccgaaaaaaacactaaatatttcttaggtgaacaaaaaaaagagaagtagatagttccggagcagaacaaaacagttgaacgaattacaaaagaacgagaattctagatttgtttcaagaatcagttttgatgtgcttgcaacttttgcaaacatacaaacaaatatatctgccttaataacaaaagtggaatatgaatcggaaaaaatagtacacttttatggtaatataataatttgggttggtaataatctgcactagaattcaaataaattttcatctagttacctttgggtcataggagaacccaacaaccatctcacaaaattagttgcatctcacttgacctacttctcaagacccttgtaacacaagaaaactaaaaactctacaatgccctcttctcaaaaaattatatatctctgggaagtctcaaccatcttctctaactcctatctcaacacacatattttcccaaaatttggatcaaaaagttttccgatagaagaaattaaatatg

SEQ ID NO: 21833 - DNA, 3003 bp, Unknown; identical to SEQ ID NO: 21832
  misc_feature (1)..( 3003): 2750-1469P.txt file - cDNA_ID_2034153; gDNA_ID_2684254; Annot_ID_138071

SEQ ID NO: 21834 - DNA, 3000 bp, Unknown
  misc_feature (1)..( 3000): 2750-1469P.txt file - cDNA_ID_2034153; gDNA_ID_1972137; Annot_ID_179145
ctattcttgaggaatatgacaaaacagagattagtatcaactgtggtgaaaaaagtaaagaactaaattgtttctatgaatggcttcacctttttttttacagtgattgtggagtccatcttggtaagtaacagctaagcaaagcaagtgtgggagaaatgaaaccatataacattaaaaacggtgaaggtgtaagaagagtttgacccctcttttgagcatttaagttaaatcagtttttggcctttatgaaatttgatcctcatagtacaaataataatactcattgtgggtctcatgaatggagatatattaggatttattagaattgtacacatcgttaatgcctccaagctttgttttcttttagggactctctttggattttctcatgtgggtctttgtactaccattcatcctacacgtgtgagtactgtttctctataataatatcttttgttttgattagtaattggattagcttacacttaggtgggtgagaatagttgagaagaaagagaacatggattcacttctctttcactcgaatattacttatgttgttagaaaatggggtcaaagaacttattagagcttaataagaagtgcttaggtggttttgttgaaaggttaaaaaaggtggggatgtttcttatagcaccaaacttttagctttactttgaatgagcctgattttgtcaggtatacttccccatgtattcatttgtctcttacttcataagtcacccatgtgatgtgaaattattatatagaatgtatctatatgtgtatattagtttggaaacttctctcatttaaattagacacaccactatacttgttaaagccttttttcatgatttggtttccatcttagataagatgacaaaaaatctctgctgtaacatcatacctttcgattagatttctcgtcccactttttttttggtttccaaaaagtttcaataattgaatacattttattggttgcagaattctctgctgttactgttttgtattttctagcatttattttacaattttgttcctaaccttctaacatagcaaattagcaatcataaacttttatgcatatatataagtgtaagacagtaaatcttgtatgtggaaagacattttccttcaaaatataagttcataaacgtcaagtcaattatggtcgactctctttagagtacatactacatagattagattcagtcggatttaatgtgtacttaactttttaacttgcaggtcttgcatgacaagagtcgtgtcacaagaccattaaagtcactgaagtttgtgtttatggtgcacattgacatcatgtagatggtattttgatgtaaacgaatgatatatttgtaatattacaacttcaaaggttacatctaaattttgagacttcgatgatttgttttttcttcgaatcactcctgcgactatgcatcagccaaatcccaaatgtgtgtcaacatctcgaaagcacaatcctcattcgttttttactgagtgtgtgtctttcccaagcaatatattcaaaaaaagtagaaagtaaatggcccatgcaggtttcgaacctgcgaccttcgcgttattagcacgacgctctaaccaactgagctaatgggccattttgcaatgacttgttttcttctaataatactattttcaaacttgtgattgcacagttgcacattctcgaggcttggagatgttattagtttaaaaaactctattaaggtgcataagtcaggttcaaatctaagaggtcaacacaatcctctaccattataccaaaaccacctaacactagtttttttcaactaatgcatgtagccctgccaatatataaccttgtttttaaccgtttttaagactgaaaatattcttaaaataataacaagttgacgacaaataaataattcaaattttagcgaagatcgcgttgttactattttaataaatattggactttcatttttttatgtaatcgtataattcaagatgccgccaaagagtggatcttattttccctcctactttttcatctagatttttcgtcataggaagaaagaacagagaaagagaagaacacttagcaaaattatttccaaggaaatgatataattaagctcccgctacacctacacaaagtttacgaggttgagagtatttaataaaatttataaagctcgacttaaataactcaaaaagagttgggaacctatttgcgacctatatatctcactaattactcatgatattattcttaacaatagacagatttagttccaaactaactacggaaacattgaaaaagaagtttagttgatttatctaacatgcatgaaataatatggacaaggatttgtactttgtagttgccatggtcgtgtcaacaacatagttcaaatcctattgagactatgcaaattcatttctggaactacattatatgtattcttttttatccgaaaaaaacactaaatatttcttaggtgaacaaaaaaaagagaagtagatagttccggagcagaacaaaacagttgaacgaattacaaaagaacgagaattctagatttgtttcaagaatcagttttgatgtgcttgcaacttttgcaaacatacaaacaaatatatctgccttaataacaaaagtggaatatgaatcggaaaaaatagtacacttttatggtaatataataatttgggttggtaataatctgcactagaattcaaataaattttcatctagttacctttgggtcataggagaacccaacaaccatctcacaaaattagttgcatctcacttgacctacttctcaagacccttgtaacacaagaaaactaaaaactctacaatgccctcttctcaaaaaattatatatctctgggaagtctcaaccatcttctctaactcctatctcaacacacatattttcccaaaatttggatcaaaaagttttccgatagaagaaattaaatatg

SEQ ID NO: 21835 - DNA, 3000 bp, Unknown; identical to SEQ ID NO: 9499
  misc_feature (1)..( 3000): 2750-1469P.txt file - cDNA_ID_2034266; gDNA_ID_1972133; Annot_ID_179124

SEQ ID NO: 21836 - DNA, 3003 bp, Unknown
  misc_feature (1)..( 3003): 2750-1469P.txt file - cDNA_ID_2034426; gDNA_ID_1972192; Annot_ID_180218
ggaataacaaaatctccaaaagctggtcacatgtggctcattcttgtccaagtcaaaccttcttcacatcttttgtattttattttattagtacaataacttattaatattactcttaatttccgttgcaatatgcttttaatgctctcattcggctgactaattttcacttttcgactttacagaccaaaaaaactttttatttcttgccatgaagtgacatggaattgatactcatggtttggtttactaataagtttctcaaataaggtcttaaccaagaagacttttttttttgtcctcaatttaactcttgtattattcgcattggatatgaaatttcttttgtatgtgcaagatcttggattcttttaatattcttaattatgcaacgtatccaaaattccaaattgattccttcaatggcatcaatgcctatactaagaacctcggaaagcttatttgaaatcataaaacgcttgagttgtcaaaaacactcacataaaactctatatatatgtatgtaatatagttatatagggatcccataaatacataagaaattattatttttgttcaaattatgaaaatagtttttgcatagtaatataaaagatgtgcaaaactagtttatctagaaatatagttgttataccacaacaaaaattgtgatggatactatttgaaaccactgtataatttttttttgacctctattagggttgtattaaaagactacaacaaataacaaactaaattgtctctcttttgtttaacaatgttcacacatatatattatcggatgtaaacatgggtttattattagatgcaaggccggcccaataaattattggatcttgtgctatgctccaaatttttttacctaaaactctaaatatttaaaaaactagaccctgttttgcaattatttgaaaatttggaccctaaaatataaagaaaaaactgaataaagaattgggacccggtgcactagcacactcagcacctcccaagagtcgggcctgattagatggtgaccatactgaaacaaactaatatgatatgtcaatgttttgagtttaattctatttggtttctcattattcaaaataactctcattaaatggaacaaaaactcttattagtttaaatcttaactttttttatgaagagaatgggcttctttacctactacactcaatgagccctctggttcgtttggtcatcagttcaaatggacagtgactttggaatagatctcgaccgttggtcatcatcaccctaatgctttgtgttgccgttggattggtcatgtcatgaccaaaccaatttgacttctttatgtgatgtaaaagtcttattgctctcaaataatcttctaaaccatccacgcgcctgactaaagcaactgaacgtcagacgctacaatagatccaaattaagaaaatgggaatacaattttttttttttttggttgggaaaataatatctctcacttcagagttcagatatgaaaataaatatttatatcttcttgttaattcgacataaattttaccaaaaaaagagaaaaaaaaactatcgtactctttgttttaaaataatttaatcgcataaaatacaattaatttatagcattggtttgtaaataccatggaaaactcataaccaagaaggaaaaaattgtattactaattgattggtgagtgggtgaccaaaatcatttgtaagaaaggctttcgattggcatgttgttcattgttcttgtaacagttgcatcttaagtaattagtatatacgtgtaagatttatggaaaatggagtttaatggatggaaacaaacaatatcagtgacacaatactattttgcccatgctcaaatggacatcatgttctattttttcttgacaagtagagagattcatcgctttttaaaatcaaactttcattttgtagtgggagccttaattgtatttgacccataaatccaatttcttcatggacgtgtcgtggtccattgattaaaataaaaaaagtagaataaacaatcgcttttaattctttttaaaaacaaagaaacaatccaatgtaattttcgattaaaatcattttgattcgatgtgatattgtgtagagaaaacttcattagcaattaatttactaaaatatagtaattgtagtacaaaatatatttcctataatctaagtacagtattttatcgatactaaatctaacagtctaataatcaacgtccctttcctatacatgaatgtacaattaaacaaaaaatagaaatttatagactcaatgatttaaagtacataccaccaaatatggcagcctagtgattgttgtaataagcttttctaaaatatttctacctgattttcaagctttataatttgtatttcagattcttatttatataccaacaaaaatatctacgtaaaatttatcattttcttaaaatatattttggtatttaaaaggaaaagaaatagagaagaaaaaacaagaaataaaataaaaaaagagaagagagagaggagaggagaggtcactaattgtctatgtttggcgcgtatattaaccaccaccggcaaaacacccacgaaaaaggcgaccacgcataaagaaagatcaaaacttccccatcacttccaaaaagcaataacacacacacaaacttgttaccagggaaattataaataaaaatcgtagccgaaaattataaaaatattttatttttattttagttcaaaaaagttttcagctttgaaggcagagagagagagagagagatcaagcgactagtgagagtggtgttgaagcgaaactacgatcttcttttttccttttcagattttcacaatcacaacactcttctttgatcggagctctaacattccgacaaaagctcaaaaaaaaaaaaaaaaaagacttctttcttttgctcttttgagggatttgtctccctctgtagagattagggtctatcaatg

SEQ ID NO: 21837 - DNA, 3003 bp, Unknown
  misc_feature (1)..( 3003): 2750-1469P.txt file - cDNA_ID_2034525; gDNA_ID_1972047; Annot_ID_178248
ggcaaaaaatcaagtatgttgtttattcctcatttccatttatcaatcactcgctcgtgaatcttattaacatgatttgtagacttttcaagtagagggattgatagattcttcttgtactagttgtagttggtatcaaaagagtttcttttttcttttgttttttgttgtatgaacaacggcatttctgccttcttcttcagaggacgattcaggaacagggatggtcgacgcagctccagatatcggacctaccgtgaaagcagcagcctcttctcaaatggaggcagccattgatgcattgtcccgggatttaactaaattaagaaccggaagagccgctccaggtacttctcacctctttctttcgggtttaggttaagcctctctgtgtctgtgcttattgtgtgcatttgcaggaatgcttgatcatattgttgttgaaacgggaggagtaaagatgccactcaatcacttagctttggtctctgtcttggatcctaagactctctctgtcaatccttatgatcccgatgtatactgattctttctttctcttttactaagaaaaacttcgactacattagagtgtcatttttctccaacaagccgccattgacgctttgtttgtctctgcagacggtcaaagaacttgagaaagcaatagtcgcgtcgccattaggattaaacccgaaactggatgggcaacgactggtcgcatctatcccagcgtatgaaagttcttctctgtcaaatttcattgtttatcacagccgtaattgactgactttgtctgatttccgctctatgtttttatttcgtgagcagattgaccaaggagcatatacaggtaaagcatccaagtcatgtgttattgtttagtcactgaggttgagccttgaccctatctatctatatgaactccaggcaatgtgcaagattgttacaaagtccagtgaagttgtcaaacaaagcataagaagagcgaggcaaaaggtagtatgaatggtgtagagcacaaccatagaagctgtttgttgtaaactctctcctacacgtcagaacatctaatgatcagagacttttttttttggtcaggcactggacacgataaagaaagcaggctcgagtctaccaaaggatgaagtaaaaagactggagaaggaagtgagtgtcattgtatgatctttctgcaaatatgcatcctacttcagttactgaaaataatggcctttgtgtgaacaggtagatgagttgacgaagaaatttgtgaagtcagcagaggacatgtgcaagtccaaagagaaagagatcaccgaagcctgattcatcattcctatacatcactagtcttttcacgctaccttgaaagaatcttttattcattaccaagatttgttttcaacttttgaatgtttgatttggggatcttggaactgcaagaaaattgatgatgaatagcgatggaaggcccttcaaagggcccaagaaaggccttgaaagaattccaataattatgatgttatttttcgagtttcatatatagtagtactaattggcttttgtagttgaagagaagtttccaaacttgaaaaccaaggcaaggggggaagaggtaggagatgagtcaattagtttaccaataatttgacatgatagtgaaattgatgtgtttggtaaatttgttacaaccccattaatctaatctttttttttgtacttgttgcaaagaataattcaatgatatttcttaaagaggaaatttctatatacatataaacgataagcttatctcagcattccaaattgatagtgcgctttcaaacatattataaaatttcagacatagtttactctaaactcggtccatctctgcaacaaaattaaaaataaaaccgtcctcaccaaccacaaatcttatatttaaaattgaatgcatttaatttttaaaattgatcactaacaaagaaatgtaggtaatataacaagctgtataatttgtcggcaaaaagatataacaaagaaaaacatgtacatatacatttatctaaaatgttgagcaataacaatattgaagacgcaataacgataccatttaatctttgcccactcgcattggtgacggagactaaggcaaaatctatcgaaagtggtgaccattaaaaagcgcgtcggtgttcactttttttagtcagggaccaggagatcaccgtaacgtcgccgtttcgatatttgcacgatcaaactcctttttttattcttttttggtcatcttttttttctttcttttctttatggcatcataattttttttagtcgtaatctatagaggagactaaagattcttcattctgtgtcagtggctcacatcctctgattaactaaaacgcacacaaacaagaaaaaaagctatgaaaacaggaaaaaaaataggaaatatcagtcttgtctaaaacgacgaagaagaagaggaagaatcgagacaaacatttcacattcccagagattgtggtgtcgttgggtattcattctctctctctctcacattactttgacgagttcttagtgtgttggttctccaaatgctctgcatattacattaaatctctctctgcttttttttgggctataatatatgttgggttttcttcaacttgcttggatctgttgtaataagcgagttagctcaaaatctctttcttaatgaatgagctttcaaagttagctgttttttcctcttcttcttctttatcttggatcttgatcaatcgaatcagtaatgtgtttggaatagaattagttacatacatttacctttctggttcatgcattgtcttagcatttgacggtttcgctgtttcagattaaaagttgaattcttagggtttagacaaagctttccctgttttgttacttaaatgtttgctttgcattcggatgatgcttgtgcaggtacttacttcttagggtgattcaggacttgctaattataggcaaaaaatg

SEQ ID NO: 21838 - DNA, 3000 bp, Unknown; identical to SEQ ID NO: 9269
  misc_feature (1)..( 3000): 2750-1469P.txt file - cDNA_ID_2034533; gDNA_ID_1972047; Annot_ID_178246

SEQ ID NO: 21839 - DNA, 3003 bp, Unknown; identical to SEQ ID NO: 21495
  misc_feature (1)..( 3003): 2750-1469P.txt file - cDNA_ID_2034537; gDNA_ID_1972047; Annot_ID_178245

SEQ ID NO: 21840 - DNA, 3000 bp, Unknown; identical to SEQ ID NO: 9786
  misc_feature (1)..( 3000): 2750-1469P.txt file - cDNA_ID_2034597; gDNA_ID_1972187; Annot_ID_180186

SEQ ID NO: 21841 - DNA, 3003 bp, Unknown
  misc_feature (1)..( 3003): 2750-1469P.txt file - cDNA_ID_2034611; gDNA_ID_1972187; Annot_ID_180178
acataacaatataacatatcattctagaatgtcttatgattcatatttttacttgtaaatcaggatatttgtaagttgtcttaaaacccatgtttttctgtcggagaaatataaacagtcagtaaatttcagcaaaatttaacaagttcaaattatgtttttgaccgtcgcacgtgtgcaacaaggccattgcacgtgactagtcagagaaaacataatcttcgttaggatcttgacgccaggccgccccgaaacaggtggttcgctttagattttgatgacgtggtttcaatcttgaccgctcaagttttcaccacgtggcaccgtctatgtcgttggattcttcgtagacgacggtattaggtgggccgtgacagcccaatgttcaaaagtgggtccacatatgtgccagatcagcttgatcattccaactgtagaaagatgtttataaaaatataatgacgcgtaattagatttaattatccgtaattaaagagtcatttgcctctcttgtcatatatgtctttaatttcttgttcccaaatcatggcgaatcaaaatctacgcgataaattatttttaaatgacaacgtcgcttggtcatgcgatgatattgatataatataagtatatagtttcctgaattattaagatgtgtattattatttactcgaattaaaaaacacaatcatttgaatctaataaccaataacaggctattgatatattaaattaaatagatctatctgacaaagtgatatcccaatcttatttgattatttggtgagagagaccaatgcattgtatatagtataaggattaggctctaataaggatcttcaacgatctctttgttatgcttttttacgttgaataaccttcgtactttataaaacatgaattcaatagtaaaaaatttgaccacagtaagcaaaaaaagataaaacggatacaagactacagtaatcctagaagaagcctcattttcaaaacactgttttttttgtataatcattacctcgtgctcttcaatttaatgacagcttcttatatgattagatcgaggcaaaataatgtatactctacaaaagaagtcaataactttccattagattaattgggattcaaccatacgactgtacgtgttatgtatgttacacttctatattcgtatagtatattaatcacatattcacacgatatcaaaatgaataactagcgagttaatctaagatagattcaacgaattaaattgaatatcaactgtagaagaactgaaactttgaataccgaccgacgaacgtgacataataaaagccacacagtagaacaatttcttaaaaaaatatcatcatgtggttacaaaacattatcacctggttcattacttaatttcattcgcgatgacgattatagttgatggtcgatcacagttaatatacagatacaattaatttggattagtactagtatagtttttttttaaagaaggagataaacataactaatcatttggtcttttacgtgggtatcacattaaatccatacaacgtagtgcacgccggtacaccttttctaaaatattataaatatatttaagaattactatagtctatataggctcaatcaaatgtgtcgatcgcttgagtccttttgttttttaacgttactaaatagtactagtagtaaattcactcttacaaaaccgttaggtgaatttacctttattctaacaataactatagtttaaacaaatttcaatgatgaaaagcggtcgacgaagtttctaactgcaatttgcttctgaaaaaatcagagtaaccaaaacagaattcgttaatttttacacgcacgcttaaatgcgtgtcgacgagtaaacgagcacgtatacatcaaacttgccggattttttttgttttgtgatgagttcacatgtaaacgatagtgacctttttgttataccgaaatagatcatagaccaattctcaaaccaatctctaaaatggttaatggtagccaatatgtcacattcctagatttcatatgttcaacttttaaacgctgttaacatataacgtattcatattttcaagttatcaacaacgcaatatacatgtttgattatttatatgtggctaatcgtgttacttctttttttttgttctaaattcaaatatgaagatttttagtggaaagaagatattggcccttgacaagttgtttatgatctattaaagttttgtttttccttttaattgaatttcctctatgtttatcacaaaataaagaaaatgaggagtaaaaacaaattcagcagaaaatagtgaaacaaatgattcatttccatatataaccacaaggaaaaagaaaatttccctattctaatagttttgttcctcctaattactctgattacatatatttaaactaaaactgaaaagtacacatatagtaatccggtcaggtgattactgtctttttttcaagattttggaagttttacccattttaaagaaaattttgaatgctgttctattatagtattaacatctgtttagtgaagtcaaaacattggtcataacaatgtgattaaagttaacatctgtttagtattaacatttttagggctggtgggctttttgtgtccacttcccgatggttactgcaactttaattgaattttactattttaccctacccaatattaaagctttttatttatttctctgcttctctcttttgctctgtctctttatcctttttcttttgatgcttcattctctcttttcttttttttcctctgtagcgtttctaggaatctctctccaacgtttaggtttcttctcagatttagaaagtttcttctctatctgaagaattttcatttcgatttcgcttcttccttcaccctaatccgtaatcgaatgccatttcgaagattgtgttgaagagtagagaggaagaagaagactaagaagctagggtttctctgatgagtagatg

SEQ ID NO: 21842 - DNA, 3000 bp, Unknown; identical to SEQ ID NO: 9788
  misc_feature (1)..( 3000): 2750-1469P.txt file - cDNA_ID_2034624; gDNA_ID_1972187; Annot_ID_180170

SEQ ID NO: 21843 - DNA, 3003 bp, Unknown
  misc_feature (1)..( 3003): 2750-1469P.txt file - cDNA_ID_2034662; gDNA_ID_1974091; Annot_ID_180594
gataaaaatgggaaacaatgcgctattctcttctgacgccgccatctttggagcctttaaactgagagattctattctgctgaaaggaaaagctctgttataatctcacaacatccaaaaagcttcaaggatacaaaattatcaataacatgaaaagctggatctgaggccactgaaattaattagggattctacatgacggagatcaacactaatagatctcggctaatctagtctaaaggtatatgaatccctggactcactttgagatcgacacaaaaccttagaaaacaaacaaacgaaactacgggaaggaagcaaaaccaataattggtgaaagaagatgaaatcgaacttgaaaggatattgtagaagaggaaatcgaagaagaagctcacctaggatgatagctctctataatcagagagatcgcgctgctgcagatcggcaacaaacggcgttgcagtttttttttctttatgcttctcttctcttctaatttctgatttctgattggtgagttctttcttctttacttgcttattcacttttctttaccttctcaattaaaatatttcgcaattcatttctctctttacatttttacgagttatttattttccattaaattagagtaattattaatagcaaagtttttatggtgaacgaaaacgaatttcccaaaaaaaatcacattttttataaattagaaaggaaaaagagaaaaggatatggatcaaagagggattatatgctctagagatttaatgtgatccagatattgtaatagggattgcaacaaatctcttatatgttctagagatttaatgtgatctagagattgtaaatagttacaacaaaatagagatttaaacaaaacaaatatttaatgattttaagaaaactgttttgttgtaactatttatatttcgaccagaaataaattgttctacttgcaaaatacatcaatcttcgttattattatcgatttaatcataaactgtctaattcaattaaatttataagagcatggttaccaatacttttttatctactgtaacgaaagctaataatgattttgaatgagtttggtatgatttggttattcgattcactaaaatagtcgttttaaatctagccaaatatcgtataattttacttgttttgattatattaaataatcagttatttgaaaactttgttgacatgttaatattatatataactaaaacaaaatatagatattaaaaacaaagaaaatgttattatatagctattatcgtttttcataccatttaaattttattactggctttcatattatgatattgttgtacatagacaccactgctaaaatgcttattaacttgagattttgcttgtgagatttggaggctaatttttttctcggttaagcatttctcgcatcatatgccttccacatagtttgagcttttgttcaccaaatgttcttaccactctcaagaaactggcagcacacgaatatgctttccacatggtttgagcttttctcttggacaaaaactcgttcaccaaatgttcctaccactctcaagaaactggcagcacacgcatatgccttccacatagtttgagcttctctcttggacaaaaactcgttcaccaaatgttccttccactctcaaaaaaatggcagcacacggtggagtttaccacatttgaaaacaagtaaataatgtcttacataattcacagtcactgctttcttcgatcattttcaagaattttgaccgtgaaatttgcaataccatatcttcaagaagacatctaaaaggttttcgcaatctggtgattaggttaatgctcttttgtaatacatttctttcattttatatatgatattaacatttataacaaaagaaaacaatcatagcatattgcatgtcattgcaagtttgctatatacagtagttttaaaccgagtaaacttaagatcaggtaggaaagatgcaaataaagaagcaagtgataccaaaaatatatgtaaacatttaatatagttcttcaatctaattgacgattagaaagtactgtactagatgattacgatccaagatttttgtccacactaagaatatttcacaaaataaggtttgcaacagtaggattgaaatgccagtaaacagtgacattatctcgaaaaaatccaactcagaaatcatttactagctaataatatttttcaaatagtttagaattattattgttgtttatcattaacgcatacaaagttagttgtataatctttcaacttataaataatttggttttggacggaagagctttacgcaaatgtattaatttggttttgataatttttatttgtagactcgatttgtttacgtaaattatgaaagagaggcaaaaataaatatcataagatatagtattagaagaaaaggacataaaagtagtaattaaaaaaaaaaaggaaaagaaagtgtgaaaagaaaaaaggaaaagtagagaggaacgcaaccctgggggcttcttaataaacccctctcgctctcttgtctcttccttacgacaacctctcctgctcttcgttttctctctacgacgataaaacccagatttgggttcaagcttccataactttaaacccctctcgcgatccaggtatgtttcccaatctttattcccagatcttccagatctgaagctcctcttctattttttcgtagatttgatttttaggtttgatctatttgtatgaatggctcgcgtgttctcccgtattggtgattgtaatctaaaatgttgatttgatttaggttcagtaataagactagttatctgacctgtgttaacaccaattagtcttctcctagtctgctttcattgatattccatccttgttcatctgatacttattttttttgcttttattgatctgagaaggttgctatcaaatacttgggagcccccagtattattgaataacacagcctgacaatg

SEQ ID NO: 21844 - DNA, 3003 bp, Unknown
  misc_feature (1)..( 3003): 2750-1469P.txt file - cDNA_ID_2034666; gDNA_ID_1974091; Annot_ID_180595
tggaagaggaagaagttgaagttccggtcacaaaagaacattcagaggaaactactaagatggactctgacaaagcttctgctgaggcagctcctgcttctggagactgtgatgtaaacatgcaggacgccaaagacaccagtgatgcaactggtactgacaatggtgttccagagtctgctgagaagccggtgcaaatggaaactgattcaaaggctagtttctctcttaactgatactgcttgctattcgcttgtgaacatcaaataattatggatacttattaatggattgtgcaggctgaggctccaaagaagaaggtgaagaaaacaaatgtaccactgtctgaattggtctatggtgccttgaaaactgtggaggtcgaaaaggcagtggagaaggaatttgagatggctttgcaagacagagttatggaagagaccaaggaccggaagaatgctgttgagtcttatgtttatgatatgcggaacaaagtgagaatctttatttcgtcttttcattggcagtatgcatatgtaaagttgtgagtattgggtactaacgtgtcttgttttcagctgagtgacaaataccaggaatatatcactgactcggagagggaagcattcctggcgaatctgcaggaagttgaggattggttgtatgaagatggggaagatgagaccaaaggtgtttatgttgcgaagctcgaggagctcaagaaggtaatgcatgcatatgatgacactttatattgtgcaggaagaaatcatatttcaggataatgttttaacagaggagtgggattaatattttgcaggtgggtgaccctgttgaagtgcgttacaaggagtcattggaaagagggtcggtcattgatcagcttggttactgtattaacagctacagagaggcagctatgtctactgatcccaagtttgatcacattgaattggcagagaagcaaaaggtaataatttggctcaatcttggaagcacaaaaaaaatcttaaatttctcaggcttggggaaattgtttgatgttttgttgttgtgaaatgattaaggttttgaacgagtgtgtggaagcagaagcatggctgcggggaaagcagcagcagcaggacacacttcccaagtatgccacaccggctctcttgtcagctgacgttaaaagcaaggcagaggcattggacaagtaagcaaggctccttgtgtctttgtcttttaaaagaaatgctaaatctgataatagagagtgaaccagctatggatgttttacaggttttgcaggcctataatgaccaaaccaaagccggtggctaaagcagaggcaccacaagccaagggaggtgagcaggcggatgagggcaagagtgagccagagcaaccagcttctgccgaaccaatggagactgagaatcccgcggaaggtagtacctaaatgaatgacgagagagagatggtgttgtatcgattttgttcttaactctttttgatttacctagtggaacctctttttctggtttcgctattattcccggaaaaaatctatattgttaattcttccttttcgaaaacaatttttaggaagcatcttttttcttattgttccttgtggttttgtttttaatttgaaagtcattttttctgctcctctatataactattatggagtgtacacggattcgttctatgttggactgggctgtttttataaacagcaaatgaaatgcaatttggttctatatatattggagctttaaaaggcaactttgaaccccctaagcttaacatcttttctcttatatcttacgtgaaatcagtgtgacaaaactcgtcttcctcacttctcttccttaccattgttgtacaaagaacatcttccttgatgaagcagtcgtagcctttggcaacatctttgaggtcatccaggctgaagttgtatcgtttctccaatccaaacggggttaaacaaggatgaattcatttcctcgttatgagcacagaatgagtgcgactgctacgatatgtgattaagctgcctgcaccagtgaggacaatgaaaatctctaacataaatccatgaatcatctctgggcgccgcagataatggcatgttccagacaccacaatgcaattagttcgtgcatatcttatgtaccacaaattctgataacaccagccacttctctataataattttattaattttaaatacattgggtttaaataattatatgtagactcgaataaaaatatacaaaaacactgggataaaaaaaaaaaacctaagaaaaaaaaaggcaataaataaataatttaggcaaaaatatcacaaaaataaaaaggaaatgaaagtgtttttaaaataaaaaaaaaaaaggaaaggagaagaacattccagaggaacccaaaccctgtggtggtgtctgctccttaattaaaacctcttctctcttgctcttcctttataaaagaagctcttctcccttcctcttcactttttggctgcgacacgattacagatttctcaccttcacccagatttcggtggaagcttccagaacgcgaacccctctcgcgatccaggtatgctctagttgcagatcttctagatctgatgcttctctttttcctcacttttaggttttatttatttcttgttgccagattacttgttcctcgtacttgtgtttcaatatgaatcttctgctttcgctgcttccggatttgtattttagtttcaaactccaccaatcttcgttgtatgtattgttgatgtaaacccaaactggtggttttattttaggtttagtaatacgatggtttaaggctacctggcctgagttaccgccaattcgtcatctcctgtaatctctcgagctcaagactagtctgcttcgatcgctatctgatagtgtttttcttttttttgttctataaggttgctatcgaacacgtgggacgccccagtactgaagaacacaaagcctaacaatg

SEQ ID NO: 21845 - DNA, 3000 bp, Unknown; identical to SEQ ID NO: 9820
  misc_feature (1)..( 3000): 2750-1469P.txt file - cDNA_ID_2034746; gDNA_ID_1974075; Annot_ID_180363

SEQ ID NO: 21846 - DNA, 3000 bp, Unknown; identical to SEQ ID NO: 9295
  misc_feature (1)..( 3000): 2750-1469P.txt file - cDNA_ID_2034818; gDNA_ID_1972067; Annot_ID_178427

SEQ ID NO: 21847 - DNA, 3003 bp, Unknown
  misc_feature (1)..( 3003): 2750-1469P.txt file - cDNA_ID_2034901; gDNA_ID_2684220; Annot_ID_191828
agcacgccatctccatcgaaggaaaaaagtatctggggtacttatgccagaggagcagtttatgcgttacagagcagcaaaaagaatctcaaacaggtaacaggttcaaatttggtcttctggttatagctatagataaagtttaccattaatgggaaatgaggtttagcctgcacatttgctgtgtgatcttctggggttccacatttacccttatttggttgccatacctgatcttttaggccttgatttccccataatagttgacataattgtatttaatggaaaaggtatttgaatatgtttctaagtaattgttttgatctttgaagggcattattggttacctcagtggctcaaatggactagatagctccgggcttagctcatcagctgctgtaagtaactgaatcccgcctgtttttgtacagcagaaatttctccggaaagacaatttttactgctctttaatagtaactaaacatttttagcatatgagagtggtgtttacttgtcatttttggaaaatgaatcttgtatattattttatgatcgccagaaatgtgacaggttggtgtggcatacctgctagctctagagaatgcaaacgaattgactgtatccccaacagaaaatatcgaatatgacaggtatattcccttctaatgtaaccaagaagctcttctgtattgcttcatgagcagttgtttctctgtgaaaccagcaattagtgctgcaaattggtcaatttatatgtgacttactgcgtctgcaggcttattgagaatgggtatctgggtctgcggaatggaattttggatcaatcagctattttgctttcgaattatgggtgtctaacatacatggactgcaaggtaaaattccttgatttgtaagtgatatagtgtgcaaaaaagcaagaagcttgttcatgtggcaaaaccaagactgttcaatgggatgcctaagatgtttttgatctctaaactgaaaatgactcacgatcaaatcagatctacaacattctcattgctttcacgagaaaataagtgtttaatcttttcaattgcttcgattttaatgtatttcaatgctgagttcacttcttcctaaaatgaaaatgaatggttagaatcaggaggccttgaagaaatccttcctaaccagccatagatagggaaactttattttcttccagaaactgccatctcagaaaaactgtttgaaatatgcagactttggaccacgagcttgtacaggctcctgaactggagaaaccgttcaggatattgttagcattctcaggcttgaggcaggcgttgaccaccaacccaggatataatctgcgagtttctgagtgtcaagaggcagcaaaagttcttttgacgtatgtgcaaatctgtttgattcatatttatctacattttcgcttatttagatttaaatttcagtggaaatgctgcaaagtttatttctctattgcttgtgatactcatttttctgcatcacaagattcacacccttctcttgatttactttttcttttcagtgcatctgggaacagtgagctggaacctacgttgtgcaatggtaaaaaaactttaagtgtggactttaacttattcgttgcatgctgattagtttttctttgttgccatgtctctaactgtcccactgaatagttgagcatgcggtctatgaagctcacaaggtaagaaaataagattcttaagcttttggtaaaacaggttccacctatatcaggcctatgtaaatatgtaatacaataatacttgttcgtgcagcatgagctgaaaccggttttagctaaaagagcagagcattatttctcggagaacatgcgagttatcaaaggcaaatgttcttgaattcttgtagatgtctctttatgtgcatgaatgattcattaagctctttatgatgcttaacggacttttatgaatgtttgttcttaaatttcaggacgggaagcctgggcttcagggaatcttgaagaatttggaaagctaatttcagcatccggcttgagttccattgagaattacgaatgcggtacattacactctcttttcttctctcccaaatgcaacatatcctatagtgaatacagaccactagtatgcttacagacattattctctcttagattcattattttggttttaaattctgtgagttttgtgaaggtgcggagccactgatccagctatacaagattcttctgaaggctcctggtgtatatggagctagattcagcggtgcaggtttcaggggatgttgtctagcctttgtagatgcagaaaaagctgaggcagctgcttcatatgtgaaggatgaatatgaaaaggcccaacccgagtttgctaacaatctaaatggaggaaaacctgttctcatctgtgaagcaggtgacgctgctcgtgttcttctctgatcaatcctggagtttttggtttcttccccacttaaactcgatttttttgtcccttatatctctcacgcttattgattctttgcttgtttatctctttttgatcctgtctgagaaattctctggtctctttggtcggagtttcatcattgcttgatacattttttttgctacaaatacataatgtaaatcattctctaccgttttcgagtcgatagaagaatcgcaaacttcaaaaatgtgactaacatttctccataaatttgttaaattttcaacaattggtgaatttagttctgtaattgatctaacaaagacactatacaagtatgaaattagaaattgaaatcgaaagttagttattataatcttgtttgtataaaatagtgtatatctcaaatagagatacagattagttttttgtttggacacaaagacccccgccaaagtattgaaattcgcgcctgagaaattctccggtgtggctctctagggttttagcactttaatccatttgtacttgtaaaaatccctaaaaccctctgggcatg

SEQ ID NO: 21848 - DNA, 1116 bp, Unknown; identical to SEQ ID NO: 9289
  misc_feature (1)..( 1116): 2750-1469P.txt file - cDNA_ID_2034901; gDNA_ID_1972067; Annot_ID_178386

SEQ ID NO: 21849 - DNA, 3 bp, Unknown
  misc_feature (1)..( 3): 2750-1469P.txt file - cDNA_ID_2034901; gDNA_ID_1563385; Annot_ID_147584
gga

SEQ ID NO: 21850 - DNA, 3000 bp, Unknown; identical to SEQ ID NO: 9310
  misc_feature (1)..( 3000): 2750-1469P.txt file - cDNA_ID_2034982; gDNA_ID_1972068; Annot_ID_178482

SEQ ID NO: 21851 - DNA, 3000 bp, Unknown; identical to SEQ ID NO: 15417
  misc_feature (1)..( 3000): 2750-1469P.txt file - cDNA_ID_2034990; gDNA_ID_2926133; Annot_ID_197058

SEQ ID NO: 21852 - DNA, 3003 bp, Unknown
  misc_feature (1)..( 3003): 2750-1469P.txt file - cDNA_ID_2034990; gDNA_ID_1972068; Annot_ID_178480
atacattaggaagggagcatatgataagtttttttttctaactttacctaataatcaaatttggtgctctctattattgtgacgtcaatagacataaggataaatataggaaataaataacattaaattttataaacttttatgaattgtttttaattcaaaaattagttcaaactacataagcgattttatacaaactttatgacatgtggcatatttttctatgttttatttccattttcattctcacttgaaaagaaatgatatacataaggtatgaattataagaaaagcttataaatagtagtttacagttttacattgatttttattttatttagcatgttataaaataattattcttatcatcaaaatatatattttcaggttttttttttatatgaagatacatcacacaaaggatctattcatccaccatttttattaagtgatgagggtttacagtcatttttgtttttgatttgcttgggcttttcttatttttgctgatctgttcaaaaaatatgggcatgattatgagacctgatttactccatatttagcactttatcaaggttgtaaatattctttttgttaaattttattagtgttttcattgttttttgttgcatttagtatccacgtgatttttcttgtgttttagaaatcctatagtgtctttgtgtgtgtgtttttagttatgtgaagttaaaataatggaatacacacatgtagatgctaagaagagaaatgatgatcatgaacaagtccaaagtgtcagaaatatcaattcggatgaaggccttactttcgaatttagattcagaaatttagttagctttccactgatggtgatttcaagccaaacggaacagaggtttaagaattatcatcgatttagtagacacatatcattttcatgcttaagaaaagctcatccagaaattttccttcaatgccagaggttatattaacttagtgcagtaggatcaacatacaattagagactttttaatgatgtaatcatctaagatatgatccactttattttggaataatccggtccaaacaaatttatattcaaggattttttagacattttttaatatagtgagatcaacaatttttagacatttttaatacagtgagaccactagagactttttcatgatatcattatccaagatttgacccgttttatcttgggtcgaccaggtctaaacgaatttgtatttaagcaatttttagacattttttaactgaaatttgttttgtgaaggattcttcaattctatcatttatatttttgtttatgcatttttcttatatctttcaccatgtttaatgagtagtcttttgtttgatcatgagttatgatagattaggataatttgatagttaaatgatgatgatttatattgcttattgtagatttcttcatttaggttaatcttattattatgtgcaccgattatgtggttcataagtatctggtgaacattttattttaagtttttttgttaggttatacagctaacattaaaaaatagtaagaaaatacaagggataatatagtgaaaaaacactgatagtgagaacatatttcctgaagtctctcttcacttcatttggaaatggaataacttattttggcaatgagatgtttgattactgaacaataacatttggtggtttttgttcggaagatttctaaattggtgaaaatagagcagcatcttgtggggtttgatcaacatatacgaatgaagtaaaagaatgcaaagaaattgcgattaaacactatgcaattaaacctcattatggtcttagtaactgaataatctactcagttactaatgtataaatatatttttgctttatgataattattaattattattcatgtaaagtttaaattccaaataaacatatggattagtcatacctcaataattactcttttaatagtgcataatatttagttacttaattacttcaatcaagttttttttttgagttttcttgtcaataaaaaatgtcccgtttttttttattttgcatcaaaaaaagtatatataaaagaatacagagtaaaatagtattttaaacataaacttttcactttaacaaaattttctacttcaattcttaactagcggcacaatacttatttattttaagtgtttgatgatactttttctacatgtaaaaatcaattaacatatataaggtaatttttcaaacaaaaatataaaaatttcaagtatatttataaaattaaaatatatcaaaactattaaaaaaaattaaaactaattttattttgcacatcacgcgaggctacttctagtgtatatatattgtttgatgatgttgtgttttatatagagaaaaaacaaactcatagcataatgctttttaatttcgtcagaaaagccaaattaattagacaaaactacatttttcttctaaccacaccttatagagtgcttttttctttcaagtgcgtttctatatctgtgacgaagaaatacgtatcgcactgctttttcttttctttttttcttcaaaaaaagagtttgaaacaaacttaatggtgagaaataagtagaaccacacataaaaagctggaacgcgtcgtacattcacgcccttactttaatctatttggttctgtttctttttcttctgtgtctcatattatatccttccatatttgctgtcaaaaaccttttaaaagtcttattattattttacttgctcatctccttgtattaagaatcttgttttgagtttttgtgaaagcgttactctttaaataatcaacaaactcgttggctctgcaaaaccctcatgcatgtgctaagttccaagtaagtgtctatagctttctgctccaacaacaaaaagaaaaagaataacatcatccagtgtttgatccatttcttgaatcttgtaaaagggttatgttcttttgatctctctgtaacaatttcgaaaatg

SEQ ID NO: 21853 - DNA, 3003 bp, Unknown
  misc_feature (1)..( 3003): 2750-1469P.txt file - cDNA_ID_2035028; gDNA_ID_2926133; Annot_ID_197065
aaaaattgtttagtattagtaaagctatttgcaaattaaattctaaacgcaaacgaaaataaacaatcatatccacaatctttattaaggagctatatgatgagaatgcaaacactgagatgtccattagtcaatcccaaaatagaaatgagcataatcatccatccttgatcaccatacttggcagtgaagtagaattccggaatgaggaaaaaacgcgacaaaatcgcaactgtgagtctttttctattctcaattttgagccatttcaccagcggtgtgtatcttccgaccaaatcccatagtacattgctacgaggccaagcgtgtaccatgttcctagtctgtgttgtcccgtgttttcatataaaaacctgggtaccagggataatgtcaaatcgtagaggaggaatagattcactgcataatccttcataagcggatttacttcagtagtacttaacaatgggaagtttcggaaatacataaccatttattgtggaaaacatgtaaccgatcatattacattttcgtgtattgctttttgattcgcggtatgagaaaatcgtgattgttccaagctcaaaaggttcgtataccacaatgagtatccttaaaggatgggtaatcctacggagccaagaaacatagagaattcaactatagttttttataaccaaaacataaaacttcgaaaaccaaaacgaaaacaaattggaaaaacgtggtagtaataatcttcaagtgtgagcatattgttccaagaaatgttgttccaactccaagaatacagcaaaaaacagtgaagactttagatatgtcttatttatgttttcttttggaaaaatgtaataatttgaaattataagttgtgtcattattcgtttatgtatatcatagtacaatatatgatagattacgttgaaagagtaagatagatagataatataatgtttgatatagattttctcgtcatacccaacaagtaaacaaaaaaccttactaactgcaacaccattggaaacttatcctcttttcattggtcaatttcttcttttcgctattgtttagtcgaactaaaacgtcattaaatatcaatcaaactacagagacattatttttgtttaacaatacaataacatggacttcaaattagttttagtggaaataatgattagtactaataaaattcgatcgcctgtcgtaataaccaactcagctcaatgtcacatgctaagaagtaagaactcctgattatattttatttttaattctgttgctagattaattaaataaaataaagtcaggaattttgttttccttctttactcttttttttgtgccgacgtcaagaacctagttgaagattgaaaatatatattagatacaatttttaattatatgttatcttttttttttttcttgtctaaattatatgtatcttaaaatcgttaaatcacaatggtttttgtggagtcaagtcaaatgcatatggtgaatgattaggagcatctaacttctggctgatagctatttgacggctacgatgcatctgtcatataaaatggaataacggccagtagttctcatagaccgctattattttggccaacagattgatcgtaagaaaatataatagttgtatacattagtctttttggacacaaaatttttgatgaaaactttaacgaagttgagacgaaaagaaaaaaaaaaaatgtttctcatgaaaatatagttacattacataaggaatgcgtatggtaaatgtttgttttttgaaagttttattatgataaaattattatattagatttatattttttttatttttttgtcgaccgttattaattatttttttattttttgttcaaagatattaattgttgcattagataacataaaatatatataaaaaaccaagatttgttcacaagataaaaaaccaaaccaaatccaaatttcataagatattttctacactaactaaagtacttcaatcgaacgattctgttacaactttgtaatagtaaataagtaattagatttctgagtaaaacatagattatcaaagtcgcttttattattgttttgtttgcaagactcgtgcttacaaatctcccattgtaatcaactatcgttttctagagtttgtttcagtcattcttacactcttattgactactcttattgattattggaatttttttttctttttttttttcaatctttgcttttattcattgaaacaaagaacaattacaagcataagagttaaagaactcaaaaattaaaacattacaacaaaaggtattctccaataccataaaaaaaaaatctaaaattcatcgatttgaagtccatgagagttttaaggcaaagacaaagaaacacaatgcaacatatgagattatagagaatctaaagatcattgttttattttgttttattttgatcgaaagattacagaaaatcaaggaattgttttattttgttgatatatttttgtggtaatatttttaaaattactttttttctttcatataaataaaattcgatagaaattagtatttatatatatatatatatatatatatatatatatatatatatctgtatctcatttattcaaaattatcatttgtgcaaatcggttaataaatgtcgtttatgacactaacgagtaatgagtggtgataataatcaattcggtaatactctcacatttataaattatattaaaatattcaaacggttaactaattatattactttattttttgtgcaacaaactaattatattacatgagaaaaaataatgctgtgagaatgcggtacatgacagccacgtatctctaacatatcctcttcccgaacattcaccttaataatttatatggtcgttgaatgaaatcgaatcaaaaaaaacaaaaatccccaaattaccaaaatcctcggcgacaaagaggagagatagagagagagaaagaggcgaaaataatg

SEQ ID NO: 21854 - DNA, 3003 bp, Unknown; identical to SEQ ID NO: 21853
  misc_feature (1)..( 3003): 2750-1469P.txt file - cDNA_ID_2035028; gDNA_ID_2926133; Annot_ID_138829

SEQ ID NO: 21855 - DNA, 3000 bp, Unknown; identical to SEQ ID NO: 9308
  misc_feature (1)..( 3000): 2750-1469P.txt file - cDNA_ID_2035028; gDNA_ID_1972121; Annot_ID_179004

SEQ ID NO: 21856 - DNA, 3000 bp, Unknown; identical to SEQ ID NO: 9308
  misc_feature (1)..( 3000): 2750-1469P.txt file - cDNA_ID_2035028; gDNA_ID_1972068; Annot_ID_178469

SEQ ID NO: 21857 - DNA, 3000 bp, Unknown; identical to SEQ ID NO: 9317
  misc_feature (1)..( 3000): 2750-1469P.txt file - cDNA_ID_2035036; gDNA_ID_1972068; Annot_ID_178467

SEQ ID NO: 21858 - DNA, 3000 bp, Unknown; identical to SEQ ID NO: 15437
  misc_feature (1)..( 3000): 2750-1469P.txt file - cDNA_ID_2035053; gDNA_ID_2926134; Annot_ID_197084

SEQ ID NO: 21859 - DNA, 3000 bp, Unknown; identical to SEQ ID NO: 15437
  misc_feature (1)..( 3000): 2750-1469P.txt file - cDNA_ID_2035053; gDNA_ID_2926134; Annot_ID_138834

SEQ ID NO: 21860 - DNA, 3003 bp, Unknown
  misc_feature (1)..( 3003): 2750-1469P.txt file - cDNA_ID_2035053; gDNA_ID_1972121; Annot_ID_178999
gtaaccgctggaccgagtttagtaatgatcgggctcaaggaaccgtgggtttcaggctcgatatagtttcgactattcggtttaaactccataggtggatcagtaagcatcataggatgcacgctaattgcaacatcgtggttggaagagacgggttgatcttgcccaagtttaaccataaacggtgtccagtctacttcacttagaaagattgattggtttgttatttgctattctctttatattttactttccttttgaatgattttgctttctttacgttttgtaacttggatttgggagtttggtttttctcattaaatgtatgatctttgagttaaacatatcaaagaaatcatttggtaaaagtaaaaacgcaaagcaattggcagatagttcaatctattacctcagtcttcttgagtctggcaaacagaataagttatggtttcctcttgctcgaaatctgagcttcaacaatttgccttctccattgatgaattgggacctgaataagaattttttgtaagatgaaacaatgtttatcggaagcaaaagcagagtccggctctgtttttttatactggcttatgataaaaaatcaaagcaaacttgggatcttggaatcagatggaagtgaagactcaatcgaagagaaagagagatgcttacagcaggaaaaccgccgtaatcccctggttccgtaatgtttttagtaacacaactattagcagcaagtcgaacctatagtcggaaaccaaaaacggatttagatgaagcactgcacaatttcattactccaattatgtttctatttttttaccttggatacaatggagacatggtctcgaacagctactcgtcctcctagtgctacaaagtcaccaatcctacaaaaaataattgtcgaaaagacgagaagcttatagtttcaatcaacggaacataatagttatttggttgctgggattagaagcatttactctgctgatccagctatgcctacttggccacagaacaagcaacatttgccaataatcacattgtgacctatctgcaatatttaagtaaacagaatagcatctcagttgtcatttacttgtgatctatgggggagttgcaagatagaatcgaagagacacctgaactaagttgtctatcttagtatcatccccgatcacggtatctctccagctgcataaatagtaaaggatatggagctagaaaagagctttacagggaactagttcttgaaatattctgttacctgccccgatcaatgcatgtgtttgctccgatttccacacgattccctatcttcacatttaaagtctagggagagcaagaaacagaacaaaggataaaagtgatgcacaattgttatccagattcaagagagcaatctaggtgtgcttacttgaggcttcttcaccatgtttccgttgtcatccacgtaaaacccaaatcctgaacagttaaaaaccaatctcaattcaatgccaattctcagaagataaagaagaaaacatggacttggtccataccatcttgaccaatgcagactccattatggatgacacataaatcaccaatactacaattgctgactgaaacattatacctgtagacaagtatagattctttcaagattctcttcaaaaacatgtataagacattaagcaaaaccgttacccgatctttgtagaagggccaattttgactgatgatccaattacagtgttggatcctatatgaacctctgctcccaatatagcttcttggtgaaccactgctccaaactcaaccagagccgaggaatcaattagggccgaacgatggtacattcctcctccgtttcgccatcttagaaaacctttctcaacattacctccactacttgtctctaatcttgacagttacaacaaaacacaagaagtatcagcaacaatcatttacatagaatagtcaccacctttacacatataacatctttccaccatctaaatatcacaatccggactctttaatagcgtaaaatgtttcatgcaacaattgtcatcaatattcgttcatcacaatgctgttaaatcatatacagatcatgaacatctttcccaagcatcataataccacacatgtcagaccttatacacgaaactgatacgaatctaggaatttcactgcatattctcagaggcattccaacaaacaccttgcgtacacgataacttgataagataaatgcaaacaaaagtcaaaactttaaaggtacaaattcttaacaagactaaccgttatgtggagaaacattaacagtgacggattcagttgattgatgagagcaaacccttaaatttcggctactagagaaaaacctagaccgcttgttcaaaaagacaccatgagtggacactgagaacaatgttcgcaaactatttgccatagtcaacaaaatttatagagattcagaagaaactgaacaaatttagcgacacgaccaaaaaaaaaaaaactttgaacttgcttttttttttttccctccaaagctttaaactctttcttttaacaaaacaaattagaactaaaaaatcaacatttccatgtaatattttatactcaacaaacaatcttgaaaccgcttcatatcacttttgtaaacaatgttactcaggattggctattatgagttctaaataaaatctgatgacaaaaaaaaactattttgatgaatttataaattttatgattccccgaaacctttgaccaaatatgttttttaatcatattattatgtcaatgattacaacagcacattttaatttcattatctagacaggcctgcctaacctatggaatattgaagtttgaacataataatttgatttaaacaatcttaattatcaatgactaactgtagtaattagactttgaatcccactaattccaatgaagattatattaagaaactcaaagaagaagaagagcaaagaaaacaaaaacatg

SEQ ID NO: 21861 - DNA, 3003 bp, Unknown; identical to SEQ ID NO: 21860
  misc_feature (1)..( 3003): 2750-1469P.txt file - cDNA_ID_2035053; gDNA_ID_1972068; Annot_ID_178462

SEQ ID NO: 21862 - DNA, 3000 bp, Unknown; identical to SEQ ID NO: 9320
  misc_feature (1)..( 3000): 2750-1469P.txt file - cDNA_ID_2035097; gDNA_ID_1972121; Annot_ID_178988

SEQ ID NO: 21863 - DNA, 3000 bp, Unknown; identical to SEQ ID NO: 9320
  misc_feature (1)..( 3000): 2750-1469P.txt file - cDNA_ID_2035097; gDNA_ID_1972068; Annot_ID_178451

SEQ ID NO: 21864 - DNA, 3003 bp, Unknown
  misc_feature (1)..( 3003): 2750-1469P.txt file - cDNA_ID_2035112; gDNA_ID_1972068; Annot_ID_178447
tttatttcttttcctttttgtttttttttgccatttatctaatgcaagtgggcttataaaatcagtgaatttcttggaaaagtaacttctttatcgtataacatattgtgaaattatccatttcttttaattttttagtgttattggatatttttgtatgattattgatttgcataggataatgacttttgtatcaagttggtgaacaagtctcgttaaaaaaggcaagtggtttggtgactcgatttattcttgttatttaattcatatatcaatggatcttatttggggcctggtccatatttaacactcgtgttcagtccaatgaccaataatattttttcattaataacaatgtaacaagaatgatacacaaaacattctttgaataagttcgctatgaagaagggaacttatccggtcctagatcatcagttcatacaaacctccatagagttcaacatcttaaacaagaatatcctgatctgaagaatgtggaggctttagtcccttggatacttgggaggctgtggaagaacagaaacgagctggtgcttaaagggagggaatttggaaccaatgaggtattagtaaggacacaagaagatgcagatgagtggattagaaggaaagaggctcagaatgtaaggaaagcaccaaccacaacaccgtcgggacagacgagaaacatgggaagctccaccacaatcttgggttaagtgcaactttgatggggcatggccaacagaaggattaaaatgtggcttagggtgggtgcttcgcgatcatacagggaaggtgttatggttaggtgcaagagctgtggtaaaagtaagaagcgtgctggaagtagaagtggaggctcttagatgggctgtgctgtcattatcccgattcaattataggaagatcatttttgaggtggattctcagcaacttgtgtctttggttacatgaaagttatgcttgtcaagtctcaatccaattatccaagacataaagtatctacttagcaagtttgaggattttatgcttgtgcatacaagccgagaaggaaatggagtggcagatagaatagctaaggaatctctttcttttgagaattatgatctaaagttgtattctattgtaccaatttgggttaaaagctctgttgagctagactgtgtatccataaatgggtgaatggaaagtttgttgttgagccaaaaaaaaaaaaaaaaaaatcatcagttcatcatattggtagtcttgtttgataagttctgctttttttaccttccagttttgccatttgatgttgcaatgagatttcttttgctaatgttttaaaataacaaagttgttgctgctagtgtttccaagttgtgtttgctgaaattagggtttgtaacttataagagaagcttgatcgctgctttcgactaaagggaattcaataacaacaagtttacttgaagaaaaatattaaaacctagaagaaaagagttacacctacaaataggataaaatccacataaatttctgttactaaatgtatcatagttttgtttcttctatgtatctacatatactcaaaaatttcaaagcattgtgacttaagggccagaagaaaacttgaagaaagattaaaacctattagcaaagagttaaagatccacataactttctgttgctgaatgtatcatagtttttggtttcttctgtgtcatatatacagactttctacagaactttttgagcacaaagcattgtgactttagagccacgagtaaaagacgaggcaaaatgtgtatcacgtccactaaccatataaactgtttcggctggaagaacacggttccactcgaatgactgatcttcgttcaatactctctctttctttctgtccacaaagaaatatccttcgtgaggcattcttatatgacccctccgaccactttcaaccaactcggttctcagtattttcacttgatccgtcgagttcacatccacctcaataaatctcttcagacctttacactcacttgaagctgccaccacatatactttaatcttcttcttcgggtcagtgatctctttgactgagtttgacgctggagattgctccatttgaggcacttgaaccgtcacagacgaatcttgaatcttactggtctcttggataacacgtctgggaacaatcacaattgtatccaagggtttaacactgttacactcgtatgactgatcttcgttcaatacttgattattgtgcgtaaagatgtacccttcttgagccagtttcataagacctctcagtgttttcacctcatccgtaactttcacttgcaccagaatattcgttgggacttcattcataccaggatatggcgacacatatactagcatctgccggactcttttttttccgttagtgatctttttgactaagtttgactgtggaaattgcttcgttggaggcacttgatcgttgttgttcttactcgcaaacttcacagacgaatcttgaatgttaacggtctctttgactgagtttgacggtggagattcctctgtttgatgcgcatcttgaatcttactgatgtcttgggttgtctcaggccgataactgtaaatctttctgatctcttcctctgtcaaaggccaatcttgctccgcaaagtactcttcaactgaaatccacggtgctggaggagattgctctgtttgcgggatttgatcgtcgttgttgtgaatagggttcacgtcaggagagacttcgagttggatttgagaatcgtggaagatctggcattggtcgaggttaagatcttctcgaagaataaaaatgccgtcgacgataagggtttgtttcgaaactgggacacgttgagacttctcgatcttctgtttgaccactaacaatgtatctgtgcgttccacttcaatctcgaacgatgaaccacccagaatctcgaccacaaacttcatgactctatcaatggtgtttcaagatcaatg

SEQ ID NO: 21865 - DNA, 3000 bp, Unknown
  misc_feature (1)..( 3000): 2750-1469P.txt file - cDNA_ID_2035268; gDNA_ID_2684231; Annot_ID_192273
ctccactaaacaaagctcgatcatgaagaatgataaaagctcaagctgaaaaaccaaaccttatgatcatgttttgattctttatatatcacataagacagaagattatcatcaaagttacacaaacctttttgtcagattgtgcagctttgagaaaccgtctcatgaacacatatggagttggcagacagaaattgaattgcaaggtattcgccattaacttctcctgcaagacacaataatgatcatccacatataaagcagagcatccatggttataatcaggacaagatttagtgaaggattttaccatatcaagaatctctgtcctagtataagccttgtcagagatcaggattagatcatcaacaactggaactgaaacttcttcatatttgcaagcaagtaacatagctgttacacccacaagctgaagctttttcctcgcgatatgttgatgaaccgcaagaaatctgtcaatgagattgattgtcaggtaaagcgtctcctccatcagctcaaacttgtaatgtacctgcaacaaagattcacagtaagctttacagtgagacaactaccaacaacagagcaattttatgttcatgtttttgtgtgtgtatatatatatacctcaatcaaccaatcaaaaaggattcctctcatcctctcgttaatgtcatgttgattctccatgtagttaggcgggacacagctacgacactgcaaaataattgaaaaagtttcaatcttgaagctagaatgatcataatgatacagaaacagaacactaaaagttacctcatttttcttgtagaagcaatatatgtcattaatgtattcaactacagataaaggattgttcttgtcacagctgtctatatccatcacagactcttctacttcagcatcaatatcatttgaatcttgcatttcaatcccttcctgcagaataaagacaacaggtttcttcatccgagtaaccaacaaaaaatagtggcttaaataaaacatgttattattattaccattttgtcaatctcttcaagcattgcttcagtatgttgaacaaacattggttcattaaagtctccttcttccacatctgttatgattctatctaatgcttcgtttgaaatcaagtctggtttcttggtttcctaaccacaaaaaaaccacttggaattagacaacctaaaccatgtcatgttttcaaatactaaattcagatagaatcaatataaaggtacctccttgtggatttggagattgttctcagctaattgagcagcaaatttcctgaaattaaataaagaattaaacaaactcatactacaattttgaaatcgaagcagaaatcaaatgaaatcactcacctagtaactggtcgatgcactggaacaggtggaatcttcttgttacaaatcccatttttcctgagaaaacaattggttactaagataagtctatgcaacgtttttattaaaggatcattgaaagaagaaagtaataaaaatataattactcagtgaatggtctcttgacagcacaaggatagaccggagctccgatgatgttcttgtttatattactcagtgcccttcttgtctgtccattcgtcggaattacctttcctccacgtaaaccccctaacattggcaaaatcatctttttagttaatcaaacaaaagattgatttttgattaaatgggtcttcttgtttttaattctgatctaccttgttgtcgattcatcggtccaatgactccgtgtctgttctcatccgatccacccattattatcttccgtatctgagaatcgcagaaacactcgcatattaacaatccgaattaaaaattgggtcttgaatccgatttgagaatctaaaagactcgacgatcaagaacaagatgtactctcttaaacccatatgaaatcaacactaaagtatttaccttgaagctttcaacgaaactattaacctctctctatctctatctctctgtcagaactcagaagcaaaatcccataacagcaaacacaaatcaacctctggctctcttcaatgatcttcaagagtctctctctttatcttctttctctcacaacgaaaacaaaattgaagaaaaagtggtaaaagagactgtagagagagtaatcaaagatttcgaagacgtgaagagcggatatatgtctgcaacacaccaaaaaaaaaatgttgttttacgaatcgttatctttttttcccctttttagaatcaacggctagttaatcttaaccgttggatacaacctcagaaaaaaaacctaatggaaaaagagaataggagcccaacggctatatttgtaaccatgtgcgtttttcaaatttggcttattttcttcgttattacttattactaccacgctcaagtctcaaaggtccaatggtcaatgttttatttcaatgtcaccgaccaccaaccgcttcctcattattaagccaatctaaatattaataccagtcgatttgaccccaaaacaaaaaacaaaacttagaccacattattattaacccaatctgataaattttaattttacccgattctgatttttaatactcaagctagtagatgatttaaatctttaaaccttagactaacggctcttcgcctttttgctttttcctctttacatctttttctccagtagctttgttagtcaacacattttccaaaaaggttgaaaataagtcaaagtacaaactgaattacccaatacggcccaatatcctgattagagagttaggcccaatatatcatcagatttgcaatcgcaagtctctttcaacttctcgtcgaatgttatactctcctcagagtttctccggatctttcaaaaacaattccggtgaagatgaatcagttctgtgattcgtgatttatgttactcaatcgatttctcatgttatagtcaccgatctgtatcgaaattttggtgtggattcatcaagcttctcaaatg

SEQ ID NO: 21866 - DNA, 3003 bp, Unknown
  misc_feature (1)..( 3003): 2750-1469P.txt file - cDNA_ID_2035268; gDNA_ID_1972155; Annot_ID_179471
gtactccactaaacaaagctcgatcatgaagaatgataaaagctcaagctgaaaaaccaaaccttatgatcatgttttgattctttatatatcacataagacagaagattatcatcaaagttacacaaacctttttgtcagattgtgcagctttgagaaaccgtctcatgaacacatatggagttggcagacagaaattgaattgcaaggtattcgccattaacttctcctgcaagacacaataatgatcatccacatataaagcagagcatccatggttataatcaggacaagatttagtgaaggattttaccatatcaagaatctctgtcctagtataagccttgtcagagatcaggattagatcatcaacaactggaactgaaacttcttcatatttgcaagcaagtaacatagctgttacacccacaagctgaagctttttcctcgcgatatgttgatgaaccgcaagaaatctgtcaatgagattgattgtcaggtaaagcgtctcctccatcagctcaaacttgtaatgtacctgcaacaaagattcacagtaagctttacagtgagacaactaccaacaacagagcaattttatgttcatgtttttgtgtgtgtatatatatatacctcaatcaaccaatcaaaaaggattcctctcatcctctcgttaatgtcatgttgattctccatgtagttaggcgggacacagctacgacactgcaaaataattgaaaaagtttcaatcttgaagctagaatgatcataatgatacagaaacagaacactaaaagttacctcatttttcttgtagaagcaatatatgtcattaatgtattcaactacagataaaggattgttcttgtcacagctgtctatatccatcacagactcttctacttcagcatcaatatcatttgaatcttgcatttcaatcccttcctgcagaataaagacaacaggtttcttcatccgagtaaccaacaaaaaatagtggcttaaataaaacatgttattattattaccattttgtcaatctcttcaagcattgcttcagtatgttgaacaaacattggttcattaaagtctccttcttccacatctgttatgattctatctaatgcttcgtttgaaatcaagtctggtttcttggtttcctaaccacaaaaaaaccacttggaattagacaacctaaaccatgtcatgttttcaaatactaaattcagatagaatcaatataaaggtacctccttgtggatttggagattgttctcagctaattgagcagcaaatttcctgaaattaaataaagaattaaacaaactcatactacaattttgaaatcgaagcagaaatcaaatgaaatcactcacctagtaactggtcgatgcactggaacaggtggaatcttcttgttacaaatcccatttttcctgagaaaacaattggttactaagataagtctatgcaacgtttttattaaaggatcattgaaagaagaaagtaataaaaatataattactcagtgaatggtctcttgacagcacaaggatagaccggagctccgatgatgttcttgtttatattactcagtgcccttcttgtctgtccattcgtcggaattacctttcctccacgtaaaccccctaacattggcaaaatcatctttttagttaatcaaacaaaagattgatttttgattaaatgggtcttcttgtttttaattctgatctaccttgttgtcgattcatcggtccaatgactccgtgtctgttctcatccgatccacccattattatcttccgtatctgagaatcgcagaaacactcgcatattaacaatccgaattaaaaattgggtcttgaatccgatttgagaatctaaaagactcgacgatcaagaacaagatgtactctcttaaacccatatgaaatcaacactaaagtatttaccttgaagctttcaacgaaactattaacctctctctatctctatctctctgtcagaactcagaagcaaaatcccataacagcaaacacaaatcaacctctggctctcttcaatgatcttcaagagtctctctctttatcttctttctctcacaacgaaaacaaaattgaagaaaaagtggtaaaagagactgtagagagagtaatcaaagatttcgaagacgtgaagagcggatatatgtctgcaacacaccaaaaaaaaaatgttgttttacgaatcgttatctttttttcccctttttagaatcaacggctagttaatcttaaccgttggatacaacctcagaaaaaaaacctaatggaaaaagagaataggagcccaacggctatatttgtaaccatgtgcgtttttcaaatttggcttattttcttcgttattacttattactaccacgctcaagtctcaaaggtccaatggtcaatgttttatttcaatgtcaccgaccaccaaccgcttcctcattattaagccaatctaaatattaataccagtcgatttgaccccaaaacaaaaaacaaaacttagaccacattattattaacccaatctgataaattttaattttacccgattctgatttttaatactcaagctagtagatgatttaaatctttaaaccttagactaacggctcttcgcctttttgctttttcctctttacatctttttctccagtagctttgttagtcaacacattttccaaaaaggttgaaaataagtcaaagtacaaactgaattacccaatacggcccaatatcctgattagagagttaggcccaatatatcatcagatttgcaatcgcaagtctctttcaacttctcgtcgaatgttatactctcctcagagtttctccggatctttcaaaaacaattccggtgaagatgaatcagttctgtgattcgtgatttatgttactcaatcgatttctcatgttatagtcaccgatctgtatcgaaattttggtgtggattcatcaagcttctcaaatg

SEQ ID NO: 21867 - DNA, 3000 bp, Unknown; identical to SEQ ID NO: 15025
  misc_feature (1)..( 3000): 2750-1469P.txt file - cDNA_ID_2035675; gDNA_ID_2684254; Annot_ID_193069

SEQ ID NO: 21868 - DNA, 3000 bp, Unknown; identical to SEQ ID NO: 15021
  misc_feature (1)..( 3000): 2750-1469P.txt file - cDNA_ID_2035675; gDNA_ID_2684254; Annot_ID_138074

SEQ ID NO: 21869 - DNA, 3003 bp, Unknown
  misc_feature (1)..( 3003): 2750-1469P.txt file - cDNA_ID_2035675; gDNA_ID_1972137; Annot_ID_179139
tcagaggtaatcaattttttacttaaatcgctttttttttcttactttcggtgtatctactacgtgtgttgtttgctggttatggaaatgaatgttgtacgtcacgttatactatagatatatgtgtgtttgtgtgtatgtataacggaagtatttgtatccgttgtggtcttggacttttggtttggttctaagatacttatttttaaaaacttgtatcgttgagttggttttctagatatgcttaatgggagtatgtgacgaaaaaaaagtatgatttctgtaaggcaatgcatgggtttggaaaattcgttttctcttgtcatgtgggaggatttgaatttaattttggcttatttttgcaattgtgtgaatgagaccaaaaagagacaatgaagaagaacaggaaacgtaccaaagatgatgtgtatcattaattgatttagtcgggttctgtccgggggaaaaacaaaaagagacaaatttgggattctgagcttcgtacgttgatgcttctctgactcttttgccttgtgtatttatgtgttctgtagaatctttttcgtgtaacgatttacatatattcaaatattttgctttatataaatttgcatcatggactggtatgaggtaaacatcgggaccaagactaagatataaaggacgtagccaattagttttttaggttggtccatgaaatttaacatggtattctaaccagagttttattttgtaagtgtgttatgttttatgtgttgcacatgagcacgtccttgatcgaagtatttaaaatttgttattaaagaaatgtgtaaatttatagggatgataagtgattgtgattgagattggtcatgacgaggaacatacgtaattgacgtcgtatttgtgttaagcttgcatcatgaagtgaagtacgtcgacgttattaataattatgatcatttagtactacttacgtactattgtaccctaactgccatttcatttgtcttttaacatttttacctaagtgacggtcatgtgaattgtctagtagactagtactgactcctcttttggctttctctatagacaaccttgaatttaattttaatttatgttaattacgtcttcattatcaaaccaaaaacttagaagatttctaagttttgtggagacttgcaattagggctcagctggtcatgttgttagagcgacataaaatgagatgaattttattagtttgttggattctacaaagatattggactacctaccatttgcattgaaaagaatatcccaaaagagacttttggttttactttagggatctctttttattttattttatttttttataaagaagagagtattgggaaatctttaaaggcccaaaccaaagctcagccatatttctacagttaagcccagccatttttttaccaaagaatgctaatatcatttttcagcaagattttattgaatcattcaactctctaattattgattagtcgcggtattaaaattgtgcttccccttttggaaaaaaatagagtaactgttcaaatccttatcatcctgattcaggatattaaaccttaaatattgtttgtcaaactcaacttctatcaatcattttttatattgttttaatgttaaacaactgtccatctatcttatcaacaagaagaagaatttctagccagacttataaacttgcacgacaagacattcatccttttttaattaatgaacaagagtaacgacttttacacttctcttgtcacaaaattattgaacagtatttacaagtattttataaaaattgctattggttgatatttttattggtgcatgtcaagatatttctggcaacaatcattagaacgcgaccataacatgtgctgcaatttgacaattctttatatctaaaaaatgacaatttgacctcgttggaatcttggatttgtttctcccaagcacaatatgttcgagctatcgtaccatttctgaaagtgtaattataaagactgcaatcatatatgggctcgtggagctaaatcatggcctaaagtttttttttaatcaaatggattttgaacttgtggtaaagttttcggatctacgaaaaattatgcattcttaatcaaacctctaattcgataagacaattgttttccaacaaagaatgtgtcaaaactcaaaaactcttaacaattgttttgaatgttttccaataataccacatcggtttatgtatcaattaatattccaaaagttgatactcccaacgatattcctatgacctagaatttgatccatatctcaaaattttacgaccgacaaatatattaatgttcttttattttattttatatagattaatggtttagtcatctacatgtattcattaatacacctatatactgtaatattttcacgaaacttttaaacatttacaaaaaatgaagagattaactttgaaacggaagagtgttaattacttaattatgtatgttttgtttgtttgtcaacgaagagtattatttttttatatactaatatgaagacaaaacatataattccatgtcacctcgtaatctcgtatgttgtaaaaaaaatatctctatccaatagtatttcactacctagtttaaatcgcattctctataatacgttaccatattccccaaattacccttagctatgaccatagtcgctggctcgctgcaaaaagtgaaaggggtatataggtaaaaaaggataaattaacagagagaggaagggctttggcgtggaagctcagcttttctccgagtcgggaaaatgtctttttctcgaaagaataaatctttttctcttctctctgtgttaccctcttgaaattttccgcgaaaaatctcaacttttccatctgaaaaccccccaaaatcaaacaattggatcttgatttttagctgtgatttagtgattaagaggcttagggtttgtggcgaaatgttggtacagagaagagtaatg

SEQ ID NO: 21870 - DNA, 3003 bp, Unknown
  misc_feature (1)..( 3003): 2750-1469P.txt file - cDNA_ID_2035703; gDNA_ID_1972105; Annot_ID_178715
taaagagtgttttgtcggagattatttttatttaattggtgatggtttatatgaaaatggaattaaaaaatgacagctaagacataatggagcccacagatgggaaagaaatcgaaagtggtcagcttcaaacatgtgttttgattcccgtggattcgattcgttcgttgtccttcttatggggtccgccattcacaaggcctattggcctatgcttgcctttttttaagactattttcaatttcttatattataaaatgccgacaaatactaattgaattcaaataaattttaaagtttaaacgaactaaaagtcctggtctgccatagcattttcgtactatacttcccatgtgcccctgtggccttgtcttggctctaaattcatggattattgtgaagtcaatagataattagggattcatgttaattcaagtaattgtgcgttaaacatgattaccaattatgtaattaggaaacattccttccgatcaatgattataatatagtataatgctgggaataatttaatctagtgctaatttttttctatgcaggtgcaaatgctaactaattcttatgtgtattgggttatataatcttcggtggggagggccaaacacgactaactcaacagtaaatggtcaaccatatgtggtatgggcggcggtacatgtcatgcccatttcgtcgaccctaaaatatggtaatgtagtattttttcacaaaggagcataataataatagcgttgataaataaatggctccatgcaaattatatataataaaattataacagcataatgatcatcaacatcatttattgctaaacatcatcatgttcatgcccccatgcatgattacgatggaagaatctgacataaaaaattgaaggtccaaattgacaacgacttcatcttaatcttataatctacatgtcaagaattttatataaataaaattgattaaatttatataggtgaaaaatttcatataaacgtgaggaggaggaggagaatgagataaaagggtccacctgggcccaaaaacaccaaccctgttgagagatgttaggaccctcgtgtgggctgggcccagtcaaaaatcattgtcttgttgtgtataacaaacattacaggttcacacgtgtgacacactaggtccttaaatgctatgaatatatgtgatctgatttgttttattttaccattaataagaaggagcttaaatcgaacaaaactgaatgataaaacaagatttcaccactgtatatatcgtaatacaataatacatgctgaaaaatattaaggtaaatgtgtagatgtagagaacaacatggcttaaacacaaccaaacccataaatttattattcatggatattggatatatgcattatatgcattattataaattaattgacctcgtattaacatttttctagaaattggtgcagggggtgaatcgcgtctacatctatgtattttactacatccccgtctgtaaggattcactggttgttcggagggtgcacatgcagaaggataccgatgatgatcacaaggaagatcaggcttcaaccctggatacccaattacttttccaaccgtcatgttcatgctgcttatgaacacacatgctatgaatgttgccactagcataaacctatttgttattttcatattgctcatgatttgtgtttatttatgtgtgtgggagaaatatatatttgttggtaagaatggtacagttcgtggtatttatagtgaataaataattgtgaaagagtcttatacaacttttacttaaaaggaaattacaataggatgttgaattgaccggtagaaaatgtacctacagaattctttagtaatacatgtattatagatatagtccttttttagccaaagtagtcaaactagcttttagatatgcatgttgtggtcatagtaatactaatacaaaacagttttatagccaaagtagtcaacaatatttgagttctatgtactcttttttttttggtcaaagagttctatgtactctaatatagtatatcaatatattaggtttcatgttcttccagtacatggaggtgaaaacaaagcacttttttcttacagaaatttttttacatcaataatatgcaaatatcataaactaataataattataaatacaccaaaatagtgtgtcaaaattggttgtagacaactattagaatgaacacatcgctgggctttttggtattgggttcaaagtatatataaaaattcatgctggttctttatttgccgcccaacataaattagttggacaagtgagaaggccttgctactcctacatgcgttacactattacagtattactattgcttcatagaaaaataaacctcgtaccaaaatctcaaataagtgtttcttgtggttccttatgaaaaattgttatacactattacagtattactattcaccgtttattgtcggaactcggaacaacgttttcaccgtccaattgttatacacactattcaccatatatacattaatacatcacacatcttctacttaagagtgtagtgtacattaatgataattttgtaattaacctttttaatgatggttaaaatgtctaattaataatttaatagtgacttacttgcttacgtggataaaagagagaccccacacaaaaattagattttgccgtctgttaaaaaaaaaggcttcttcagccgatttctccaaaaatcgtttttttttttttttttttcatcttccgttcaacgttttgcgttcgactcttccctgacccctttcaattttaaaccctttttctctgtctctcttgtccgaatcaaatccggttgctggaaaagggaagctttgtgcttttgtcgtcgtggtgggggaagcggaggataagaaccctaattttttacgaatcgtgagatctcctaagtttctgaatcgggtggtggcgattttgtttctttctccgcgatg

SEQ ID NO: 21871 - DNA, 3000 bp, Unknown
  misc_feature (1)..( 3000): 2750-1469P.txt file - cDNA_ID_2035731; gDNA_ID_1972105; Annot_ID_178703
cttcacaagtctggtggagttgtagccagggtcaaagaggtccgtaaaagatcaaggaactttaagattcaggtaaaattttcaatctcaaatcttttaatatcccttttttcatgcctttggaggtgtaactcagaactcaaaaactgaattttccaggaatatttttacggtttatcgaaagaactctctccgtatgccaatacatcgagtttcagtgatctgcaagtgttccgaattggtggtggaccacaagcgccaaaatcggctcttccagccgggtctacctcggtttcaaatccgttgcgggtgacgcctgtaaatatcgatgatcgggatctgctgcattctgttcttgctgtctcatacgcagaagaaccagaccagatcatctcaaggtaatctctaaaagttcttgctgtttccagaatcaaaggctttcgtgtatgttttcttcgtgattttgatatttctttctctctgttttttctttgatacagcaatgtttctgggtttgtgtatgtgacggaagttaatgtgcagaagaagaagataacgtatttagcaccatcgcctgggacattacctagcaagttgttggtcgctggatcattggcatggcttgagtcagtatgacttacttagagaagagaggagccatgttttttgcttgagagaatgatgcagcagctcgattatgtaacgttaattacaaatagcctttttcttctttatcaaatgcacaagtttttgagtttaaaagatcattattgcggaatagatggttggttgtaatttgatgttatgaagtgagcaaaaaataatgttgatttactagtgcgttagttctgtttgtttggttcagcatattcaagtgatgtgtgtagcatttttaaatttgataggtcgaacatatcttatgttattggatgatttcgaaatagtatatgataatgttcaaagtcacacatgtattattattggttattaattcaactaaattactatcacattttaagtcacttcaattgtattgttgtataagctctgtatttagaatcggatccgaagaatattagttggtctgtctaaccaagtcgcattaatcttatatgattctcctagaatagaaaagaatattttattcttatgctaattcaattgaaagataattaaaacggatatgttttgagttcaaaatgttaaaattgtcattcatttgcaatagacaaaacatatttagaaaattctaaatttacatgctacaagatcttctatatgctttaatagcctcatttttttttttaaccctgcacattaaatacagaaaatttcaatcatttgactgatgattagagatttatagatataagaagaaagtttcacttatcattgtgaatatgataaaacaagaataataaaaatatcgtataattaacaacaagaacaacaaacacaaaaaaaaaaacagaaagaaagaaaacaaaaaagagctagtcaacaatcgtgattcgtgatacaacgtgctagagagacgaccagatgagatagggcacgtgtcgaaatctataccgttacttttctaactccgtgctcggaattcgaaatcaacgggagacacgtgggttccacaatggacgttatttccatttcatgacaatcgagaaatagttaaataaaaaataaaaaatattttctaaaatgaatacaaaatcaattcgaattttgctttggaattagaatcatttttaaaacatatgaatatagtagtacaagaattttactgagtcaatgtccaattatcattaaagatatttgactctaatccattctctttctctaatttttctttaaagatattatagttaatcacatcatttactttaagagaaagatatccgaaaatcagaaaatgttaagatacattatctaatttcctttaattgatacggtttatgattttaatcaattttctatttgtacgaaaaacagtaggtataaagtaggtccactagtaggacccacctaagaaactcttttttaacagagggctctgttttttttttcttcctctcctctgaaactgcgacgaccacatctctgttctgtattccacttatgtttttgtgtttggttttattttccccagaaattgaataactttagcttttaagaataaaaaggaaaatttaaaattgaaatttggtctccttgagaagtgaataaatgaagaaaaaaaggaaataaaaaggggtttttggtaatatttaaaaattgtagaaatggtggtggtgggggaattttaagtaaaagcaagtctaaactcttccccacccacaaagcaaaagtcataacctttgacacttttttatctcaccatctctatctctctctctctctcacaaagaamcaaacaagacaaatctttctttctctttattttatcctaaaatttcctatctgatttcttcctcttgagctaaatttgttaccttctgggtattcaaaaagatctcattttttcttctagctctaaattttcagggagtttctttcttcttcttttgaagaccctttgtcatgagctaatttttatcctctgtgtgttgagaaagatctcattttttagctttaggattgagggagtttcgatttttacttagcacttttccttggaagtgatttggtggaactcatggtgattggtttcttcctagggttattagagattgagttctggatttttcacgcgccttggatttgatctaatgtactctcttttttcatgtcttaatctggtttagatttttattttgagatcttttgttatataggttgcaagttctgtattttgttaggctttttagtttctgtgttgattatgattctcttggtctaggagagatttgggtgttgttaactgtttgagtttgagaattgtgaaattaggttttttttttttggttctctgatctgaaacttgggtagaagaaaaacatg

SEQ ID NO: 21872 - DNA, 3003 bp, Unknown
  misc_feature (1)..( 3003): 2750-1469P.txt file - cDNA_ID_2035738; gDNA_ID_1972105; Annot_ID_178702
agaatgtttctaactttgaaccaatctctgttcattacgttccaattttgaaatgtcagatgaaaaaagagttgtgaacttttagaagattatattttgttatcgctagggtatagagaaagctgagattttacaaattgaaatgggtctttgagaatctgtgtaatagagaatctgtttgttttgtctttggttggtggatatgtccagtggaatgggaagagaagttgttgaggtgcttatggaccgaaacgccgacgtttcaagcgctagagttcatgttgctcctaagatagctgcagaggagactgatgaggaatttgaagtcaaagaatgcacagaggagaagtctctttctgagaatgcaccaaatgttggatctgctgagagagttggagctcagaaatcacctaaaacccgtaatggaaatgctaaagtttcaaaggtaaaactaattcataagatcttggttttgagaataacgctttgtagatggtatatgattgaggcctaaatccgattttgacccgtttcttaatgttttttttagcagcaggatgctcctcttctcgcggtgaggaagccattgcaacccgagaacaagaagcatattgatgacgaagataattgctccattgcttcttcgtatccttttcccatctctatcattttatacttgatacttatgtatggatgtttatgtacacgatgcttaacagaatcgatattgtttccttaacgttatttaccacagcgttgcaacttccatgaggatgggtaagtctggattgacttatggaagtgctccaacgtttaggagtgctcaacgtgctgagaaacgcaaggaggtaagtacatattctatctttctgcttccacatctcagttatagatcacataagctctttaaagccaacaaaaactcataatcagaaacataatctgcattaaacgtgtagaattcactctgttctgtatactgattggaatttattttgtggggtctgcttggctcagtattaccaaaagctcgaggagaaaaaccaagcgcttgaagctgagaggaacgagcttgaacagaggcaaaaggtaaagtacacatttccggtagatgcagtttttttacctgattctagattggttgtgaaacctcatagatttaaatggtttgcaggatgaacaagaagcagccttgaagcaacttagaaagaatctcaagttcaaggctaaacccgtccccaacttctactacgaggcacctcctgcgaaacctgagctcaagaaggtatccttcgaaccaaaactttatctttgttcagagctcagcattgttctacttatgtgccaaagtaacttatgttatgtttctttctagcttcctttgacacgtcccaagtcgccaaaactgatcctttctcggagaaaaagcttcagcgacgcagtcagctcgtcttcccgtgaagagattctgaagacagtctctaaccggaaccgacacagcactggaacagttcagaacaaagacgatgatcacaggaacaagaacaccaatgctgcgcacgacagccctcgtgtcagatcaggcaaaggtaaatccggattgaaaccagtgaacgagtcctcagaagaagcttgaaatttcaaaagatgatgctttgttggtctaacttgatcttgccggagaaaatgtaaaatcaaagactctttgtttttcggttatttccggtatacgtttggttcactatgtaactgtcttttttcgattttaagttttaacatgaaaaactttatgttgattgttgaacaactcctcctaatgttgaaatttgtaaatctgaatgctgttggatttaaatttagcagctaaggttattttcagaaataatctctaatcgaattatttacggactgaaaccggcatcaaacatttatcctaaaccgaaatagtcctaacaaacttctgataaaatccagagagcaaaccagtggaaagcaaaaccggcatcaaacatttaacctaaaccggtaaatcaaatatagaagctttaaaaaaccaaacctaaaccggctaaaatcgatagacctaaccaaccactagcagtttcccggccgccgcttgaatgatgaccactgcggtgcgttccaccgccataaatcggaatcggacgtaatcctcctcctctgctagaactccctcctccgcctctgctagaacttcctccaccgcctctgctagaactccctcctccgccgaaactgcgtccccctccgccgaaaccgcctccacctctgcctcctcctccgccgcctttcttaacaacgactgttaatttcggtaaattggcttcgattacgtcaccgtctggcttcaattctacttcttgaaacgggagatcatcatggtttggatcaacgaaggctaaacttgttgaagatcgcgagaccgcgtgagcaaagtggtgttgcagttgcaggtggagacagagaagaaggaataaaaacaaagatgctttcttcaaatccataattcgtttcgtttcgtttctttctttttctgtgtgacttacaatttatacaccgaattgtttataaccgcgtgactatatgactattctaatttgaatatctgaacgcgtattttaatatatccgactaattacaaaatatatcatgtttagataactattactatctgagacccattttcctgtcggcttctgagaaatatcaaagatggatttgtatacgtatataccaattttccataaacaatgctacaggtttcgttaaagaaacgaaatgttatcaatcatgcatgatttcatacttttgattatcatatagttttgttatgaaaatctttagtagattaaggaaatagaatttaaaaaaaaaaagagagggtaaaacagtaattttgtgttccgaaagtttaaaagataacagataatccgctcacactcgagcaaatttatcggagcctccctccaaaattcaacaatg

SEQ ID NO: 21873 - DNA, 3000 bp, Unknown; identical to SEQ ID NO: 9365
  misc_feature (1)..( 3000): 2750-1469P.txt file - cDNA_ID_2035748; gDNA_ID_1972105; Annot_ID_178697

SEQ ID NO: 21874 - DNA, 3000 bp, Unknown; identical to SEQ ID NO: 9364
  misc_feature (1)..( 3000): 2750-1469P.txt file - cDNA_ID_2035756; gDNA_ID_1972105; Annot_ID_178693

SEQ ID NO: 21875 - DNA, 3003 bp, Unknown
  misc_feature (1)..( 3003): 2750-1469P.txt file - cDNA_ID_2036236; gDNA_ID_1972138; Annot_ID_179191
atagtattatggttttttttatataacaattgttagtattagataataaatagataaattagcattccatctatttataaacatttccattctattatttttataaaaacatttttttgtaagttattacaaacaaaactgattctctaaaacattaaaatataaacaaaatgattgtttgtgaacttcttgcatttttttcctaattcgtttttcactgttggaaactttgtgttacaaatattttagatgtatgagtaaagtccgcaccaacatacatcgtgtgtcgatacaggcaaagtgtacggtctgacatatacggataataaaatatgtttgtataaattgttagaaagagacgatccattataaaaggtaattaaaataattttattcctgtgggaaaggaaaagaaaaaggccgcgtggtccaagtcagtcctcatgaccaatcattatttaacatagtatgatttattcatatttaatataaaaattattagagctcagatttgttttaaaattagtagtagcttaaaatttaggggttttcagaattagtctgaacaccaaaaaaaaaaaaaaaaattggttctaatgtggaattggttgtattgaataaagttgattgagaaagacacacagtatatgctaattatggtttagctggttgtttaaaataatagagtgattagttggtcgcttactgacaaaacgacagtgtctgacttgcaaaactggaatgaattttgtagttttccgttgaattagcagacaattttcaacttaaagatgtttactctactttttttttaatttaaagcaaaattcttgtaatgtttttttttattgtatcctctttcatataataatttttaaatcctgtaacgaataattaaagcaaaacatgttgtcactacagtaatccgtacataacaaaagcaaatatacaatttttattaggataaattaggtatctttgattttaaaaaaactatattgaaattataaatatgctttcattttcaaatataaaaattctctaacgataattatactgagtaagaattacaaaaaatgatttaacccttgaaaataagtggaaataaaagttttaaaaattaaaacggagaaaacttaatacgaaaaaaatctataatcattgaatagtgaccttcatataaaagaccgtaaaaaaaaaaaaaaatgcgtaacctatattcacgatagtccttactctatttaatttccacagtaaaaaaaatcgtataaactattttttgagcattgctcttgagtaatacatttaggttaccaaatcatatgaaaatataatagtttctctctaattattttctcaatattcttaatctgatttcgtatttatattaattgtccagactccagacaaaagggatgaatcatggctggatttagctgtcctacctgttaatatatctctactgtctagtaacgccaaaacctgacagttagtgatatatattagactaattagttattccctaacccctgtttccaattatattactcacatatatacatgagtttgtgataattaaacttgatctacttaaacgtaggtgatagacaaatagcctaatgttttttgttctctcgcatcttttaccaaataccgtgtggtggattcaagttctccatagaacattttaaatgttgacaagacaagaatctattggattaaacatacaaatgggaaaatttatctattgaaatgttatttaagttagataaatgcatcaacaaattgacgtatatgtacttaactgatatatatatatatatatgttaatgtgtatatatatatatatatatatatactatgttaatgtatatagttatagttgcaaaagaaaaaagaaagtgttaaattttggaatgtgaaatgttggaggagaagatggagagagtgtgaggtgggtcagtgctgcttttggctctttcattacattagtcagattcccatatgacatgagactttcgctcttcctcagaaatagatcccttaatattgtattctagaagtatatttgacataacggaatcaaaagccaaattgaagagctatgtggacttttctacgtaattaatttaggtcttaatatacttagtatacactctcaaaatgctagtaattaatatagcaaatgacgaatatgtagattgatgatagttcaactagtcatgtaatgatgtgaagatacaaacataatatgcatttgaactcaaatcctatcaaccataagtaacatttgggtacccatatttataccaaaacgtaacagccaattaaaaaatctggtaaaatttcatagaaaacgacgtaatcgtgatacctttgtttactactaatcttgatactttatgatttacatccatgtgaaaataaaatcatgtagaccaaaaatttctcatacaaaaacattaaaaatagaaataatggttttgcaatattttgttaaaacagttaatttttttaaaaaaatacacacgtatatattcatagtttatatactttataggcttatagcatagttcaatagaggtacagacaaactgaaaagaaatgaacctaactatctgtcttcacctcgattatttgtcgtctgtctgactattttaatttaattctaataatttatgaatgtgactagtttggcttataggcaaagatcaatttttagagtggggttattgaatattgtattctaacggaattgtatgtattttcaaagacacggtgacatccactgtcattcaatttctatttgattttgttacatttgagtttcaatgtattattttgtctaaatcacgagtaaaacaaatacgagccttttatctctgattttgatgtatttctcataaaaattataaacaaaataattattcccaaaattgttttatttctctttcatctaacaaagagataaagaatcagaagcattttgagaacaatataatg

SEQ ID NO: 21876 - DNA, 3000 bp, Unknown; identical to SEQ ID NO: 9506
  misc_feature (1)..( 3000): 2750-1469P.txt file - cDNA_ID_2036242; gDNA_ID_1972138; Annot_ID_179189

SEQ ID NO: 21877 - DNA, 3000 bp, Unknown; identical to SEQ ID NO: 9510
  misc_feature (1)..( 3000): 2750-1469P.txt file - cDNA_ID_2036267; gDNA_ID_1972138; Annot_ID_179183

SEQ ID NO: 21878 - DNA, 3003 bp, Unknown
  misc_feature (1)..( 3003): 2750-1469P.txt file - cDNA_ID_2036273; gDNA_ID_1972138; Annot_ID_179182
aaatgctcgttaacttcacaaatatagtcatttctatttatcacattccgagaaattatgattacttgaatgcattaatgttaaaaatataatgtttgttgcaatgctaaggttttttttttttcattctaaattttgttcttatttttttctctaaaaaatgagtagaagtaaatatagccgagaaaaagattgcgatatatagaagcaaaagtcacctttctatgtgatcaaattcacatcgatgtttggtaattgatttgctttaatccaacggtcccacttttacatcgacttcatctactatacatacatgcatgggtcttccaatacatgtgtgtagcgttatatacataaacatatatagtgacttgtataaaaactaaatgtaaataaaacataacaaaagtaatggaacagtgatttagtgatgtgtggtaactggcgagtgctttggacatttttgtataaccgaaggtttaactaatcaagattaaaaaaaaaaagaaaattaatcaagattataagaaagcacaaaaaattatcaagattataagagcaaccccatcggttcaaataaaagatatcttagctatatcttagctaataaactgattaaatttaataaaagcagctaagattagttaagatttatatcttaaccaagatattttcttaagtttaagaagtggacaggtgttgtgtatttattgggtacacaaataaacaaaagtaaggaaaaaaaaaccattggaacataaataatttaaattttttcccttaagaactttttgcttcttaaccaatggagcataaataaattaagatattctctaacttatcttaactttgaaaaagcaaaattttaattttaaaaaaggttaagatccaagattaaaagctttaacatcttaaccattggggatgctctaaaggaccatgcatccagtatcttatgtgttggaacaggtgtatccgtatatgtatgtaactatgtattatgtatcgtaatttgtacgtaagcttggtgccctggtctacagttccctagttaagattctattttgacaacaaaattgatgattccaatcatccatatttgttatagggagaaattgagcatgctatatacggtgatatatatgatatttatttaatatattgaataacaaacacagaactagtgttataggtgcaggtatgtaaatataatgtgataaacattttttatatagattggaaagaatacgagattgttgttgctctgttagaacgaacaaacagaactagtgttataggtgcaggtaaggtaaatataatgtgataaacattttttatatagattggaacaaataaacatttttctgttagaacgaacaaaggcctgtcaaaaagaacaaacctgatgtgacatattacatatatgattataattgattattgtatatatagtattgcatgactatctttacaagatttcaatacgaaaataaattaaaaggagaaaatttataaacgaagcgatttcattctcggtaaggttttccgatatgtctcctaactaaatcaaagccttgtaattgaaacttgtaatgattgttattctatatatctttgaagaaagcttcggtattggacgtacttaatataattggattttatttaaattacaaaaatcactgtataattcggctacatgacttaatcaattatttcacgttgaaaacaatactatatcaacttcaaatacactccttgtgtatggattccacaagttcttttctatctatagaaatatagaatccacaagttctatctacttttattagaattttttattgttcgttgttgttaacataattataagcaataaattcaaaaaaaaaaaaatctaaaagacacaaaatttccatctttgatagggcttcggaatcattaattactttttacaaacaaaaaagaagaagatagggcttcggaaattattagaaagatggaaggatattgtattaaatttggcttcatattttcctttggtttgcggccatcaagtactagtactactcagtacccacaggccacaggaaaaaaagtagtactgctttattaagtgtgttacgataaatggaaagcgttttagtatgtgattacaaattgttgtatgtgatcattaattagttattggtccgacttctaagtttaaatattttcagaattcagttagtttaattatacatgttagacgaaatgactctttttgagccaatatataatgtatctgaatttttcattttgaaaaatctttttataaaataataggtcaacctcgaattattataataaaataaataatttgcgttactatgaaaattaatttactgaatacagtatatagagagagatagaaatagaggaaaacagtggataatacatgattagttgatactcatgtgcagcgagtctatatatattatatactcatgattagttgatacatatgtgacgattagttctacgaatcaatctctagttttcgtcttaaaatcatttggttttatagaatataagaaacaaagaaaacaggaactttcgcgggagacagaagggtacgtgaagagaaaaacacataaaagtgataagggcttaacgtaataatactacaacaaaacctctctacgtacaacgagtaataacacatgaaaatagaaagtcgatgagacatcgttttaaggttagatcgatgaagaaatatctcaggccccacccctgggacccgacccgacccgacccgacccgacctttgtctcctctccttttaaaaactctccattgcttctttgtcttctctcttctataacataactcaagaaattaaagaagatagatagagagagagagagagagtaaaaacctaaagggtgatatacttatataaaaattaatttaagattgtgattaagtggttcactatatttaagttactttgaggagctactaatcatg

SEQ ID NO: 21879 - DNA, 3003 bp, Unknown
  misc_feature (1)..( 3003): 2750-1469P.txt file - cDNA_ID_2036309; gDNA_ID_1972138; Annot_ID_179197
gcattgtttattcacaaaagaatcgatacagaatggggctcgtgtcacatatatacgtatttgggtttagttaacttatcaaactttaacatatgtcgatacttccattctcttatcgatctccttgcattgatcttttttcttcattgtttccaaagtttcacatttaagcatatagctagacatgtttcctaaagcagatgaagttcatgaaaggatgctcaaaatgttgaccactaattaaccttgtacctttgatttcttgatgcatgctagacaaatctcataaagttaaattcaccgaaaacaaggataatccacaatttagcgcattgacagtactaaattttgtatggctataacaccgcaaactttctaccattatataaggaatacctggctactaattatatttttacaatgagaatagccaaatgtataaaagagtgtattaaggaataccaaactactgtcatgactatcgtctactttctatcctagaatcagtgagccagaaagaccaaaaaattacatttcgctataatatcaagaagtaatcagaaaacttctaaacttttaggcataagataggaaaacatcaaaagttaaagggtctaaataaatcagacctagctagttagagggaatttctgcgagtcgtgattccaaacagcttaaactataccctgttcgattaacaattaacaagtgtattttacaatcagtcatgtagcaatatagaatatttcataactaatttaaatcaatactatttagtacagtttttattatctcgctgtgtaaaaataaagaataattaaaatttgatatacaatgttcctaactaattttctatacaaatacataaatattcacatttttacaatgatcatcagccaaatgtacaaatgagtgtggattattttatgcatgaacacattcatgcatgcacacgtacgtatatgtataccacctacatagaaaatggctatatttatagaaaaagaagagatggcttatgtggcaaattagtgccaaaacacaacttttgtgaattgtgacctcaagaggatttggtcgttctttactgcaaattgtttgtttatgttcattgttctaggagagtcttctattagaaggggcacatattaagttgagtgtgtgtttaacaaatgttttacatatatatatatatatatatatatgtatatatatatataaatctttttctttataacttacacgcacattaacaaatttgaaactaagttatgacatgatagccgtatatcaaaaactaatttatactatttattatgaattcttaaccaacaaatcactattagttggttttataaacttggttaggctttcaattctaaaaacaaacatcatataaatagaaaagataaaagcaaactgattcttgctatttaagaacaaaacaaaactatttacttattagttaaatgaattttataatctaccttcgtgaaaatacccatttctgatattcagttataataatgattaatccctcaaccaatagggagttggcatttcgaaagaattttatatcataaagcttgtacaaacagataaagaatcaaggatgatttgattattatgacttaaatgcatattttattaaatcaatgaataagagtaagagcactcttggaaaagtggtcaaaatgctacctgtttaattctttgtaggtgtagtagtctaatgcctaaaaaaaaataatttgtacaaaaatctgaatacaaaaatataaaccaaatattcttttaataattttatttcgtttattgatttgtttagctaatctattgattttgcttattaatttgtggggtatcttaccaacttcctccacaaagacaaactagcttcaaaagacaaggtagtcttttatcttccgttgtcgacttgacaagtactttataaataaataacaaaccgtcaaattggcgaatcaatcttgagaattagtgtcgacataaattttattattgtacattatacaatttagacgataaatagtccaaatccattgtcctcgagcagggacgactctaaaatatgggaggtccaactgtccaagccaaagaaaatgtcttttggatatttgtagatagtttaaaacaatgagagaacatttaaaaaaattggggacaatgttttggatatttttatatagttttaaaacaatgagagaacatttttaaaatattttttaaattgaagacatatatttacaaaaataaaaaatttagtgattttagacccatatttcaactcgtagaggatgaactgatgcatgattagaaatttagaatcctgaccttaagtcacttgtgtttttttgctcaaaaaaaaaaatctgattatttatttttaagcccaaaacttagataatcctttacctttttgctttgaaaaagttctgattaaaactttgtgggcaattttcttgaacttcatcactatttgggctttttaacaaactcacttatggccagttttatagaaccggcgtcgtatgatacaagcccttgcacgacagcgtatctatgaaaaataacaaaaactgaaagaacaaaataaataaattaattcggacaaaggtttaaacttaaacccaaccctggtttcttcttcttcctcagtgccgccgtaaacaagcttcgccgtcgattttctcctcctctgaagaagaagataatttaatttctaaagtaagtttgcttctgattccgttaatagtctctatttcgaagattgtagtctcttaggagaaaatcttagtaagattgtaattttgctctgcttcacatgatgggcttaaacgatgatgaagcccacataggccattctgcaatttgagacgaaatccttgctttcaaaatatatatacattaaacctttcattattttgctcttcttctccttcttcttaaaccctagtcatcgagaatccagtaccagtaaccatg

SEQ ID NO: 21880 - DNA, 3000 bp, Unknown; identical to SEQ ID NO: 9816
  misc_feature (1)..( 3000): 2750-1469P.txt file - cDNA_ID_2036339; gDNA_ID_1974075; Annot_ID_180371

SEQ ID NO: 21881 - DNA, 3003 bp, Unknown; identical to SEQ ID NO: 17496
  misc_feature (1)..( 3003): 2750-1469P.txt file - cDNA_ID_2036371; gDNA_ID_1974075; Annot_ID_180349

SEQ ID NO: 21882 - DNA, 3000 bp, Unknown; identical to SEQ ID NO: 9571
  misc_feature (1)..( 3000): 2750-1469P.txt file - cDNA_ID_2036400; gDNA_ID_1972155; Annot_ID_179463

SEQ ID NO: 21883 - DNA, 3003 bp, Unknown
  misc_feature (1)..( 3003): 2750-1469P.txt file - cDNA_ID_2036698; gDNA_ID_1972168; Annot_ID_179801
aagaagaggctgcaaaatcatatggaaacaaacaattgaataccgaatcgaaacataaattagataccaaaaagaaccaatctttcatgaaattttacgattgttagaagttagaacctgttctacatgccttgaaaaaacgcatcttttcaactagattgatgttacaccgatagtttcttcataaaccacattaaagatgctatcattcttacacatagctaaaattggcaatctaaaaagaaaacaaggtcacaccaaatgcctaaagtttgctcttttaaaaactaaaagatacagaatctgcctttatttgtagaaccttgtcaaaactagcccacgataagaaactagaccacgattcaaatactattgagctgataacggtgatgtaatttggttgcaacacgatttcaattgaagaagaagaagaaatcttaaggaaggctctttacctacgaagccaattgagaaaagcttccaacaaacccattgatgatgatgattcacaaaagctccgacaaacagatccgcctgagagaattctcctccacggatctctctgagaagcttcttgtcctcgttgatctctgtcgatgatatctctctctctctctgtccagtgacggcgaattaaaagagtcaaagacaatgaatttggaccgttcgattttttatctggtataccaaatcaacggtacagatcttgtttaagtttttggttgatagaccgagaatcatggggttgctatttaaaataaatattttaaatttggattggccaatcagaggagagacacggtgacagatacaccagaagttcggaagaatgaatggatgaattactcaaccactcgcgtttatgaagcgcgtgactaacacgtatgtaccgtccgttgtttttttttggatgggtggtgccgccaaagattttggcggtgatatgatattggatagtgatcgggaagtgcacttacacgtgtcatttccaataatttatgggttgaaaacatatgtttgatgagttcttagtcatgggcctttatttgacccactagtgatgagtcgacccatcaatgattttctcctttttttattttcttgtagtatatgatgtttttgcttacactttgcatttcccatttaggacaaattaacattgaaatggacaaatggtattcaagtcatgtttatcttctacaagatacactatttgctttgtttaaattggggtaagttttttgattaatgaaaaaaaacattatgcttaatcggaataagtaaaacataattcaaaatagctttcacttgctcaaagatacaattatcaagagttggcttcattaaactgtaaacataaataaatgaacagcggagatacaaaaaaaaggtgaagaatgaattggtcaaccactaaagcagttataggtttaacacttttttattgcatgattaattatccaatagttgacaaaaaagaaaaaataattatccaattattgatttataaaaataaaaaaagttctacactagaacatattttaggaaccagagctgtaatttaatactagtttaatgtgtatgtttgatttatttgttaacaagaaatattagtaatattagattttatcccgcggtacaccgcggtaacaatttatctttttaaagttagtataattttttttttcaaattgtatctatctataatatatttttattttatagtttacaattgttattaaataacgtcctgccaaactcatcccgccaaacctgtcccgtaaaaaaaccatttatttatattaatgttgatcttatttatgatatgtttataaatcattgtctaaatatttttgtcgatgcgagatgttgaacctacacattttttgctaattggttaatatatgtttatttttaaaattttgaatcataaaatatgacagaaaaaattaagatttttttaaactctatatattatataatgatgttaaaaaattgtaatatatcaaactttttataagtttaaatattaataatgttttataaattttaaatatataaataataatatttaaaaaattaatatttttgcttataaggtaatgacataataactctaaaagcaaagatttagaagatttaaatttttaattaaatattttcattaataaataattaatctcagtgacatgacattgtaaataagttcaaatacaaaatttatttatttaaacaaaaaaggtttagtaagaataatatttatttaacaaaaaactttgttttaaaatattgttaacaaatatgtttatgctaattttaagggattgatttgaagtttggtgggattaaatttgattgataatgtgattgacaatttaaatcaaaaattttaaataaaattaattattttgaaaaaaagatttaatgctaatagcattaaattgtaaataaatctaaatttaaaatttatttgctaaaatgcctgcaaaaatgtatatataggtcaacaaaatataagtgttttcatcgaattacttttacttgtcgtctaattttctctcatttgttactattttaagccatttttaattgaaagaagtggtacatatatagcattaatgaatgctatactcaaggagaaagtatattaacgggacaatcattaaatttaccagaacgacaagatcccaataaaatgaaataaaaccaaaaaccaactcagatgagtaaacaaagtatcattcatcggtctcgtcttttggtcgcacgtctgaatccatcatcatcatcaaagacctctctttgttcccgtgacagatccttcttaaccaaacctcaccgacccttgtctttatttccccaattctactcctgggtttcgtaattacgttcccaggttcgagctttcttctccggagaatctgaaatcgaacaatttagtgtctttttctcagacattgtttacttctgagaaagcttaggtctttagactctcattacatg

SEQ ID NO: 21884 - DNA, 3003 bp, Unknown
  misc_feature (1)..( 3003): 2750-1469P.txt file - cDNA_ID_2036748; gDNA_ID_1972168; Annot_ID_179789
tttattatattcgcaagtgttataacatgaaaaaaaaaatttagatgtaatggcaatggtctagccaaaatagtaaaaacaaaattaaaaaacttctgtatttaaatactgttttaaaaataaaaaattagatgtaatggcaatggtctagaataaaaccgtattaaaaaactagtttggagtaaagaaaatacggttttattctctgacaaaacatatattctctttattgttattgaatccactctaatttttttggttagaatttaaattgaaaagtatggaccaaaactcatacttcttttttcacaacataaattctaaccaaaatattttttctatatgagtatggacctaaatttctttctttttgctgtatctttacattccaaggttcgctaatgtgttagcagatttttaggctaaaaatgtcttattgtttgtaatgctacctcctataatgaagttcaattctttcagtaagggaagtaataataaaagatgaactgaaaaaaaagcactcaagaaagtccaaattgttttggatttggtcataaatctcatggtgacatttatgaattatctataaaaattctatatcaataaaagttgacaaaagaaattatatatatgtatcaatcaattttcgatttgagataagcataattttattcatttttcatgtggttttaattgttctcacgtatatgtttgaccattgaaatcaatcagttattactgtttggcgcgaccttaactagttagtcatcgaaatcaatctagaagactaaaacggaaatgagataattattaacgtcaagaactttctattcttactaaattcaacgtaccatatctagaataatggattttatcttcactaatctacaattaaatatttgttttttgttaaatgacataaagataggccggagcttctacttctagcatattaaactagccacgacatggagttatataaaatttgaaaattaagtaagaaaatatcaagttgctcaaaaaaaaaaaaggggtaagaaaatatcaaaagagctattaagaatttggtaagaaaaaatcttaggtatctgaaaacatggcaagaaaaaaggaaaaggagaattattcatgtccgaagaagaatatatgtttatgttgttggataaaaagaaagatgatcacgaatattttggagttgggatcttgaccgaagaatgttgggttacttaataaatcagcaattaaaaatgcttcttctttaaactttcggtttctgaagatgagtacttcattatctatatgtattaagataacgataacgcttatcaacattcaagggtttatctatcattttccagacctaccaaaaaagacctttcataataatttcataaagccaatgaaaacaagattaatttttaaaaaaaaacaattgagtgatcgaatctcgtagacaaaaaattattttacttattttttgaaatttatttacatgacattaggttaaatggttaaagaggaaagttttgtttcagtttcaccatgacatgtcagaaatttataatttatgtttccacataatcagcaaatgatttaaattcactatccataactcttttttaaaagtaactcttatattaatcgtacgaacttcgaagcaggctggatacacgattaccgactcagttaactgtctcttatgcatatgatcatgtaatctcttatgcatatatgtaaaaagcttacgacacgtgtgacgtattttacaaatgtgaatggaattaaatattcatcatgtgtttgaaaagtgtaagaagactttactaacctcttttccctattcttttgaccagatttttgcataatatatatgccttattatcccatgcgtgttttatgagttttttttttctttttctgaaagattgtccagagtattttatttattccttttcatttattttgtgatcttattatgttagccatttttgttgattgtcacccaaaaaaagaagctaatatatggtcgtaactcgtaatgcatatgttcgtttattcatttatttttcgatagatcggtggtaccttactactctagattgtggaaataaacaaaataagcaattcaactatgacgtgggatgaggttttctatcttcgacgacattctagaataccttacaaaactacaccattcaactgtttttgataaaatatttggtttagtttcacaggtatactttccattcatatgcacgtgaagaggatcattaggtgaaccttttccgctcttgcatatatgcccaccaccaaaccaagtttatttaaccctcgacgaaatgtttttttctttaatcattacacacacatttatattattgagatatatgacttgactatgattttttcacattatattatatatctttggttggctataaatctactcatattacatgcaaaacatggcgcacaaataaaactttcttcgcactaaaacatacgataagcataaatgttcgaatagcccactcattgtttaatttgaaacattttcgaaattaaatcaaaatgtgtatcgtcttgttctcatccaacggtcaccttttttccgtggtcacatgatattttgcttttttgagcaatcattcacacacagcaacaacatcaaataatttagtagggccgtaaaattataatctaacacggcatgaataaagagcatcttcttatataattattactaactaacataaaactataattcaataattaaaatttgagcgatatatatgactcgttttatgacgccataaaggtagttaactttaccctttataagtttctatggttcacatttggcagcatctcgctatttgtcaactcgtgtatcactataaattcacctaactggcttcatctgctattcatcctcacatcttataattctctatctctcttctcaggctcccattatctttctctattttgcaaatcagtatg

SEQ ID NO: 21885 - DNA, 3000 bp, Unknown; identical to SEQ ID NO: 9676
  misc_feature (1)..( 3000): 2750-1469P.txt file - cDNA_ID_2036781; gDNA_ID_1972168; Annot_ID_179779

SEQ ID NO: 21886 - DNA, 3003 bp, Unknown
  misc_feature (1)..( 3003): 2750-1469P.txt file - cDNA_ID_2036810; gDNA_ID_1971867; Annot_ID_58444
aggaggtagagagagaaagttggcgggaaaaggtggcggacacttcttcttcttcgcatcagacaagagtttgcgagaaaagggtttaactttgggccgaatattgggcttattaacccaactcatcactttaggtttatccaaattaatcataacattttgggccgatttgataagaaatcaataatataggtccttttgtgaaagaaaaaaaaaaaaacgaagagcacaaagtgaaatggggaattgttttttgtagagccctaaatagaaaatctccaactgtagtgaaagtgaagaagaagaagaagatggtggagatctgaaaatatgcgatagatctgacgaatgcagatctaaaatggtctaattctataccaatctcctctctcattgtttctactaagttcaagttggtgtactgatcttattttgtggcggtgtatatacagtcatctagaggaagggagaggatgatgatgaaggaagacggtagaggaaggaatccaccgtcgcgacatctttgggttggtaaccttcctcatgggatacttgaacgagaattagccgatcggttcttaagatttggtgaattggaaagcttagcgtttcagcctggacgaagctacgcatttgttaattttaatcacgatgaggatgcgttcgctgcgattgagtcgcttcaaggcttcccactctctggaaacccacttaggatcgagtttgctaaggcggttagtgttgaaaactcctttttttttttttttttttccaatgcttgcttaatttggcttggtttttgagtcttgaggttgattagagatgacatgaactaacttattaggagtgattgaaagttatcagttagtgtgtcttcaatagatgactagttatgtgattacttacacgtaaattagttccagtcagtaccattctagaaattaatgattgttgactacgcaaaggtaacaagtctcttaccttgttctggataagttgttactcggatgatacttaatcattgtctaagtttatagaacttagcaatcagtaccattctagaaattaatgattgttgactacgcaaaggtaacaagtctcttaccttgttctggataagttgttactcggatgatacttaatcattgtctaagtttatagaacttagcaatgagcaaaacaaacgaagatggtggtatctcatttttgtctcctcttcataggcctcacactttattattacaagaagttttttttcacattaactgtgaaagttctgtagtttctatatatggaaacttagaatcattctttattaaaccatatgcctccacatcaaaagtatccatgtgtaaccgcacaagcattcacctttatcattcacagcacaaacattcacctttatcattcacaacacaagcattcagccattacgttgtgaagcattcagaatgttattgacaaataatacaaacttggtagttgatcccaagttggagttctttgttcatttaaagatgctcttagctcacttgaggtcaagtgtgttccaggaacatcagcatgtgttgaagggaagtggaccagtgttcaactagatcttacaataaagataacagaaaattgtcaataagctttatggctcttagagttaatgtttacctaacaactttggatgattccatatgcttcagcgtcagggtcacattcatgcaaaagtcataaacccaagttaatagaattatgttggcattggtccacatgttgtaagtttgattgcgttgctgcctgacttcagttgcctctcagtacttacgaaggtgtgacttgatcatctatattgtgtctccgagtaacttttcctgccttctattatgtcattataaactgagaagttacagagtatagaactattattcagctagcagttggtgacattttacatattttctccataatatgtgagtaacaacccaccatacgttcgaggcattgttaaagttcattctcatcttcaccatgtttcatattcctctgcaacttgccagtgccaaacagatacatgcttttgaaatggttacctatacatagacattgttaaaagcagaatttgattcgtatgtaccaattccagcttgcaactgcccaataaaattgatcattgttatttttttagattatacaaaaattgacagggccaaatatcttaagcttgatgattgtttgtgtttatgacatgtttactttttgccatgattacatcttggtcatgtcttaaattctccatggctagtgatgatgtgtaaaattgaggagctaaatttgtataatgtttaggattggcctattgtctgatacctcaatatattaatattgtaacttatacattgcagggatattctttagctcaaattaatcaccataggcagctcttccttccttagacttgctgataactagatactcgagttttttcatcggttaatagtttaaagagtttctatctgctttatattgttgatattaatgcatattagcttttactaactgtgaggcagaagcgttttctgttgcacagtgtttgttgcctggtggactttcttacccagctgtgttagatgggcatctcattatctagttatgaattaaaatagcgtatggattttaataatcttgtgatggatttgaaacttgattctatttattatttctcttgataacagtagctactgcatagctatttagtttgttacttgaagtaccatataaatacactgctgaagtttccttctgattagctttcatttagagcctactgaagctgatgctttattttcttgatcatgcagtgaagtaggccgttggttaatacttctatctttgtgatactctttatcgcaggaaaagtcatcaactggatcacgcactgatgatatatatcgccatgatgaacagcggtctgcagcaagagggtcgtcttttgtccaaagggactccagaatg

SEQ ID NO: 21887 - DNA, 3003 bp, Unknown
  misc_feature (1)..( 3003): 2750-1469P.txt file - cDNA_ID_2036810; gDNA_ID_1971867; Annot_ID_176511
catagtctctgtatacccattcggctagaaatccgaggaagcagcttctctggaagatccatagtgtttgctattcccaacacaactaatttggagttaggcttggtaggccaatcaagaatgttgtataaaacagactggtttctagttactagaagatcaagttcgtcgatgagaagtatgcaaggcttctcatcctctttaccaatcctttttccttctgcaaacctctcatttagacactgtagagctttcttccaaccgactcgatgaccactcaatgcttcatagattacactgtaaatgttctcaggtgaagccaatttgagaccattgatctccacaaagcaataagggcttacgcttccctcttcaacctcagccttcagattcttcataaccgataacacactaatagtcttcccagtcccgggaacaccatgaatatacatacatcttcctaaacactgatcatccgagattgaaccttttataaacgaagtgatctcttccatttctttgcttctacaaggaagagacttaggacgtgtagccaacaacaaagtagctttcgccttttctaactcactctgcttatgacatctcacatgttcaggaatcagcttcatccccaccttctcaaccccaaagaatctccctttacgagagttcgcacctcctcttgcactagtcaaacctcctcgcttactcttcaaaacttcatcatcaagctccatctcttcatcactatcatcaacctcctcctccttcctaccattccactcttgatcactatcagaatctccatcagccaattcagccaaacgcttaaagctacgccaatgaacatcatactcatactcacacaagaacacatcatcaccatcattactagctttcgaaaactccttaggacacttgacagaacaatgcctaagaatacattccatctctatatcagcaaaatcattcgtcaaataaagctctcgtttcagattatgcggttgacgccccgaaacggtctcttcaggtatcatataccaacgagcacgaatccaatacacaccatcatcaacttctttccataacttgtcgattcgagcagcccatagatcaccggaaagtagcttctccctcatagttctcgctaacttcttcccttccggtggcttaggaaggtcaagtgtttgactttgaccagactttttaacctcacagaattgacagatccaatcaccttcaggaacttccttcaatggcggtttcaagcatttcaaatgaaatccacctaaacaatcatcacactcaatcattatgttagtatctgatttgaaacaaatctgacaatcttcaatttctggatcttcttcttcatctgaattcgaatcttctcttctcttaacgtaaacatcatcaccgatttcgaattcggtttcgtcgaattcgactttattgtaataaactctcttcttcttcttcgtcttcttaatcgtctcagatctaattggtgaaacaggagtgaaggaatctatcttcttcttcttcttcggagtttctgttttcttcgacttcgatggaacgacatcagtggttggttttctgggggcacgttctcgttttcgaattagattcattccttcgattgggtcatttcctggagcatcaattgggtcatttcccagatcgattttacgagaaacatgacgagcagatctacggagaggagtgtgagtttctggggtttgaggagtgtgtgaggttgaagatggagatagatacgatttgcgatagatgttagacggagttttggttggggatttgaaggtttttgctcttggagttgaagccattgatggtgtaagctagggtttttctgggtgaagaatgaagagtgaatgaagaggaagaagaagacgatgatgatgatgaagaaggaggtagagagagaaagttggcgggaaaaggtggcggacacttcttcttcttcgcatcagacaagagtttgcgagaaaagggtttaactttgggccgaatattgggcttattaacccaactcatcactttaggtttatccaaattaatcataacattttgggccgatttgataagaaatcaataatataggtccttttgtgaaagaaaaaaaaaaaaacgaagagcacaaagtgaaatggggaattgttttttgtagagccctaaatagaaaatctccaactgtagtgaaagtgaagaagaagaagaagatggtggagatctgaaaatatgcgatagatctgacgaatgcagatctaaaatggtctaattctataccaatctcctctctcattgtttctactaagttcaagttggtgtactgatcttattttgtggcggtgtatatacagtcatctagaggaagggagaggatgatgatgaaggaagacggtagaggaaggaatccaccgtcgcgacatctttgggttggtaaccttcctcatgggatacttgaacgagaattagccgatcggttcttaagatttggtgaattggaaagcttagcgtttcagcctggacgaagctacgcatttgttaattttaatcacgatgaggatgcgttcgctgcgattgagtcgcttcaaggcttcccactctctggaaacccacttaggatcgagtttgctaaggcggttagtgttgaaaactcctttttttttttttttttttccaatgcttgcttaatttggcttggtttttgagtcttgaggttgattagagatgacatgaactaacttattaggagtgattgaaagttatcagttagtgtgtcttcaatagatgactagttatgtgattacttacacgtaaattagttccagtcagtaccattctagaaattaatgattgttgactacgcaaaggtaacaagtctcttaccttgttctggataagttgttactcggatgatacttaatcattgtctaagtttatagaacttagcaatcagtaccattctagaaattaatg

SEQ ID NO: 21888 - DNA, 3003 bp, Unknown; identical to SEQ ID NO: 21886
  misc_feature (1)..( 3003): 2750-1469P.txt file - cDNA_ID_2036810; gDNA_ID_2926155; Annot_ID_139491

SEQ ID NO: 21889 - DNA, 3003 bp, Unknown
  misc_feature (1)..( 3003): 2750-1469P.txt file - cDNA_ID_2036835; gDNA_ID_1971867; Annot_ID_176501
ttcgtaaattttgagagtagtttttaaccaacttacaccaccaatttattagagtacatattttgattttcgatatgcaatcttgttaccaactaagttgttaattaggaccatatactcttagaaattgccagctaatttgaacaatgaccatttaagtgttttcaaataatcaaatcatatccatataaaaataattagtcaactaatcccctattaagaaaaatcaacaattaaaacattctcatttcctcctaatgaataccctataaatacccactaaaaacttacatttctcccaccaatctcaaagcaaattaaatacactactacttcttgagcttttaaactacacaaacaaatggctccaagaaccccccttgcactcttcgtttctctcaacctcctcttcttcacttacacctctgcaaccacagggacttgtcctaaaaattccatagagatcggtacttgtgtcactgtgctcaatctagtggacctaacattgggaaacccacctgtaaagccatgttgctcgctcatccaaggcttggctgaccttgaggccgcggtctgcctttgcactgcagtcaaggctagcattcttggaattgtcaatattaaccttcctatcaatctcagcgtactcctcaatgtttgtagtaggaatgctccaaagagtttccagtgcgcgtaagttgaatacctatgacatacctatgaaacaaacgaatcataccgatgcttgaacatgttttcttacctacttgttgttgttctaagatgtttgttttttctttctttcttggattgttaataatgaacgtacgacgttctgatgcaaaataatggaaaatggggttgtgtgtacaatcgacaagtttgtatatactcctttactttgttgttcctttgttttgttgttcctcttctttgtaactgtgtatttcaaatttgcttaataaaaatataaattgatgttgtagcttatatatcctctatatatgtgtctaactcaaaaatggtaaccaaacttaacaatgattaaaaagtaaaattatttttttaatataaaactttaaatatgacagattaaacatttttttcttacttttgttaaagttagcaattgtttttaaagatatcttttatcttataaatcacaagtcacctgaccaattacaatttgccagatagattttttaaaaattaacaaaaaacaaataaaatgaaataatgataacaaggaaaaaattaaacatgaactttatcgacaacaatttctggaaactgctcacccatgatgcacgatccttcttcttcgcccacgatctcaaccttttatactcccacaaacatcagacaatttctcactcgatcgaatacaaaatataattctcctcttccttggtttcaaaaccctaatttcttttacagtgaatattttggcacttattttttctctacagtttcaatggttcagagtttcgataggaataattggttttaggggtgagaggaacatgaagtgttgaagacaaaattacgagaggtaattgggctatatttctatatcaacataatattttcttttcttttcagatttttgatatatatcaatacattgaaaagtaaactcctcaactccactaggtgctctttaccgctagaagaaaaaaaatgattcttcgacaatcacaatcaaattcgccaatgaagttgttctccaaggtaactttttcatagtctttttaaaaacaaatatttcattttttctataatggtgggaatagactgaaacatgaagaagcattatgctacacgattgtttttttgctcatcgtggtgtttttcaaattaatatgtgttgttgtaattcatttactatgatttcactttgacatgctgttttgattagcgtatttagtagatgtttgatggtttagtcatgtttgatgtgtatgttatatatcacttatgtcatttaaattcaaaaggtatatatcatacattaaggaataaagatcagcaaactaatgtgtaaaataattggccttaaggtgtatatgtgttaactaacatgctgatttttttacttcctaatgttttatgtggatttgtaaaactgtttgcagatggagatcatgaatgaattacttgatgttgaaaaaccaaagtactcatagagcagactaagagttaaagaaatacaggaaaagcaagatataaagaagtaaaacatgagatctttaaattaatctttgtactcaacaaactaagatcaatgtataattatttttatattaatctaacttaagttttagtaagtttgtggttaatcagtgacaaatgtgttaatctttgtttttatgcattaagttatctataaatgcgagttttttttttttgtcaaaaacatgcaagttttatgttaagtaaatcgttagcaaaaatgtactactagttctgtcataactcataactcataattcgttcaagaattatgaatggttgattgaaaaaataattttaccatggattaactctctcaaaggcccaagtccattaaaggattaaaaggaacctaacagcccatacccgacttttttcttttttgggctgttgctcttacaaaggattttttttgtaaagtaaattaatttagattttggaaatttaaaaaaaaaaagagagaaataattgtttctgtcaaaccatatttttcttttctcaaaaagacaagaaatacatctcctaattacaaaaaaagtatgtttttttaccgttaaaaaactttaaaaggtgtatcaatttaattttaaattgaccaaagacaaacgaaaatttaataaaattgtttggataaataaaaaacattatctgaaaaacctaaccgacatctctcctccaaccactgtgtaaaaagcactcaaatcacactttatcttctccgtcacattttcccgagaaacaaaaaaaaaatctcaaatctggcaaaaaatg

SEQ ID NO: 21890 - DNA, 3003 bp, Unknown; identical to SEQ ID NO: 21889
  misc_feature (1)..( 3003): 2750-1469P.txt file - cDNA_ID_2036835; gDNA_ID_2926155; Annot_ID_198349

SEQ ID NO: 21891 - DNA, 3003 bp, Unknown
  misc_feature (1)..( 3003): 2750-1469P.txt file - cDNA_ID_2036841; gDNA_ID_1971867; Annot_ID_176498
ctcatcaatctgacattccaaaatatgattccttaaagttaaaacacacaagctctcagataaagtttcaaaaaggaaacatctctaggtaagagaagcaagtacctggagaagaacagatctaatatcagaatgcacaaggaagagttgatccaattcacaatcattgtattcttcttcttcttctgcatgtaacacttgattaactgcaagataatcactcactcactcagagaacaaaaccatctccaaagatgtttgatttttgccaaatttccaaattgaacaagaagagtgtagatagagatatacctgtatctcttctggttatataaggttccatttcactatctagctttcactatgaattttgtaataatctggatctggagagtcgcaaacaaacagacaaacaaaaaacattacaaatcggtatctagatatcgcgtgcttcttcaattgagaaacaaaattatccagatttcgaagaaccaaaatctggtattcaaaaagggatttcgaaattgaaattgaaaacgatgatagagagattgaagagaaaggacctgcttaaacggagaattaggtcaagtatatgttgagttaacaggtatggttaccggtcggcggcgagagtagacgatttcaattgcaccgtcgttagggtttttgtagaagaagacgaagagcgggattttgtatttttcgaatttggggtttcaagtttggagaagatgaaagacagagagaaactacgcgaaattaaatgtttttttttttgtcttactataaaaataatttatataagtgattgggctaaagtttaaagtggcccgccctgtaattaatattatcaatgaagcccaatattatggttgttattacaagcttgatctgttacgtaattatggttcaactatgatttaatctacggtacatttttaaagattatttctataattatgtattaatattatggttatataatatatatatatatatatatataaatgaatgaaattgtgttattttaatagtatttacattttataattacattttcatattatgattagataaaaagaacaagacgttttttcagtagtagtataatattgctctaatattgctgcaatcttcgaatgagtatgtatgtcgccacaatattccgagttggaagtactgttgtggggtgggttttgatcgttgaataaaagacgtatgttacattctttacagactgctctggattggtgaaaatgttgtatacaccgatcaaatggccatgttttgaaacatacttagaagatagtgaagaataagcgtgagttaatttacttttttattttcagtttttcgtaatgccaatattaatatgtataaattggcacgaaatgcatgtatatatcctacactatatttatatatatatatatatatgtaaataatatttctccaacttgactttttgagccttttaatattaatgaagttgttggtaaacaaaaaatagctacattttttaatgatatggtactaatcacacccataatattttaggtctcgtttttctgatgtgggattttcaatgaaaatgatgatatttctagctattcataatttttctatgaaaacctaagcacaaaggtcgtttggtactatcggttatgtgataatgtgaatcaaatatttgcaaatcccataagtatcgggtcaactttcaaaaaataaaattacacagatgattaaacttggtttcagttgatgattgtttctgatcattgacgattttatgccactattatatgtattgtggtgaactggtgatcgatgatattgtggtcatgatcatcgacttgttacttattttttgttagttaacccaacgatttcagatggaaacatatattaacacggtgacataaaaatgattttgttcatcaaggattaactttaccttgatcaacaagacgatgaatcattacttggtttaaagtttaaactaattgaaccatatcaacatctttcattttcacttcttttagaaatactatgtttattaaagagaaattaattataaaattaaatagtaaaacagaaagttagttaagttagacgaatttggattttcacttttgatctcaaatttgtgtcaaactctttttgggacatttctaacgttggaattatacgactgagatatacctctatttaattaaaaatatatatatatccaaactagtctattgtccatcttgtaacccctgatatacagaattatttaataagtccatttgcgattacaaaaacaattatcacatgaaaatgaaatcataactttgtctttgtgtgagagttaagtatattaaattatgtttttaaaataatggttttatataagtcttccccgtgacaaacgggtttgttgaaggggcataagaaatgttcacatggccaacgtgaaagaataaagaacaattgttcctttttcgatatccttagttatgtacatattgggtaaccgaatgttaacacaaatctctatatactatatagacttaacatttggattctgtgccaagaaaacctttatatttgtcaatttttgaaattttaatcatcgtgaaggcccgtacatatatattgatagaattcataaatttgggagtaatgtctaacaaacttataccaccaaattgttagagtaaatattttgattttcgacatgcagttaccaactaagttgttaattagaacaatatatttttagaaattgccacctaatttgaaccatttaagtgttctcaaataatcaaatcatatctataaaaaaattagtcaactaaacccctattaagaaaaatcaacaattaaaaccttctcatttttctcctaatgaatatcctataaatacccactaaacacttatatttctctccaccaatctcaaagcaaattatatacactactacttcttgatcttttgtactatacaaacatatg

SEQ ID NO: 21892 - DNA, 3003 bp, Unknown; identical to SEQ ID NO: 21891
  misc_feature (1)..( 3003): 2750-1469P.txt file - cDNA_ID_2036841; gDNA_ID_2926155; Annot_ID_198347

SEQ ID NO: 21893 - DNA, 3003 bp, Unknown
  misc_feature (1)..( 3003): 2750-1469P.txt file - cDNA_ID_2036875; gDNA_ID_1971867; Annot_ID_176476
aaaactttctaacgatgaaataatctagtatatcaaatagtataaaatcttattaaaagactctagaagagcatatacattgctttctatgggaatacatcgatgcggtataattctccaaatcttaaagttaatatgatgagagataaaatacattatgattctagagtggaattaaaaacgagatggatgaacttgaagtttcatcatttcgaggaggagaagtaatgaatctcacatggataataagtgacatatccagaagattatgttcaatctttgactactaaagatctaaaagttgtataaagcaattcttatacgaatgtggtattagataaaataagttataattaggtattactgaaacttcaagacttgaagtctctttgtgaatataactcacattgttaagagaatatctatgatgcagagatggtaaaacagacgcttaaacttttacgcaagtattgttgtcctgtagacacaatattttgaaagaaattttggaactattataaacttaaatcgagtgtttttcaaaggctaagaaaacatatgagttatcgatgataagtaatactcatatactgaagtgaatataagatcttacatagttagtcaaatttaatatcgtttatactagaatataaaaatttaattattatctcgttattgttttattaacatatgattgattattaaaataaatggaagtaattttgattataagatctcattaagggagtaactgataagcaatgaaaagtaaattaaaagttttgaaagaactagaagtttcaaaagaattaaaagtttcaagagtatatttggcttaaccggattggtcatcctggtttaatgatgatgtgaaagtattgagaattatgtagacattaggtgaaaaaccagaagattctccctaatgatttatcaaatgttacttgctcagaaagcaatatgataatgtgatttttaccagtgtaagtaatttggactttatctattcgtaagtatatacaaggagatgattatgggttgatcacccactatatgacatttagatacctaatggttataaaagatgcatcgattcaatggacgcattgactcgattgttgcatcgacaagaaggtcatatttatccttgttataaacccgcaacatagagtttgcgagattactttcttgattaaagtacaagagtatttcagtgtttatttataataaccattattagatatccgttgggataagtgtttaacattttgaaattcatgttcatacacaaaatggtttagtaacatcgatacgcatcaagccaatgaataattaatacttttccccattattattggttttgggtcagaaaccaaatagttttcatctaaaagctttgaatgtgaaaagtgctccatcacagcacgcagagatgaaccctcaaaggaggataagaatacatgttggatatgaatgataaccaagccatcctagaagtatttatataccgctcgttttgaagactatcatattatatagtcagctattccaacataagggggagaatgtatacagctggtgaaaaagataaatagaaatgaattatcaatgatcctcggagtaaagaatgtatattaagagtccaaaagctaattcaattacagaatttagcgttgtaattgccagacgcatttgctgacccaaataaagtgatgaagtcacttataccagttgtaaatttaaatgctccagaatataatgaatgtcctgtaaggagcaatttcaaactgctattgagtcttaagatcgcatgaagcgtaatagaccttggttccaaatataaatatcctcgtaaaagtgaaggagcacaaaattaaaaatgaccaaattgaggaaataaatattttgatgatctcttgaagagagtgaataatctctaaaagagacataaacatgacaaatgaaacattcaagtacttgacaatgaagagatctagctagctatgtcatgtcaaaatataatggaatcaaaagcaaatcgacgtcgtaatatatttgcatgctatgagcagttgatattatagacaaaagaaggatcatgaaagaaagtctattgaaaagtgtatacaaagtaatgattagccaaaaatggaaaagaagaaatagacatataattataatctctagtagagatatttggactagtagtctatgcacatgatgtgtaaaaccagtggaaaataaatgagtctttatgtgaaagaatagtgaaattaatgagattttcacaaagataagaaatgtattatgaagaaatatattctcttgtggtggatgtaatatttttttaagtatctaaagtctggcaataagagacggaacactggatatgacatttatatgaaattcttgaaagatataatctctgaaggattaattatatgagaattatgttctctagaactctactcgatcgaataaaaagaaatatgtaacatgacatataatcatataaatgtatatttacgttgagtttgtcaaaatgtattgatcaaactaatatttgttttgaaaatcattaaaactcctacagagttatcataagtaatacgatgacaataatctatgataaaatatcactagataatgatatttataagtctatatgaaaaccatataattttgatcattaagattatggttattaattccaacgagatattgtatttgattgaaaatcatctcctgaagaagatgtttccgagggggagattgaatgatatgcgtggatgtaccctttttccttatcatagtttttatcccacatgatttttctatgacaaggtttttaacgagacattaaagaacacgcaaataatacacttgatgaatattaagaaattatatcaatcatccaaataaatattatacactaatgatatttagagaaataaataagatgatcaagatgaatcatctacaagattcatgagcagaacaatg

SEQ ID NO: 21894 - DNA, 3003 bp, Unknown; identical to SEQ ID NO: 21893
  misc_feature (1)..( 3003): 2750-1469P.txt file - cDNA_ID_2036875; gDNA_ID_2926155; Annot_ID_198332

SEQ ID NO: 21895 - DNA, 3003 bp, Unknown
  misc_feature (1)..( 3003): 2750-1469P.txt file - cDNA_ID_2036904; gDNA_ID_1971873; Annot_ID_176654
atgagatgaaatgtcttatctttatttagtgcaatctgagtattgaaaacaatttccccagtttttttttttttttacgtcaaatattgtgtgcttattttaaagagaagaaaccaacaaagagatattccagaggacacggctttgtatgtatctgactaagaacaagacacacatgaatgatgaaggtgttggtcgggattgatgttaaagatgtaccaatcacatcaatatatacatatataaagaaaattaattttaaaaatcaggctaaaaattaacgatacaatattttataaaaacattttctcatgagtttctttgaaaacacgatatatgttcacttttgatatgcagacatgcagtaaactttaaaaatatgttgagatgcatatgctcattgtctttatcttcttttctctcctttttttttgttaattatatatggtaaagtagacttgtaagtaaaagttcttatacagaaaaaggtcgattttttttttgggtcaaattttaacagatttttggaatgaaaactgacgtatcctcttacgaagtgctaatttaaattggagttgaacaagtctcatattgaattagcaaaaatttagagtcaaccaaacatctagacctaaaaaacttcatgaaatttaatttttccaatattgcaaaaccggttcaatcaagttatattggtagaaacatatagtgaaagatatgtttttctagatctactacatgaacagaaatggcaattctaatggaaaaaacagatggaaccagaaaaatagagtaagaacgaaaacttaaatatagaatgttgaaacaagataagtgtaaggatgcatttaaaaggaagagacgaggcaaataaacattatccttagacgaaaaaaataaaacaaaacaaaagagggaaaaaggatacatgaaaagagattgatcactatattgatggatcacaattcacaaaaagccaacccattgcctattgtacacttgcacgatactcgaaatttccaaataattcggaacaaaaaaaacagctatattcattttttaaaataatcaaccaatcgaatttagtcttaaattgtataattgttttaatcatttaggtttacgatcataattaggtggtcatagatgcctatatcgttgcattaattgaagaagggagaataataatcctaccatctatgatcctataagattgcaataaagctatatatatatatatatattcatatagtatatatgatctaatctcttgttaattactatataaattaggtaaaggttaccgtagaaaattacgtggaacaatgttgaaatgcttacataagttgactagtccgtgttgtttttgttctttatagaattatagtcaagaacggcgaattattaagttgtttctgattataaaataaataggttgttgtgaaatcgggggaaaaagaataatgaatacttgttaaatattggtcccctaataaatgttatttattttggttataagaaaaaaaaggaatgtgttgtggagaagagagcgcgagtggaacttgttgctacccaattgtcgccacacttcccacacgtcccctcttgtatcttttttttacttttcaccacttcctttgtcctctgtttttttcccaccattttctacttcatcaatctattccttttgtttttttggtaaaatatgtaaatatcatctatttaaaaataaaatatgaacgaatagatttataaatatacaaaattgaaattttaagatacttttaatcgaaaagagttcccaaatatttacgtaattaacatttttcaaagtttatttaggtttaaatgtaattttctggtgtaccactaactagactatacataatataaacacgactgtgaaacatgatcatcattagctgttgattatctactaaagaattgtttgttatctctacataagaatatatattgaacacgatttctattatcttttactaatttgaaatagaattgtttctagtaatgacacaaaattaattgactcaatctagtaaaccttggagcacatgcaaactcaattaaacaagtttaaacctttgtatttgcatttattaatcaaagcaaaactgtgaagcaataatttaatcaatggtttaattaagaagctaattagctatttggctcctttagattacgaacgggtgctgctacatctcctctctgtcattagtcattactaaatatttaaaccaagttcgaatctgtcttacattatcttatttcataaaatctcaaagccaaattcatcttttcttttgaaagtgctccctcaaaagctaaacctcaaacatataaaatagcaaattcattttaacaaaagcttaatgaattccacgtaagcaattacataacgtttttgcccctagtcagtagagtccctccttctaactccgagaaccagcgtccatgtctcgcggaccaaatgcgttcgtaggtaagacgcttgcacgtgtcgagatgtaatcggtcacgtgccaacctgggttggttgcatcagcatccgacgtggcgatgtgaatggccacgtgctacaaaacctatgtatagaaacacccacccaatccccaagcacttttattcattttctataaaaaaatttacaaggatcgtataatactactaacagttttttttaaatattttccagataaacattaataaaacgataaaaggcaaaaaataaaaaagaaaagaaagcaaaagcaaaatcaaaatcgatatatcagacaacgcctcgacctttctttctttttttccttctcatcgtctccgttgaacaacaccacacaaacaccagaagaacaccagataattcccatggtgaaccgagctcagatttgaaaattgaaggtcgtagacgaatcataaggaaagagagaagtggtttgagatttcttttttgacggacgaaaacggagataagctttgggggaaatg

SEQ ID NO: 21896 - DNA, 3003 bp, Unknown
  misc_feature (1)..( 3003): 2750-1469P.txt file - cDNA_ID_2036938; gDNA_ID_1971873; Annot_ID_176644
ctatattggacctgacatgttaaccgatctcactttcccattttatgaagacaccatccctatgtgggctgtcccggtaagtaaacttgtttcccaagaaacctttgtcttcattttgcattccatcacaaggaagtatttcgattttcgctgattgattatttgtatgtatggtgtgtgcgtgtagattatttgtatattggttccgatatgcatcttcatagtgtactattactatcgaagagatgtttatgatcttcatcacgccattctcggtgagttaatttctactactgatcaccctcaaatgtatctagtcctatagtacttacaatttcaaatcgaaatccatactatcatatattattgatgatcaacgtgacaagaatatttggaaattgcgtataggtatcggattctcatgtcttgtgactggagtcaccactgattccatcaaagacgcggtcggtaggccacgccctaacttcttttaccgatgttttcccaatggtaaaccggtatgtacatttctatggatccatctcacttatacgttaatttcccggtttatcatgagggaattgtttcttattttgtgcaaatcggaaagaaatgcagaaatttcatccggatactaaggatgttgtgtgtcatggagttaaaaagataatcaaagaaggttacaagagtttccctagtggtcacacttcatgtaagttgttctaaagcattaaaaagacaagtaacaacatctgaattgattccggtttatgttaaccgcttgattacggtatacatgcagggtcattcgctggtttaactttcctagcgtggtacttatcgggtaaaatcaaagtctttgacagaagaggtcacgtggcgaagctatgcctcgtgttcttaccgatactcatatcaattctcatcggaatatcacgcgtagacgactattggcaccattggaccgatgtcttcgccggagctatcatcggaatttttgtcgcttctttctcttacctccacttttttccttacccttacgacgaaaacggtattaaaccaaaacaaacaaaaaattaccatcatgttattgctttcttgataataataacggttgatgacaatattttaacaggatgggctccacatgcgtattttagaatgttggcggagaggagcactggtcgagccacgacgatgactcgaaccggttctcgaggaatgttgggcaacgacgttgagcctggcaactccgcgtcctcgccgcacgatcgccaccgtgaaagcactgattctgacttttgaaaatttcctccacaatgttttaaaaaaaagaagttaattatccgtgtaatttttaattgtatgattgttttcacttactgatatataatatgtatacttttcattaggttgacattgttgttcaccatgtttagaaaagtttgatttggagatgtttgattaacacgtacatgcttcattttggtttatataatggatatataattagtgtgttattaagttgatattgttgttaactatgtttagaaaagtttggtttggttcaaattggtttacttcgattccccaatttcctctcttgggttccggtttcaacttgcatccacattggatccgtagtaattaagaaaagtgattcttcgtcccaatttgtattatttttggggaaattaaaggtactgtattatgttttatttttatagtactctactataatatgagctcaccacatttttgataaaataaaaatatcttatgaagagtcattagtaatgttcaatgtgcatgattgtggcaactggttatgtttaatcaagtttcaatagttacgtctaatttggagaggaaaactttgggaaccgaacaatgtaacgtccggttgaagtaaaccggacacggtaaccgaaaattatccacatgggtttggtttagttttcccaataaggtccagattcatccgccttcttagggatccacttcagcttaacataaagaattttgcctttgcaaaagaattgctcccgacaaattagcaattagactaggtatcccaaaaagcaataacagaggattaaactctctcatcgcaaaagacgttacgcatccaatttgggtaacccgaggctacataaaactgaagcgtcccgtcagacgtaacactgttagcaatgagactagttcctctatttgctgatgcaccttctacgatcaaccgccaatcagagatcagactcaaaatattcaagattagttgttttcatctttcttacatgaactgtgattttgtgaacataattttgtttttcttctttcctcgttacagttttataaaaataatttgtgaattgcagcaagccatcaagctaggattatgttggaactcgtaaagaagttaaaccatgtcaaaggacacaaaataatcatattatacagtactaaacattctacatcaaataaaataaaattatcttaagtacacagctttctaaaacacaaacatcaacattatatattcggatacaaatacatttatactaatttccaaattgtattgttttatcagatgtaacaatactttaaccaattgccgacaaaaacttagatctttttaataattaattaaaaacagaaaaaccaatcttaaaatctcagaaaaactttaatttagatacgcgtaaacagctttatatgtactttttttgttgtcattacgttaataaaatataaatctgatggtaccaaatttataaatataaattacctggcgatgaatcatcatctctgtaaatttctccagctcactttactctgcagagaatctaacgtttcatctttattttatttttatacaaatcacaatttatttttcttattaataataataatagtgattatgttgacgattaataaaggattagtttcgaattatcaatatataaatccgtccaactaacctatcccgtcgttatcgaaccaatg

SEQ ID NO: 21897 - DNA, 3000 bp, Unknown; identical to SEQ ID NO: 8756
  misc_feature (1)..( 3000): 2750-1469P.txt file - cDNA_ID_2036952; gDNA_ID_1971875; Annot_ID_176701

SEQ ID NO: 21898 - DNA, 3000 bp, Unknown; identical to SEQ ID NO: 8754
  misc_feature (1)..( 3000): 2750-1469P.txt file - cDNA_ID_2036956; gDNA_ID_1971875; Annot_ID_176700

SEQ ID NO: 21899 - DNA, 3000 bp, Unknown; identical to SEQ ID NO: 8753
  misc_feature (1)..( 3000): 2750-1469P.txt file - cDNA_ID_2036973; gDNA_ID_1971875; Annot_ID_176692

SEQ ID NO: 21900 - DNA, 3003 bp, Unknown
  misc_feature (1)..( 3003): 2750-1469P.txt file - cDNA_ID_2036987; gDNA_ID_1971875; Annot_ID_176688
atgtatgttcgtattcatctatatacagtaatgatgtttttacccctggtccaacgtcggagacgccatggagagcttccgaccaccactcgtacggcggaacaccgagccttggaactcctgtggctttgtttacgagttgctggactttttccttaagggagagacgtgagaccaaatctttggcacgtgcttcatacgacaatgagacgttgcagaaaccatacttagccgtcgctggggcacttatgtcacacgcaaagttcttttgagactcgcaaagtgatgaaactagagctatgattagcagagagagacgcacaaatcttctaatactcatctctctgttttttttactcttatggaatagaagacagagtgaggagctagttttataggcgggaagagaagctaattagctactatttacttcattaaaattaaagtttaacatttacttccaactttaacgatgacataacatcacttgttggtgaatattttataagagaagttaaacctccatgtgatagtgtggaaggaccaaggaccatctctgtttgtcttgcatataagagtgagccaagtgttttccacaaagtgatgagaggacaaaatgtgaagtttaagaaaagggttttgaagagtggcttcaaagatactacacaaccattccaaatgtctgtttcatgtctctggtcctaaagttagagaagcagatcttctatgtctctaagttccacagttccaggagtctttttgatgtctggttggttcaccactagctgaccgcaagcgccgctaatatcctgacccatttctttgcgaattgtagtccggatcttgtatgtttccctcaggattttctggaatcttgacacgccttgtatgctgcttgtttcgaattggcttgtggatccaattggattaaatggtatcaaatttatgacctgttcaagaaaagagcacagagtttccataaaaaatatcatcagataattgcagaacctttaagagtattaagacatcgaagatttaccacttgaaatgtctttagcaattcgcctagtagatgagcgtgctgctcttgatcatttactccatcaagcattatgtactcaatgaagatcttttgttgactgttaaatccaatgacaatgtggcataatgttataatcgtcaatgtaactgaagggattgtggttttaatatttaacagcaacgaaccagtcaagagtacatgaactacctgttcttttggaaagtttgaagtgcatccataagcttttgtaaaggaaaggctctagctgctggcatgatctggcagcggatttcttgaactggtgcatggagggatactgctaaacttacaccgggtagatcattgtgtagcttgttaattgcgtgaacaattccgacctatgcaaatgacattaggatacagggaaatttatttgctaactagtaaaaaaaagtgtcaacacaggcagcattgcatgatttagatttatgcctggaatatacggtacaagcattacggaaggacaaggaaatcagaagaaaatcccaaaacaccaaaatttaaaagtaaccaactagacaaaaaaagctgaaagatgtcttggaagctgcatactgcgaggtttaatggattgaagtttatctatcagttccctttatcaaattccataatctaaagtattcctacaaaattcagtgaataagtttctctgttttacgaatgtttcaaggtagctttctgagtacttacagttgatatggtaattcttttgggcgacagctgaaatggttggtttaacatgacacgaacagcttcaacaacagcattgtagttatttaaaggttctcccattccctgatcacaatcatcaaaccaaggcaacaactggtgaataaaattcatcaatgcagagtatataaaataaataaccataaggcaaggtgcacatagtgtagataaaatgcaataacagaagcagaaatataccatgaaaacgatgttgcgtatatcagcaatgcgagaggcgtgaacaagctgctccacaatttctccagatgttaaattgcttttaaatcccatggtaccagtagcacagaatgtgcaacccatcttacaaccaacctattgataaatactttcacatcacatgtctttcattcgataaaaccaagataacattgcgtgataaaaatcaatacctgagatgaaatacataacgtagatcttatacctccaggacgtggtttccctcctaacatccccaaccgagtatcgtatctcattaccacagcttccacaaaagctccattcttcaatttcaaaaccaaaagcaagaatccaatatgagttcgtcaggaaacagagacattacaagtttttcagaatccataaaagcaatgtgttgtatacagtaacagagtatagagtacctggagcttgatgagaagctttgaggtggtgccatcggaggaatgaaatagcgagtgaagagacgaagtaagagtcttgaacttggaatggagaagagagtatgcagcggaaggcaatgaaggaatctcgtcccaaacgcaatcaggattctgaattacatacttccagatttgaatcgcgaatttagggtttattcccgctgattcaaattccgatttgatttccgaagcatcgaacaccgatttcaacttcatcgactcttccttgggaattctccgctcgccgtcgccgattttaaaagccctaaacttttaaagcaaatcccctccgtcacaacaaaaattcaaagaagaagctaaaaccggtttggtttttggtggaaaatctaaacccggtttgattttgatatttgggggaaaagtaaaaaccggtttgtcttaaccgtttttgtcctttgtggtggacgagccggaatataaattccccaattttcacttccaacattcctcagctgctcgatctctctctgatcacaacaatcataagcgatg

SEQ ID NO: 21901 - DNA, 3003 bp, Unknown
  misc_feature (1)..( 3003): 2750-1469P.txt file - cDNA_ID_2037011; gDNA_ID_1971875; Annot_ID_176679
tgttccaagttgtgtgcaagtctgagtaatgtcgagtattaaatctaccagaatgttatttgtttcttgcattttcttttcattcatttactctttttggcttttcattcttataaattactgatttaattagttgatgagacaaaaacttgattctcgaaataattgtttcttgttggcatttattggtagccacattgcttagaagagtccttcaaattcccaataaccttttgttactttcttcttagtcaattcttttaaaaaagacagacaattcatatgatggaggtgtcctaagacaaagagagggtgtcacgttacaaaaaaaaggatcgcttttgcggcgactcatttaatgatttaaactcagtcgatatctattttgtagtcgctgccaaccaagtgccgaacagggtcatatgtcaaataacatagtctcttagctcttacaaaaagactgctgaaaactatattagcctcctaagtgaaacatagcaagtgttgaattaaataagaaaaacaaatgttgtgcctgctctgtcttggaacagagcaaaaaatgcttctcgtttcagttccagaaaatttcttagcttaaagaaaaaactcaatcgagaatcccattactaattttaattcagtagcaacaacagcttttttcatgatatttattaaaaagtggaacgttttatctaaggaaccaagctttacaaagaagcattgtggtaaagcatctggtgatcatgttgaatgattttagggcttgtttaatgagcgtcaacctccatggaatccatgaccacaaagacttggtagatccatctataaaagagtatgtaattcatttgttaacgaacgtctttcactgcgatggcttgttgctatgcgtcactaaggacagcactagcctcgaggtggatcaaaccaagaagtagttaccacagactagaaaggtatgctcttggatacgacaacaaccgtaaccacaaaatatcgaggtatttatttattacgatcacaatgttgcgcaacgagttcttaagtacgaaatcttcgatcttaagtgtaacatatgaacggttcttgatgtcactcctggtactggtatatactaaactatagttttcggggcgtgtccgtgaagggtaacaattactttgttgctcaggaaagattggaaggagtgatgacaaatgtttcactttgctttgatttttacaaacgagagttttggaccgaacatgcatctgccgtttgaatcttatcctgacgatgctgtgactctatcttctgttagagaagaaaagcgtgtagtgttatttaagaggtcgaatgcatgtgagatggagatatggattacaactaagattgacccaacgcggtgtcgtggagctacttcttgaaactggataggtcagtgttcaatgaaagattgaggaatatagatgtgagcttattcgtggacgagaagaagaaagtagcattggttttctgtaaagacagagaagattggaccaacttcacagcttatatgattggaaaggatggatactacaaagaagtgtatctcggagaatctactacatcttggccatttgtgtactcttatattccaagtaggcccggtctctacaaggatggttttttgtttagtttcttgcatctcttttttaattcatatattaactctttggattttcttgtttagtagtcagtcatttagaacaaacatgcattacatttagattctaaagatttgccttcatttggatccgcctttatgataagcactaacctcaaatattgcaagggtataaaattttctctgtttgaagttaaatgcctcaaagcacaaaagaccttgtgatgaattgtcgatgacagacaaagagactttcttgattaactagtcttctttaggatccaagaagaataacagattttctcctgtctgttattgtatatagttcgtgtgtaagaattgcttatctgatcacggaaacagtaccctagctagttacgtttatctctgttgcaaactttttaaatgtttagtggtgaactaattttgaaaaattcaaatgaaaagggttgtttttgttgtgggctttcatttagtggcctaattctaagaagataccttgaaatggtcggtgctggtttcattctattccattaatatgatggttcctgctacatgcacaacattttagtaacccaccattcttttcttcacattctggaaaataatgcagaaactgagattggtgctctggtccttagccatggcaaatataagctaatgtgagtttcttcatcgaccaaagagtagaaaatcgctgtggtctttcataagaacgaatataaaaaaaacatgttaacctcctccaaatgcatcacagcttataatttttgttatcacttagtcacattaatacattatcatactttaaaaattttggataacagcacatcgacaagctagtttagtagaaatcacaaagcataatttcaactctgcaaagttctgattttaaaattcgtaaattttttacagttttaataccgagagcttatcatataaagtcatggctcattattaatgtcgttattttcggatttctctttaattggctaaaaagcaaataaattaggtaatttaaattcagcttaattagccaatgaaaacagagttaatgcaaaagttcatcaaacctccgaaaaagcgaaaattaaaaaagatgagctcatcagaataccccaaatccagaaaccccaccctttcttcaattctcacatctctctctcttcgctctgaagcaaagacaaatatgcaaaatcctctctgaacaaaattcactttggatttgcagaatttatttgctctaagttagagtgaggagaagcaactgccaaatctctgtaatgcactgtgaagatctcgaagaacaacaagacgaagaagaagacgaagcagcgagacatttctcgtagataatg

SEQ ID NO: 21902 - DNA, 3003 bp, Unknown
  misc_feature (1)..( 3003): 2750-1469P.txt file - cDNA_ID_2037157; gDNA_ID_1971974; Annot_ID_177559
taataaactaagagcttctatatacaaaattcaagacatttttggatttggtttgacttggactcgtttggctctgctgtacaaatatactccagctagtgcagtcgcggtacctgtttatttaacaagtgattatatattgcttcaataaaatgaacaagtgtaacaaatcctttactaatatatactactagtagttgtttacctatagagttaagaggtgagactggagttttgaagaaaagaatggatgatgtaataaccaccacacgcttcacgcagttccctacagagtgtgttactggagacaccatctccaatatcatatacgatacctacaacaacaaccccaatttttatgtgttgattagaagcctaacactaaccgactttacaaaattcagtacagtttttctgaaacggaggaactagacggaccaacctgttggtagctatgcaagcaaacaccagcaagtagagacatgatgcaaaactcttttaccgacaaaccctggcttgtctgtcaagcaaccacatacaaacacacattagttctttctcttttagatcatctagctatatcggtttatgcttttccacttactgctacttgtaaatgcgaaggagtaaccttgaacccatcgatgaggattgctaaaggaaccagtaagataaaggagataatggttattatagagaaaaggttgatgttgtccaaagcgtcctgtttcaatatacaaacattaatagatttcgattactagtttctttcttgagatcataaggataacttatattcaaactcttttacctttccaaccatgaattttttactgaggacattgcgtgattgattcgtcacattagaagccattgcactgcagaaaccaatcctggtttatcccaataccatgaattaatcaaatcaattaaaacttcatcaaaagtttatcaagaatactattttttttgttcttgttcttgttgttcataccaattgaaagaagcttctgtgaaagatgctaaagagactccagcgacaataggtaacaacgaacaaacaatccacagactcggccactggacattaatcaaaatttcaaagattatgtctgaaaatataactctcttgtataatctaaggttatagattaagtctgaaacagagcgtatctttgttttgcttacctcaccgagcaagagaacagaaagcaagacggtgaagaaaggctccattgctttgatagtgtgggtgaaagagacatttactcttcctaagctcacatttgttaacaagttccctaacgtgtgagctactgctagttgtacgatcaccgtaaactggagaggattacaattgaatgaatctctctgtttttagggtttgacggaatcaatatttgatttacctgagaaggagaaaatttggggcgtggatggagtttaaggagccacattatagcaatcatcaacgttccacaccctaattgaaatgctgttacagtcgctggatatggataaaccctaagtacctggatcgatgaatgaacaagtttcatacttgtatgaagactgataataggttcgagtactgcttcttgcattgaaatggactgtttaattaaatgaagcaaagaaggaacctgtttgttgaaaatgttgtagtagatattgagaaggtaccaaactccaaacatgcctcctagcttcaaccctttaaccaaacttccagattccaaatctcctccttccacattctccggaactgtagctgacttgagcttgaagccattaaatctaaggttcggtctccaaggataagagttagaagatgaaaaagctctgcttcttctgctcaacgctgattcaggagtagacttggcaaggaacaatggagatggaagtcttggatttggatttagaaatgtgagagcgaacataattttttcctcttatcagatgctccaagatgtgcataaatcctccggcatttgttggaatttctcacaagtaaccgactcttgctaactttttcttcttcctctattggtaagagttatgttacatgagtctacctcctcattttcatgtaagaagaaaaaagtttgttttgtttttggatatactgcaaacttgatattagtattatttagaagagttgtctttattatgtgacttttctctcgttctactatctgaatgtttttgagtatgataaaaataactcacatgccgatgccgacatttttttcaatataacattggctcgattttatttatctttcctcataagagccagtggtatttgccggtattgtttcttctcatgttctccattccatgtgtgttctgtaaataatgttatggaaatgatttgacatacttggtcactcatttctttacaaaggggccgtggttttcttcgtttataataatatcaaaaagttggtaacgctataaataattatttaaaataaagtttacgtacgaacatgacaaattactgaccacaacaccaattgatttttagtgtggaatttgaaaatgtcaggggagaattgtatggatgatatgaaaggggccgcgttgaaacatgtggatgttgtattgtatgctcctgagtccacccttttctttccgtgttatttcatactattacaaataaggttggtcccattgctttgatcacattattgattataccatttacttattatgtcagtgttggtacaggtcattgatcacaatttgggctttaaacggagaggatggaaactgaattctaaatacatttcggcccatttagggtccataaccttctacgccaatcagaaggtacgtcgacatgagcaacttggtcaattttatgacataaataaaataaaaataaaaaaataaaaatcgatctgaggggttttagaaagaaaagaagaaattcgggagtcggagaaattgtcgggtggatcgatgaatacttgtcagtttatggataagcagataatg

SEQ ID NO: 21903 - DNA, 3003 bp, Unknown
  misc_feature (1)..( 3003): 2750-1469P.txt file - cDNA_ID_2037211; gDNA_ID_1972155; Annot_ID_179457
acagattttgtttttccattgttttggatttctagattctagttatatgttggtgatagatttttcctacatctcgtgattctcaaacgcttcttgagctcttcgtcgaatcgggactgtgatcgggacttggtggagaagaagcgatgataacaagatcgaatctagcagaacagctcagggaatatcagattagatcaaagcatgattgggcctccgtttctttcttctcttccacctccaatttctcttcctccaggttagagatctccggcttatcctttcctttttaatctgctgtgatttggagctgcgtgcttagagttgtatttgaaaaattgtactttgtgatatttaattcaattggaaccgtaaatttctcatcttttaagggattgtcgttgaacattggatatctatgtgaatcctacacaaggaactataattttgacttgtccacgttgaaccatctttgacaatttgacatacacttttcattcttatcgactctgttgcaatctggattctattgttaaattttgacaatgaacattctatagtggtacttatgctattcgtttcgtttgcttttgattcagggttgatgttgtagtctttgtcatatgggaactagtgatgttagcactcgtggtgttttcagctgtatccttgtacttcaggcggttgcaacttgcttttatcctgctttgtgtcaccttactattactcctctgtatgaaaatcacaaagcaagtgagacatgctaggaagaagaagcgaaggatgcttcttcctctctctatgtaaagaccgaaaccattgagctgttgcgaaccgtttatcttctcacacaaccaaaccacaactcttctctggcatgagttttgtgcccatatgcattgatgaagatgacagctaagctcagactgactctgggacgcatcgcttttgtcctttgaagaatcgacctgaacttgagatatgaaaccagggactgcaatttcaaggcttagcttagacaaatcagaacaaaagtgctgtaaaggttgttttcctgtataaagtagtatgggaggttgctttatttttcctaggcacgatcacggattgttaacttgagcgttttgtgattaaagatagtttttccatctatctatgttacacttaatatcatgatgaagtgatttagatttgttggctgtaaaaagtttttaaaaaatgatttgcaggattttcatgtgacgagaaaaagaaaaacaacgaacactcatgaaagtagaagagagaactataaaatgaaaagtagcaagcaacttgctcgaaacgctcacatgtttctatcattacctttgcgctctgcaactactttagtatcttgttaaagaaaaagtggtaatagttagtattatttgtaatgttatggtctgtcaatacactagcttagcttgatttgattaacttaatttccaaataatgagatactgtctacatggtgatatagctttgtcaaagttcattaatgacaatgacaaaaacaagtgtgttagtaaccaagataattgcatttagtcgtaattcatgttttgaaacggaaataattagaaagatcgaaaatctctagatatttgtagaaggtcagtacataactccacgagtggtcgtgatccaatttgtggacaaatttgaaaagcaactaaaaacaatcaaataagcacgaacatccttttccctccacacacatcaaaatccacagtttggtccatatattgctatatatatagagaagcagttaggcatttaattaaggttgcatacagacagatacatacgcaacgaaactatcaaagccgaagtaacacacacacaaaaatcatatgaagaaactaaattctaaagggattagactctccgaattgatggagaaatggagaagaaggaagaaagggcacttcgctgtgtacacgaacgaagggaagagattcgttttaccattggattatctgaatcatccgatgttacaggtgctattgcaaatggctgaggatgagtttgggactaccattgatggtcctttaaaagttccttgcgatggaagtttaatggatcacatcatcatgcttgtgagaaggagcatgtcccatgattatgatgatgtggagaagtcttccacgagcagcacctgcaagggagcttcaatctcttctctctttcgtggacagagccagcttcagtcattagtttcctaaccatttggagtaattgttaactttttttggagaagggttgttctattttgtgtataccaacatgatcttgtaataaattaattattgtaatgtatcaatgatacagtatcatcatttgattttgagtctttttttgacggttaaaacaacgatttgggacgaagttataggccctgaatggatgctgattttggattcagtttttgaatttagattttagtttatagattttagattttagtttcagatttttattattatatttttgtttcaaaaaccccaaaaaattggtttttggtttttgagaaaaataacgttgattgagtaaaaactagatttcctaaattttaggagaactaaaaaactaaaatcatgaatggaaaactacaagaaaataatttttctaaattgtagggaaaccaaaattttaaaatcttgattggtatgaaaataagtttttggaaaacaaaaaccaaaaactcttacaaaatctacaaaacattcaattcatgtatccaaacttcttaaagggcccaaaaaggaagaaaacattgtgaaagaaacagatatagaaatgggcctttggtctttaaattgggcctaagccttttaattgaggccttactaaaagtgacgactcacatggttgaatcaaatctcaggtagtaaattgtcaaagctgaggagaaagaaagctttttcggtctgaaattgaagtgcgaatcggggaatctagggtttcgagagagagataatg

SEQ ID NO: 21904 - DNA, 3000 bp, Unknown; identical to SEQ ID NO: 9575
  misc_feature (1)..( 3000): 2750-1469P.txt file - cDNA_ID_2037218; gDNA_ID_1972155; Annot_ID_179450

SEQ ID NO: 21905 - DNA, 3003 bp, Unknown
  misc_feature (1)..( 3003): 2750-1469P.txt file - cDNA_ID_2037225; gDNA_ID_1972155; Annot_ID_179448
ctcctctcatctgattaaacccatccagcaaaatcccacctctcgagagacgattgttgttcgatcttctcggtagctttgtgacaacagaatctagggtttcgttttttgttttgtttttgtttaattcttttattaaagtcttggttcataaatattcctgctagaaacaacaactgtacatcaccatcattaagagaaacccatctgcctctttctcaatctcataaatattctcaccgttcgcttctctcatctaaatgttctctctgtagcttctctctctctctctatctttttccatcttaaagaaaaccctttttgctccttaaggtgtacctctcgatgttacattcgacagaaaggaaatgagtgatttgtttttggatctttaacctttttgatcatgcgggtttgacaaaagagtctcttacagagatctttggcattctgtccacctcctctctctatatttatgtgtaataagtgtacgtatctacggtgtgtttcgtaagaggaggtgggcatactgccaatagagatctgttagggtttctttgtaaaacccctcatgatttgatatataaagatagtgatcaatatcattcggtgaatactactaagatctaagtttgaagaaaactaggtattatctcgaaactttaaccttttttgttatctgtgactgtgagcgttacttgttcttgattaagtaaaattcatttgaattttgctgtctcctttgatctatctgtcaaactttgatcttgatcaagactaatccgattgatacattcattgtaggaactcatcatctttttaaattgcaacggcgttgacaaatgtgagatttcagagtagtggtggcgtttgagacgtttacatcatctaggaaaggtaaattatttcataaagaaagaggacccattactccctacaaggtacaggtagattgaagtcataggagaatatggtaatgaaaaggagaatttactcttcctttttatgtttgtgaagcccacacagtgttattatgatgtcttgcttttttttttttttaatttgaatctatatactatataggaagagtgagtttttgtttgtttatataggagtatatttgtttctttattatctgatgagttgtgttcaatcctataaatggttcgagaaatatcgagttcaatcttaaaatggagtatttttcttaggcattattatgacgttttcttttgttatagtcggaatgtatacattttctgtatagtcacactcacatgtttctatagatgtatttgatgtaagtgatctaagctcagtattttcaattgaggtatatatatgctgagttattgttgtccttgcgcttattttgatattataggtactttgtttttttctcttacatttatagttacgttatagtcttatagactattcccacatttttgtgtttatttatatcggttgttgactaattaggttttagatggtaccaaaatgatttgcaattctatgtggaaatatgaaagcaaaacaagtttacaatacgacttttgccaagctcttagcattgttacgattattggattctaacgtttttttcttctttaggtaaaatgaggattttaatgttgagaaagtaagcttcggatttatcatgtaatcgtgatgatatgacattcgatgacttggtagatatgtataatcctcgacgtctctgttgtgcatctagcatggtttataggggctcattaaacagggtgtagatttatacatttaccataagtttgaaaaattacaactccacgtcaaagagaaaataaagaaaataataagaattcaacaaaaactttccctagtaacctcatcattggaagtgtgtcagtagcatttaaattatcctttcaaggcaaatctccaaacttttctacgcgatttaactatgcgcgtgactcccaaatttcctttctcgtttattatgtaggtcaaagttgcttttatcttgtaatttttttcttatgttcggtcaattcactaaaactccagtaattatttatctgtagtgtagcgtatgattattattctgcaaactctgcgtaatagagactttttaaaaaacaaatgcagtagtccaaacctactttctagaaagaaaaagaaaaaatgttctttagtttccctcctaaacggtgaaaagtctctttgtcgcaatttgtttacacatatcctgataaaacgagtttattgggctttatgttgggctcgtttattcagcaggtctgaacctcaaaactatattataaagtttaagcccaaaaggctttaaatatggtatcaacaacatatgcttatgctatgcatcattttcgcaaactatggtgttgtatgaattagtgggttgttcaagatgttttttcttaagcgaaaacctatttatacagtttgcaatggatataagcttttgcaaagtctacaaaagtcacatctcaccacaaaaaaaaaaggtctacaaaatcacatgtatctttggaaaagtatccatgcttagatatttcatatttctgatccaattatccaaacaaacatgtcaacagataaaattaaaaaaaaagctaatcttttcaaaatatacaagtcaaactgtcagaatataacaatttagactagttgataaaaatatatttttgaataagaacattttagattaaattttggtaccataaaatgtttgatagaacgacgaaaccattttgacatattaacggcaatctcggggaagaagaagaagcggtagagagaaaaccgatgctcacagcgtttgcaagtcacgcgcgttctcacgttttcgcgtttgttaccgtcccaacaatcacgcgccgcctccgtataaatatcttacgccaatcacctctctcctcttctcttctcctaaacgaaaccttctccaatcgacccaattctgtttctcgtcgttgttattgttcgagctctgcgataatg

SEQ ID NO: 21906 - DNA, 3003 bp, Unknown
  misc_feature (1)..( 3003): 2750-1469P.txt file - cDNA_ID_2037281; gDNA_ID_1971889; Annot_ID_176829
aaacccaaagaacgcaacagatgccattataataaatgacagcctgaagcaatgagagccataacatgtgttcccttccccggaagcagtcttatcgtagatataaccgatcaatcttacagagaagatataggaaccaatgggactagccacggatatggtattgaagatggttcccatgtgccgaatcccgaacagctcagaggtgattgtaggcatcagagaccactgtgaaccataacaaacgccaactataacagaaccaacatagagatttccttgaaaaccagaggctatgattaggtggcctatgctcatcgttccaagtgttgcagccattagcaatggacgtggccatccctttttgtgtagcaatgcatctgaggcataaccagctccaaatctaccgagaaagttccatatactccacaaggagaccaatgaatttatctcaactgatgagtatcgaagagactcacctatttgtcggatgttgtttatcgttgaaagtccagagcccattccgcaaatcatggcaagaaataacaaccagaagcttagttttttcatagcttgcagaagattcaggttctcactcagtccagcttccactttactgtcaccttcagaactttggttaccggaggttgttgcctttggactgcttatgagaggggaataatcatgtggtactgttttttccatgccgtctcgttgtgctcttctcgcaataagtagaggcaaggcaagcatgacgagtagacatacaagtgtgacaatgttggcccacgatgacaacccaaaagtgttcttcaatatgataatgatcataagataagctgcgatgattagagatacagctgaaagaccatttaaatgctttttatcatcggctacgcttgtctcatagatcctgaccagaggcatgaccaagagtgagagcactgttggtgttactgccagtaagagaatgaagctggccggatctccagcgcacaatgtctcgtacagttgaatcagtatcgctccacttagaccaagaaaaccctgcaaagaaagaattagaggtaagcttggatgcttcactataatcaaaaattccaaagttgaaaccatgaatctcccactattaacatactttggggtttagttgaagtttctcatcttaaaagtggaggttgcatcctcatttgcaaggtttatcagaaaagaacaaatatttactacgcaatatatatcaactagaagatctagatctcgattgatccaaagttcaaagcatcaatctctttccaaatgttaccaaagcctcctcatttagactctaccaggatcatcatcatagccaaatattggtctttaggtcccaaggaaacaaactgagacgtgatccaacaatacagatccattcaatatatcgaaaagcttcatcaaaaactcaccttcataatgccaacggctgtaccaccatagtcagcgaaattctcaacggcactaacaacattagccgtattgaagaacgtttgcgactgagctgctaagaacataaacaggcacatcagcggcaccggaggctttctaataagtccggtaacagaagcccaaatgagaaagtaaccggcgaagcactgaattgccccaacagcaagcaccacccaaggtcctccagcgcctccaattcctcctccccgtccacggagacgattggacgtagcgtatgtgtataaaagcccagagaaaactccggcgtttgctccgatgtccttgaagactgagacggtatcgagggtggattgatcgtacgattgagtcgattttaggacagcggaatagattccgaaggtgtaggaagcgccgcttgcgcattgtatccatatactagctgtcatagccacccatttcgttcttagtatctccatcgccgccaattaccaccaccttcctcgccggaaaaaaagagaaagccagagctttttcccctgctcaaggacgacgaagcgacacgatcacaaaacttttttttctttttttctttattcaaacagattgattttggaaaaactatttaaaccttaatgggctggaaaaattggtatgggctcattagttatagaactcgtagtattgattttgtgagcccaattaactggaatgacacgtggagtcagatggagagcacacgacagccacaagacggcttgtggaagagagaagacggaacgaggttaattaacggattaaactaacggagtcaacgttgactggtcaaggagtattgagaaaactgtacggccggccaaggtcacgccactctctcgaccaatggttttataatcacgaggctgactcagctaatctcccgcaaatcacgagatttttcaatgttactcaattacaaaactattaacaaactcaatactacaaaatcatgtaatgtgattatttagttagtcggatcactaattaatgttttttcatgcattatactatggtcaacgacgttggagaagtaatcttgaatacttgacaacaaccaaaatattgattctttttttcctctcataaaaaaataatgtttaacaattgtaaatgatctaatatattatctccattcttgttagattaatttaatttatctctgttcatattttcacaatctaaatttcttttaaaaataatataaatgaaaacaaattagttagttaccaaagaaacagagacaaaacagatatttaaatatacatcccgccataaatatgatataagctatagttggttttcagctgcaacgtctcagtcacttctaatataataaaactcaaaatctcaaattgattaaacaaactggcttacgcagaagagtgacgactacgaaaatgtatcatgcctttaaaaaccttctctactcctttaatcggttccttcttctttcccttttctcctttcgcttcacgacgacgaaatttttgatttcagtcaccgttattgttgttgcggtggatg

SEQ ID NO: 21907 - DNA, 3003 bp, Unknown
  misc_feature (1)..( 3003): 2750-1469P.txt file - cDNA_ID_2037321; gDNA_ID_1971889; Annot_ID_58463
catggttctaaattcagtacttgtttggagcttgctgatatttgtcgagaagttggtcttcctcctggggtcctcaatgttttgactggtttcggttcggaagctggtgctcctttggcatcacatcctggcgtggacaaggtattggtctttgagaatacagtaaacataagtcccaacaaaattaactctaaaggctatgattaaacattcagtttaacgtctgcgtttcttaaacgcttcaatgctaagttatgatttcgttgcagattgcatttactggaagtttcgccacaggaagtaaggtcatgacagccgctgctcagttggtgaaggtaattccaatttttgaactttctgctgtatattccttctcctccttttgtttcatcaccaatgtcaatgacacattactcatggcattgttgcagcctgtttctatggaacttggtgggaagagccctctcattgtgtttgatgacgttgatcttgataaaggtgaatgtcacaaaaagtagtttagtggatttggagtttttttataataacttcttcttgtgctatattcaagatagtactaatgcttttgttgctttgagacgagtagacatgacttaaatttgcttaatcttaaaattaaactctttgtatgttttgacgccggcaaatgatagctgctgaatgggctcttttcggttgcttctggacaaatggtcaaatctgcagtgcaacttcccgccttcttgttcacgtaagtcccaatcttctacttgctttaaggttttacctgatcttcccaatatgacatgcgaatatttattactggagaagtgaatgttccaagtcatacgggaagatgtttccattaaggtcaatgacaatgacatttatttcagatcaaaccttctggtggatatgccaacagggatacaattgctgactctcttgtctaaatttttttattttatatcttaggaaagcatcgcatctgagttcatagagaagcttgtaaaatggagcaagaacattaaaatttcagaccccatggaagaaggatgcaggcttggtcctgtagttagcaaaggacaggtaaaatcccagtgatcgttttttctgtcttcatattatttgtcaatttcccatcaggttgcaatacaacaaccaggactaaaaaggaaaagagaattgagttctgtagtatagtgattaacttttgtccctctaattctgaaccgtttagcttttagagcatcaatcaaatcacatctagcatatgatatttcatcacgcttatcatgttcttacttggtaggtgtgcttttcttctatgatcatataatctgattgagctgacaaatgtaaatattacagtacgagaagatattgaagtttatctcaacggccaagagtgaaggagcaacgatcttgcatggtggttcccgacctgaggtattacatctccctcccttacctatccttgatgcagtttcttccagactatgatgatgaccttttatatcatatctatatttcacagcatctggaaaagggcttcttcattgaaccaaccatcataactgatgtaaccacttcaatgcaaatatggagagaagaagttttcgggcctgttctttgcgtgaaaacatttgccagtgaggacgaggcaattgagctagcaaatgactctcagtaagttaacgtttctccagaaagtgaaatctgatcaaatcccatccgctgacactggtgtttaaatcaaatttatcatttaagatcttatgtggctgaaaattattcattgattaatgacagttacggactaggagctgcagtgatatctaatgacacagaaagatgtgaccgtataagcgaggttagtaccggtttcttgaaccattcagatttgtttttaatgcctagcaagtgaaataacaataccatcaaataacacaaacaattggtgtctactttgttaggcctttgaagctgggattgtctggattaactgctcgcagccttgctttacccaagccccatggggtggtgtcaaacgcagtgggtttggacgagaacttggagaatggtacatttctttttctatctcgaatcttgtttttaaaagactatatcttgatggcttgtactgaacaaatcttggttatggctggtttcttgcgtgcttcaggggacttgataactacttgagtgtgaagcaagtgactctctacacttcaaacgatccctggggatggtacaaatctcccaactaagtaatgaatacattgtcatggaaatggaaaccaaaccaaatgctgtctgttcaaatctttgtgcttttattatcagtctgtctagttcggtcctgaaactcttttgtaaaacctgttgaatttataatgaataaaagatgctttgctgataattattggttgttctataaaggccagtattgaggcaccattttaggctctggtgcagcagtatcaagaacatgaaccattttatgtcaccttcaagtcacatcaaagttaaaactcacatggcaatcaattccaaatcataacttttttttttactataattgcttgaaataaacattttatgagatctgaagatttgtggattttttttccattttttaaatagtaaaatgtttggcaaccaaatctgaaaaagaggtaaagacgagaggtctcgcgcttatccttaaaggactgtggtgaatggtgagtgtgacttggagggaccccatcaccgcaacaatacagcttcttagatctcgataaccacaactaacctgtcacagtttcgattagatcttctcaaaaacttcacctttttttgtttttccagtttctcagaggagatcttccttcaaagctcaaatccttttgtctgaattgtgatactgctgtccccatttttctgcaagttgggaaatttctgtcaaagttttgtgggtctgttaaaaagatctgagctttgaacatggggagctcaatg

SEQ ID NO: 21908 - DNA, 3003 bp, Unknown
  misc_feature (1)..( 3003): 2750-1469P.txt file - cDNA_ID_2037321; gDNA_ID_2684202; Annot_ID_191253
ttgaacacgtctcatggttctaaattcagtacttgtttggagcttgctgatatttgtcgagaagttggtcttcctcctggggtcctcaatgttttgactggtttcggttcggaagctggtgctcctttggcatcacatcctggcgtggacaaggtattggtctttgagaatacagtaaacataagtcccaacaaaattaactctaaaggctatgattaaacattcagtttaacgtctgcgtttcttaaacgcttcaatgctaagttatgatttcgttgcagattgcatttactggaagtttcgccacaggaagtaaggtcatgacagccgctgctcagttggtgaaggtaattccaatttttgaactttctgctgtatattccttctcctccttttgtttcatcaccaatgtcaatgacacattactcatggcattgttgcagcctgtttctatggaacttggtgggaagagccctctcattgtgtttgatgacgttgatcttgataaaggtgaatgtcacaaaaagtagtttagtggatttggagtttttttataataacttcttcttgtgctatattcaagatagtactaatgcttttgttgctttgagacgagtagacatgacttaaatttgcttaatcttaaaattaaactctttgtatgttttgacgccggcaaatgatagctgctgaatgggctcttttcggttgcttctggacaaatggtcaaatctgcagtgcaacttcccgccttcttgttcacgtaagtcccaatcttctacttgctttaaggttttacctgatcttcccaatatgacatgcgaatatttattactggagaagtgaatgttccaagtcatacgggaagatgtttccattaaggtcaatgacaatgacatttatttcagatcaaaccttctggtggatatgccaacagggatacaattgctgactctcttgtctaaatttttttattttatatcttaggaaagcatcgcatctgagttcatagagaagcttgtaaaatggagcaagaacattaaaatttcagaccccatggaagaaggatgcaggcttggtcctgtagttagcaaaggacaggtaaaatcccagtgatcgttttttctgtcttcatattatttgtcaatttcccatcaggttgcaatacaacaaccaggactaaaaaggaaaagagaattgagttctgtagtatagtgattaacttttgtccctctaattctgaaccgtttagcttttagagcatcaatcaaatcacatctagcatatgatatttcatcacgcttatcatgttcttacttggtaggtgtgcttttcttctatgatcatataatctgattgagctgacaaatgtaaatattacagtacgagaagatattgaagtttatctcaacggccaagagtgaaggagcaacgatcttgcatggtggttcccgacctgaggtattacatctccctcccttacctatccttgatgcagtttcttccagactatgatgatgaccttttatatcatatctatatttcacagcatctggaaaagggcttcttcattgaaccaaccatcataactgatgtaaccacttcaatgcaaatatggagagaagaagttttcgggcctgttctttgcgtgaaaacatttgccagtgaggacgaggcaattgagctagcaaatgactctcagtaagttaacgtttctccagaaagtgaaatctgatcaaatcccatccgctgacactggtgtttaaatcaaatttatcatttaagatcttatgtggctgaaaattattcattgattaatgacagttacggactaggagctgcagtgatatctaatgacacagaaagatgtgaccgtataagcgaggttagtaccggtttcttgaaccattcagatttgtttttaatgcctagcaagtgaaataacaataccatcaaataacacaaacaattggtgtctactttgttaggcctttgaagctgggattgtctggattaactgctcgcagccttgctttacccaagccccatggggtggtgtcaaacgcagtgggtttggacgagaacttggagaatggtacatttctttttctatctcgaatcttgtttttaaaagactatatcttgatggcttgtactgaacaaatcttggttatggctggtttcttgcgtgcttcaggggacttgataactacttgagtgtgaagcaagtgactctctacacttcaaacgatccctggggatggtacaaatctcccaactaagtaatgaatacattgtcatggaaatggaaaccaaaccaaatgctgtctgttcaaatctttgtgcttttattatcagtctgtctagttcggtcctgaaactcttttgtaaaacctgttgaatttataatgaataaaagatgctttgctgataattattggttgttctataaaggccagtattgaggcaccattttaggctctggtgcagcagtatcaagaacatgaaccattttatgtcaccttcaagtcacatcaaagttaaaactcacatggcaatcaattccaaatcataacttttttttttactataattgcttgaaataaacattttatgagatctgaagatttgtggattttttttccattttttaaatagtaaaatgtttggcaaccaaatctgaaaaagaggtaaagacgagaggtctcgcgcttatccttaaaggactgtggtgaatggtgagtgtgacttggagggaccccatcaccgcaacaatacagcttcttagatctcgataaccacaactaacctgtcacagtttcgattagatcttctcaaaaacttcacctttttttgtttttccagtttctcagaggagatcttccttcaaagctcaaatccttttgtctgaattgtgatactgctgtccccatttttctgcaagttgggaaatttctgtcaaagttttgtgggtctgttaaaaagatctgagctttgaacatg

SEQ ID NO: 21909 - DNA, 3003 bp, Unknown; identical to SEQ ID NO: 21908
  misc_feature (1)..( 3003): 2750-1469P.txt file - cDNA_ID_2037321; gDNA_ID_1971889; Annot_ID_176813

SEQ ID NO: 21910 - DNA, 3003 bp, Unknown; identical to SEQ ID NO: 21908
  misc_feature (1)..( 3003): 2750-1469P.txt file - cDNA_ID_2037321; gDNA_ID_2684202; Annot_ID_137228

SEQ ID NO: 21911 - DNA, 3003 bp, Unknown
  misc_feature (1)..( 3003): 2750-1469P.txt file - cDNA_ID_2037333; gDNA_ID_1971889; Annot_ID_58459
gagagcgttagctagtgctgggatttccaaggaacaaataaattacataaatgcacatgcaacctcaacgcatgctggagatattaaggaataccaagcccttgctcactgttttggccaaaatcctgaggtagcttcagttctttgttacaaaattccgaagtgcctttttatgtgcttttcttgatctttctcgatgtggcagcttaaggtaaattccacaaaatctatgattggacacttgctgggagctgctggggccgtggaggctgttgcaactgtgcaggtaactcatttgactcggtgtatctacaaggaaggaagtgttgttgaaaccaagttttagcatagagcgaaattatgtgcaatcttcgcatttttaatgttaatattctgttgctatctacaggcgatacggaccggatgggttcatccaaatatcaacctcgagaatccagacagtggagtggtatgttagtttcatatgagttcaatacctatacaaagaccttttaatgttcgtaaaaaaaaactcttgggagttttaataatcgtactgtgaaatgaaattggagcaggatacaaagctgctggtgggtcctaagaaggagagactggacattaaagcagccttgtcaaattcattcgggtttggtggtcataactccagcatcatttttgctccttacaagtgaaagcgaaagcagttgcttgtactccaaacctgattgtataacttgctgtaaggtaaaaagttacatccattgtacatttgtgtatcatcagattcttagaggaattgaaggacagttaactcttttgacctttctatatttattactttggctgagatggatcattggcaataatgaattggaagtttgtgcaagttccctttgaagtattgtcggtccagaaatgctctaaaatgatttgggatggactaagaatttgttatgaagctgagtgtttaaattatgtgcagtgttttacaagaagtttcccatgttatgctagtgttacgtcgagggaatcaacagagtttgttcaactaccaagagctaagctaagtttcttaggatcaagatctgatgagccaaagacttggacaggagctaaaacgtgctagagatatcagagtttggattcgccattaaaattctgtttcttgtgataccttcttattggaaatctttgtagtctttacatttctattgtttaacatgaaatctcaaaaaatgccaaatcaattctcaattttaaatttagtagctcttgacagttttccctttgttaattacatatatagagagtaactaaatcatcttttgaaaggtaaaaactaaaaaaatatattccaagggcccaatgttttaccactttcatatgtaagcttattttctgttaaatatgtgaaagaaagaagaggaatgaatcagctgtgaaaaccaagagcaagtataaaaacatggctaaaagggtatcaatcagccttgtataagagagccataagtagataaagtttctacagtaaaaacaggaatatagagtactattccttaattagcttatgttcttctattcttcttgtgacctctatcttgcatttttgtgaccaccccacttgccttcttctttttggttgcatactctaaataatatccagactttgatgtctttatgcgctctgggttcttcttgtgacccctcttccttgtaattgtatgtacctgcagcttcttctgattttgtttcttatggatatgtttgtgatgtataaaattttgtgaagatgtttataaaacagttaaaaaccaaattaaccaatcatccttattttctcacgagccactctatgaaccttacgttatctcgatgtacctgtaatgagttagcaattactacaatccaagtcaataaaataacaagttggacgttacgttataaaagaaaatcaaacttatttgtgtgttcctaacaaacgcatgggataataacaagagaataaaagacagagtgataggatcaacggctattgtgcgtaggagaacacagctgctatataagccgcgtaacaggtgattactctgactacgacaccaacaagaaaaattctctcaaatgtgggcagttaagttagacacgtgtaaggtcgcgattcatggaggagacgtgctcttcccgctttttgtaattatttattactgttgtcataaataaaacactaaaaaaaaattaataaaagggaaaatacaaaacgtgatttatggatcaaatttgcattggtggtggagttttggttatgtaagacccacaccgtgttccctctatctaacgccgttaatcctcttttttcccccaaatcataccgttaattctctttgagtgctaaaatatcacgccggtctatgagattaaaatagtagactaattaatagtgctaaaaatacataaattaatgccaagagattcatcttaaaaaaaaggatatatgaaccaactaaatggtataactgaaagactatcataatcaaatttcatctgaacattgatttgtttgaactaattaattttaggattttacgttttcataattttttattttatttgaacatcttgtaagggtaaaatggtaaaaacaggagtagtaagagggtgaaatggttatttcaagtgtgaagcgtggggacgtgggtgacggtggtgatctgaaacagtggtctgccgttaaaacattaaattaaaacacgtgttttaaatgtctctatgttaattaatactataagagtatattttactaatttccgtatctgcaaccagcgaaaaaaaagtaataaagaggtcctccatttcttcctcgtgacaaaacgcacttggcagagaaagataaacaagaaccctaagtttttttataagattcgagaaaattcaacaactcaggaaggaagatccttttgctccaatttctcaatcgaaacgatttcaatttcggtttcaacgatg

SEQ ID NO: 21912 - DNA, 3003 bp, Unknown; identical to SEQ ID NO: 21911
  misc_feature (1)..( 3003): 2750-1469P.txt file - cDNA_ID_2037333; gDNA_ID_2684202; Annot_ID_191249

SEQ ID NO: 21913 - DNA, 3003 bp, Unknown; identical to SEQ ID NO: 21911
  misc_feature (1)..( 3003): 2750-1469P.txt file - cDNA_ID_2037333; gDNA_ID_1971889; Annot_ID_176808

SEQ ID NO: 21914 - DNA, 3003 bp, Unknown; identical to SEQ ID NO: 21911
  misc_feature (1)..( 3003): 2750-1469P.txt file - cDNA_ID_2037333; gDNA_ID_2684202; Annot_ID_137224

SEQ ID NO: 21915 - DNA, 3000 bp, Unknown; identical to SEQ ID NO: 8814
  misc_feature (1)..( 3000): 2750-1469P.txt file - cDNA_ID_2037366; gDNA_ID_1971893; Annot_ID_176880

SEQ ID NO: 21916 - DNA, 3000 bp, Unknown; identical to SEQ ID NO: 8810
  misc_feature (1)..( 3000): 2750-1469P.txt file - cDNA_ID_2037390; gDNA_ID_1971893; Annot_ID_176873

SEQ ID NO: 21917 - DNA, 3003 bp, Unknown; identical to SEQ ID NO: 21495
  misc_feature (1)..( 3003): 2750-1469P.txt file - cDNA_ID_2037583; gDNA_ID_1971974; Annot_ID_177584

SEQ ID NO: 21918 - DNA, 3000 bp, Unknown
  misc_feature (1)..( 3000): 2750-1469P.txt file - cDNA_ID_2037724; gDNA_ID_1971948; Annot_ID_177298
ataagattataaattttaaaataatatgtatgaaattgaatataaatattcaaattatgacacagtactcagtaatttttttttttaaatctacttttgacccgttatagtattttttcatgtattgaacagtttatattcgttttaaaaaattcaaattgtggcatatgcgaaaaaactctaattatttttttataacgatgatattatttttttcgcaaaaatagaatcatataaagatgagaggtgaactataataattaataaaaaattaatatgataatttagatatcaaatctaatttgttgattttaattggttacttttttggaaattaaaaatgtatttcgtttttgagttaaatttaattaattaaattagtatttgactttttaatttttaaagaaatgaattaatttactctttaaaattttatttctaatggtatacctatgtaattacttacaaaaaataaggttacattttaaaaattaatatgataatttagatatcaaatctaatttgttgattttaattggttacttttttggaaattaataatgtattttgtttttgagttaaatttaattaattaaattaatatttgactttttaatttttaaagaaatgaattaatttactttttaaaattttatttctaatgacatacatatgtaattacttacaaaaaataaggttatatttaaaatgtactttcccaaataatatagtaggataagtagattctctatttggtatttatattttctcttatagaaagaaatctaatcatttttatgatatttagattttctatttgtactgttgttactcacttcttactttcaagtttcaaccaacaagtttctcaggattttaatatttttttttggtcaaatattttttggtaaaaaaaaagaacattattccattttaaaaataaaaataaattattgtttccgatctttgaaacgctgcgtttaaggttcagggttttggattccgacacggtgaagaacaatgggatccattcctgctatcttcttcctctgctacacctgagaaaccctgaaaccctaattcttcagtaattagtttccaaagcagttaattttgggcggaaaatgtggtcttcgagaactctcaagtatattttcaggctaagacctgaaccaatttcttcctcatcgtcttctgcgtattcgctctctcgcatcaccggaggttctccaattccgtcgcagcagcaacgatcgattacctccacggcgccgcttaatggatggatggattcgatcaaaggtgtttttaccgggaacaaggatactcctttagaagaatcaaatctacccgttgaagctttcactcttctccgtaagtcttacatggatacgtgtgattgactgtaatggtggatagatcgatatactcatcaaagctattctctttggattgaaaattgaatttaggatttgctgatgaattgaagaatgctagacggttagggaaattcaagcagtacattgtgggacgaagcagcgaggccacttttgctgatgcatttgagaaacaagaagctgttattagatatcttggagctcttgatgctacaggagaggttggtttctttcttagcatactagagtccagctatgtatctgtcgtttctatcacacacacatgacttgctaacaatttgcagaatccttgaaaacaagaatttttttttggtacgttagtcaatgtctgactgtggcactaggtttcttgatgtgtagaatctccaagcgagtcaaaagcaagatgcggctaaacattgcaaatgcactataactgatgtggagaatacgctgtccaaatttacttgggccaggcaagctcacaagaagatgacagagttgaaagaaggaggcaaaccgttaccaaagaatatgggagaggtattcttctcactttgtatactcatatgcttttttagctccataagctcctatgtatgactgtgtggtcacgtttctcatttcttagacttagaatagtgtctaatgagattttgcaataacacgctcttcttcgttttgatcatcctctaaaaaaactttaagtttctacacctaactaattcccggctcaagaacagggttcccttataacaagagctcgtttgtaacttggtgtttttggttagatttgatgttcattggttagaaacaggagtcatcttgcactatgttggtattcttaagattttagtttacatttaggcagtttgttacttgttggtttactgtttccctttgtcctgcatccatttagctagtagttatgatgacactaaattgttatattggtctattgaagctgcaaaaaatgatggggtcaacaccaatggatctggcgagatcaaacttagccaaaagtgggcagatcagccgcaatgcactttgtccctgtggttccaaaaagagatataaaaggtaaaaactttgaagagctttcctttttcccggcaaatacataagactgttaatcaaagttgcacttctatgtaaattcatcattttgttgcttttccatttatcgttgtgttgatatatttgcactctcttcttccttgaagatgttgcggaaaggattgaagaacacagaagttgatccaaagcatctaaagatacgagctttcttttgtttgactcttttcttggcttcatttactatttaagattgtagtatttgtatttttttaaggttatcccataatcagttcatctgaatactttatttttgaaaaatagttcataacctaagttaaagtcacatgtttgctaagtatatcatttcgttgaaagaaacccaatccaacggctacaaaacagaacgtacaatagtgaatagttgatggtcaaacttgagagcagtctaaattcaaatccaacggttgagatctcttgaattgatctaaggctaaaaatcgaagtcatacgtcacgaaataagaatg

SEQ ID NO: 21919 - DNA, 3000 bp, Unknown; identical to SEQ ID NO: 8942
  misc_feature (1)..( 3000): 2750-1469P.txt file - cDNA_ID_2037739; gDNA_ID_1971948; Annot_ID_177292

SEQ ID NO: 21920 - DNA, 3000 bp, Unknown; identical to SEQ ID NO: 21479
  misc_feature (1)..( 3000): 2750-1469P.txt file - cDNA_ID_2037800; gDNA_ID_1971953; Annot_ID_177398

SEQ ID NO: 21921 - DNA, 3003 bp, Unknown
  misc_feature (1)..( 3003): 2750-1469P.txt file - cDNA_ID_2037860; gDNA_ID_2684231; Annot_ID_192278
ggacctatgaactgctcttttccttatttggtaatgtaaatgcaccatatgaagagggcaacatgttgtcccaagtagactgttgtaaaaggattaacgctatagaaatggacatgatgagaaatggttttcagcacagtcctatctcaaggctgaatgtggttagtttctgctccatatagataggtcttgacctgttttaagcagattaatcaaatgtaatattaatctggaaaatcccttttaaggcgatactatcaatctttacttcttcattgtgtatgtttgtgttatatatcagaacaatggacttatcgtttacactttcctttttctttcccagcttagagctctcggagctgaaggtatggtgaatgagatgatccgacacctgcaaaaggctgagaacctcagtgctcacagcaatatgtatctaggaacgcctacatacaacatagtgcttcattcacttctcgaggcaaacgaagtaagttttcatggtctaatagctttatcaaatttccactggaccagcatatatagcaatattgatcgctacttaaattacatgcagactgacatggtgatcaatatattcaaacgtatgaaatcatgtggctgccctgcagacgttgctacctacaatataatgattgattgttgcagccttattcactcgtataaatcagcttgtgccctagtttccatgatgatccgtgacgggttttctccaaaagctgttacatttactgctctgatgaaggtaataacaaagtatctgattacaattttaaaagtttgctgccattgtttctcaagaacttgctacaagtaagtattcagttcaggatgaaagaattctacacacagtacagacacataccaaattttcttgaaccatcgctcacgctcagaacttccaattttttttttggaatctagcagcttattgctgttcatttaattttaattaactaaagctgtgtatcctcttagattttgttgaatgatgcgaatttcgaggaggcactcaatctcttggaccaagcggcattagaagagatacatcttgatgtcttatcatacaacaccattttgcgtaaagcgtttgagaaggtaaagatatttgttgtaaaaacgcttaaagtaatgaaagtgaataaactgctttagtatacacataacttttgtctgcagggaatgattgatgtgattgagtacatagtggagcaaatgcaccgagagaaagtgaatccagatccaacgacatgtcattatgttttcagttgttatgtggagaaagggtatcatgcaacagctatagaagctttgaatgttctgagcttaaggatgctcaacgaagaagacaaggagagtcttcaggacaagaaaatagagctagaggaaaatttcgtcatgagcgaagaccctgaagctgaaacaaagataatcgaactgttcagaaaatctgaggagcatcttgctgcagcacttctgaatctaagatggtgtgcaatgctcgggggccggataatatggtcggaagaccaaagcccctgggccagagcactctccaacaagtacggttaataggtagaatgggaagtgttttcctgaataagagctggtgttgattatctgccatttcactaagctgctccgttttggttttgtatcctatacaaactagttagtgacaacacagttttggaggtcaccaatcgattcggttagatgagacggatcaacaatacggttagaagcatttttaagcggctacgaaccacctaaatacaaggcgacttgcgaaccatcaaatgcgagttttgttatttactttagattcttactgtaacttttgtttatttttacctttcaacaactgtgtatcaaagaattagccaaagatattccaattgcacctggttatacaaagttataagtatgttttctgaatatggatttaaccacttttgaaataaaggtaacaagtgcaatgcatatgatattgaaacttgatcacttgaaacaaagaagagaatatttactgagaaaacataaaggacagatggaaacgacagaaacaaacttaataatgttacaacttgctcctgtttttcttttgtagtttactcatccaaatacaaatcactgtccatagatagaggaccaatcctttacttagctgatttcaaaccatagaataccaaatttctaactaaagtatattgtacaacaatgcaaaacaaaaaataatgatactttcctaaattttaaataaataaaaagaagaagatattttctcttttaaccaaaatgatttatgtttgttacttaattacattactcactaactattatcttttacttaataactgaggccaattctcttcttctttgtcaactattagggacatttgttttttttttggccgacttggggacatatatctttgagtgttatatgtatgtgtattccattgattcatataaaggccctgataataatgtttttatcaatgtgataacaactaaagttaggcaaatatgagtttaaccgaattacgtataagctaatactcaatttaagactagtaaaaaaaatcaatgctgccgactgccgtcattaaagattttgatattaatctttgctttattttaccctaaatgtataatgtaagctaatatatatcaaataattgttagtcaaaagtcatcaaaattaacagatttttattaaacagattgtaataagatggaaacctctctataagaagtgctcaaaaacaaaggaactcaatttctctctctctctgatgattttgtttgtttgaagaaaagagaatattgttgtttgtctctcgtgatcgaaacaatgctttgtgattctcaaatacagtaacattttcaacatgctttgattccaaaaatccaaactttcattctctctctcaatctctctatatctccgagcagcgaggtagttgcacggcggccgccatg

SEQ ID NO: 21922 - DNA, 3000 bp, Unknown; identical to SEQ ID NO: 9570
  misc_feature (1)..( 3000): 2750-1469P.txt file - cDNA_ID_2037860; gDNA_ID_1972155; Annot_ID_179466

SEQ ID NO: 21923 - DNA, 3003 bp, Unknown
  misc_feature (1)..( 3003): 2750-1469P.txt file - cDNA_ID_2038322; gDNA_ID_2936586; Annot_ID_195118
caacattcatatgtggctcttagtcgacgaatatgtatgcgtcggctaatttggaaaatctgatagcggcatcccaataactatactcgtaatttagcaagatgattacatgcataaccactctgacttataagagcgagacatgtatatagtgtagagtgtacatacgtaagcaaacatcaatcaattttgtcttgattggtgatggtatattcattttttatgtagcatctctagatgctttcggataaaggtgatatgaatatgtttacaagaaagagaaagaaaatgatatatttctgaataatgtttttttggataaatcctcaataatgttgtttcgaatctatgatctctacaatattattaaacatatatacctacaaatttagcatctatacgggtaagacgaccattcatatatataagggatcatgaagacaacacaaataagacatccacaaataaattaataagccaacttggtcttaaaaatcaggcatcttattcttaacaaactttagctgatcgattagtatttgcactaaccaaagaaataataatttagtttactaacataattgcatatatatatatattatacaattagtagagtggctataaagcatgccacatgcacattctttaatggacagacatttgaatattgaagagtttatcgtaaactaaatgtcatttgaaaactgctaaaggtcttttattttatatactcacataatcacatcaagaatatgacttattatattcatcgtttttggtcgataataatgattctttacaataaggacatgttgagcatgtttataacttatttaatttgactcgttgaattgttattattttgttaatatgcttagattccacatctaaaataatatctaatgcagatcatatgtaatgcacattaaaggttttacctccgataatttaatattccaattaattaatatgcaatggcagtgtaactaacggcagccgttagttaatggagtcggttgcttgcttagtttttgttctcgaagcttgacttttgaaacagaatgctgtttaacctccttaaacggaatattctcttttttagtactttgattctattcctctatataaacctctctctctctcacgaatcagagatacgaagaaactaacaacaacaagaaaaaaggaatattccgatgaccagagaattcgaactggaaaacaactaccagctttgcgacgagatcggcagaggtagattcggaacaatcactcgctgtttctcacccgcgactaaagaattctacgcctgcaaaaccattgacaagcgcgtgctcatcgacgcattagatcgcgagtgtatagagacggagccgaggatcatggcgatgttaccgccgcatccgaatatcatcaggatcttcgatctctacgaaacagaggattctcttgcgatcgtcatggaattagtcgatccgccgatgacgatttacgatcggttaatctccgccggggggaggttatcagaatcagaatccgcctcatacgcgaaacagatcctcagtgcgcttgctcattgtcaccggtgcgacgtcgttcatcgggatgtgaaacctgacaacgtcttagtcgatctcgtaagcggcggtgttaagctctgtgatttcggatcagcggtgtggttaggcggagaaacggcggagggagttgtgggaacaccgtattacgtggcgccggaggtagtgatggggaggaagtacgacgagaaggttgatatatggagcgctggtgtagtgatatacacgatgctagctggagaaccgccgtttaacggtgagacggcggaagatatatttgaatcgatattgagagggaatttgaggtttccgccgaagaagtttgggtctgtatcatcggaagcgaaggatttgttgaggaaaatgatatgtcgtgatgtttctcggcgattttctgcagaggatgctcttcgtaagtcatcttttttttctcgattttttttttttttttgagtttgctcatcaatttgtaatggtgaattgcaggacattcatggatgatgaacgttggaaacctccaaagcaattagtcgaagcttttcagatatgtgattagagagtgtaattagagaagtcgtaatatagatgtgagtgtgtaattgtttgattcgaatagtcaaacgtagttgtgtgtttcagcaatcttcctacgttttgtcactagagaaagtatgttgaaaactttttgtaacgattcgccagattcagaataaaattgattttgagatcattgttgagagttaggtcaaaatctgaattcgattatttgctccccaagaaacaaaaagaaaagattactatggttggtaaatctgggccagtagaagggatctttcggaaattgggcctaactgatgaagtttagatattttgggctagatttgtcgaattttggggcccgtttcaggctaattatgatttgttcgagaaaaaaaaggtttcgaagtcaatgcaaaggcaaatggagttcaattattctccagacctggttttcacattaactaatactcaagtaattcgtctagactctaatgtatactagggtttttaaactaaaagggacatttcgtttttaaaaacagccgtggactgatttactaaataattcttttctatataaaaatatcttatagccaaaataaaatattattagtatatatgtgaaagaatatccaccaatgttaagaaacaaatctttttttaagtcaaaataaaatatggttggtatattgatatatggaagatacatcaatggtgagaaagagaaatgtcaaccttgaacctaaatgttctataaattcatcttttacttacaatccagaaaatcacaacatcttttttgaatagattttatagctgatacaacgagcaagagaaaatggccatcacaaagacttcagtgactcttttacttttaataataatg

SEQ ID NO: 21924 - DNA, 1705 bp, Unknown; identical to SEQ ID NO: 9363
  misc_feature (1)..( 1705): 2750-1469P.txt file - cDNA_ID_2038322; gDNA_ID_1972105; Annot_ID_178687

SEQ ID NO: 21925 - DNA, 3003 bp, Unknown; identical to SEQ ID NO: 21923
  misc_feature (1)..( 3003): 2750-1469P.txt file - cDNA_ID_2038322; gDNA_ID_2936586; Annot_ID_143873

SEQ ID NO: 21926 - DNA, 3000 bp, Unknown; identical to SEQ ID NO: 9147
  misc_feature (1)..( 3000): 2750-1469P.txt file - cDNA_ID_2038391; gDNA_ID_1972013; Annot_ID_177858

SEQ ID NO: 21927 - DNA, 3003 bp, Unknown
  misc_feature (1)..( 3003): 2750-1469P.txt file - cDNA_ID_2038414; gDNA_ID_1972013; Annot_ID_177847
aacaacgaaggaaaggaaaacgagtcgtcgtgcggttaggaaaccggcgacgagggtttttggtggggccaccgcggatggttatgcagagatggaggatgaacatgggaaagccgatgaagatgatgagaagtatcattttggggatactctcaaatggtggaaatgttaagttcttagatgcttacctttggtctttaccaatcttacgtcctcacttgtttccactgtgttgatttttgtaataccaatttctacttgtgagactgtaatatttatttatcttgttcttattttttttgtgtgaatcaaaataatcggcttcataataaatctttattcttgctagcttcttctttaagagtcgaggttaatgaaaacaactagttttgagtttttttttttgtgtgtcatggattactaatttactaccaacaacaaagtaaatattatgctagtgaaagaaaaagaaaaaaatgatgcatgaattcttaaattttgacaatattaaacatgaaattgaccaaatatttcatttttctcaaaaataagaattttagtttgtgtatatatagaatttagttaacaattatgtataacaacaaaaatgctaaaaatctatataaaagttactattagtttaaaaaaaaaaatagtattagttatttaaaagttattacttattagtgtttatttacaaatagtattaatgatttaaaaggatgaaagatataattcttattaaaggacgaaaataataattttggacagatttgggttttatatctgaaagactcaaaaacctatcgtcatttatcttcaacaggcggaataacggagatggccgccattacagctctcactctccgctctcctgtttatctcccatcatctgccacaagccctagattccatggcttcaccaatcaaccaccaccagctcgtctcttctttcctcttaaccccttcccttctctatcaatccaaaaccctaaatccatccgaatttccgcatccgcttcgccgataacaacaccaatcctccagacggagaagtcaacagctcggtcatcgacactcaccgggtccactcggtctctcgctactctcgcggctttagcaatcgctgtaaccagagtcctagctcagaaactctctctcgcaatccagacttcaagtcccgtaatcgccgacgggttacgattctctctcagtaccgccggacctgtcttcttcgcgtctctccgggatcgtcctccgggatacttgaacacgccgctgacggttgttgcggtggggataaagaagtggctagacatttacagtggggtattgatggttagggttttgctgagttggttccctaatatcccttgggaaagacagcctttgtctgccattagagatctctgtgatccttacttgaatctcttcagaaacatcattcctcctatcttcgatacgcttgatgttagtccattgcttgctttcgcggttcttggtacacttggatcgattgttcatggcagcactgggtagaaattggaagacttgagctaatggttttgttgaaacgttcaattgggaaatttctgcaacttgtttcccaagattagggaaaaatcagaatttgatgctgtgttggatgctcgatgagagttgtgagctttatcgtttttgttgttctctttttgactttgattctgaataatgagattttgggttgttgtttatctcctaattacatgttcagactaccgtttattgatggattatctgcgttctctcaactgttgacattgattaagaaccagaaagttaagtattgtagaagaataggcatgttgtgttatctgcattatttttagattttcgatatctagtttaatatgtagtagaatttatcatttgtatctaatccagatgatgacatgtatgtgaatctggcatgagatttgaggtgtttggagataagttcagtatttgcgtgtaacaccttgtcctaggccgagaacatggtgttctttaatgttacttcttcttcttcgttggttaataaaatgtttagtgtggatagaattggtatagagttttgagtagagttcagagtcttattgtttaggcaaaagcaagttcaaggtttcattgaaactccaagggaataagtaatcttaagttcaaggtttcaatgacactgtttctcgaggaaagaaagaaagaaatcagactctttggagtttcaataaaaggtcaatgaaagaaagaaagaaactagaagtttgaattggatcacaccatttgccaattcaattataaaattatgtacgatctgacaaaatcaaactcgttgaactctaacatgaccaaaatctccccaaatccaaataccgtaatcagacatggtcatcatacaatgcgaaaaaaatagtacaaccgagttagattcaatttcggttcataaccggtttagaaaccgtaatcggacaatggacatggtctcatcacagtgcagttaatctttgaactacaatcttacaaaatcacacaagttcgttaagttctaaccagacccggcccaattgggtagggcaaggtgcaagtgtataaggctcatttcctttttaaaaacaattcatataagacccaatattttttaaaaatacagtaaagatccaattttgtttttattatgaatctagagcccaaaacaattaaaactgtaacataatgaaaagtccaaagcaaaaaaacacaagttttttccctaatacttttatatttattgggccggggctggctctatcatgactaaactcaacctcaaatccagaaatcgtaaccagacatgaaatcacaagagaattaggaaaaccgagtaacgttcaatttcggttcataactggtttagaaagcagctctggtataggtcgttttagcttcccgacttcacttctaatctcagactctgcgacgctctttacaaaccgccggaaaaccgccatg

SEQ ID NO: 21928 - DNA, 3000 bp, Unknown; identical to SEQ ID NO: 9149
  misc_feature (1)..( 3000): 2750-1469P.txt file - cDNA_ID_2038459; gDNA_ID_1972013; Annot_ID_177829

SEQ ID NO: 21929 - DNA, 3003 bp, Unknown; identical to SEQ ID NO: 18613
  misc_feature (1)..( 3003): 2750-1469P.txt file - cDNA_ID_2038467; gDNA_ID_2926128; Annot_ID_196777

SEQ ID NO: 21930 - DNA, 3003 bp, Unknown; identical to SEQ ID NO: 18613
  misc_feature (1)..( 3003): 2750-1469P.txt file - cDNA_ID_2038467; gDNA_ID_1972020; Annot_ID_178050

SEQ ID NO: 21931 - DNA, 3003 bp, Unknown; identical to SEQ ID NO: 18611
  misc_feature (1)..( 3003): 2750-1469P.txt file - cDNA_ID_2038493; gDNA_ID_2926128; Annot_ID_196770

SEQ ID NO: 21932 - DNA, 3003 bp, Unknown; identical to SEQ ID NO: 18611
  misc_feature (1)..( 3003): 2750-1469P.txt file - cDNA_ID_2038493; gDNA_ID_1972020; Annot_ID_178041

SEQ ID NO: 21933 - DNA, 3000 bp, Unknown; identical to SEQ ID NO: 7690
  misc_feature (1)..( 3000): 2750-1469P.txt file - cDNA_ID_2038493; gDNA_ID_1621157; Annot_ID_173562

SEQ ID NO: 21934 - DNA, 3000 bp, Unknown; identical to SEQ ID NO: 9187
  misc_feature (1)..( 3000): 2750-1469P.txt file - cDNA_ID_2038545; gDNA_ID_1972020; Annot_ID_178022

SEQ ID NO: 21935 - DNA, 3003 bp, Unknown
  misc_feature (1)..( 3003): 2750-1469P.txt file - cDNA_ID_2038555; gDNA_ID_2926128; Annot_ID_196752
ggttatacataacaatattgatattaaccattcaacttcttctacgtgaggaagatatctgttgaaaatcacactttcactctcaaactacctcttccaacattcttttgaggtcagcactctcactctcttgtcactctgttttgcttttgttttctttagagagaaacaagaacacgtttaagagcatgatgtcttgataataaaacttgggtgattctcttacaagatacaaacacacatacttattatagttttacttgaaacacttacacacacaagcatgctcttaaacgcataattaactctgatttcttgcaagctactctactacatattgggactctaacaacaagcatgctcataaacacaatttatgtttctttttatttcctcacctactttgcagtttcaagatgcagaatctcttaatttttttattatagacataataacttctgtgaaagattgtaactaaatgtatatgttttattttggttgcatttggtacttgagaaagaggaactagtgtcaccagaataactcaaactgcacgtaattatcataaacaataaatatacaatttacaaacatcatttcagaatccattttgtttaatgaggttgaacctatcaccatataagctatttagaactcttgttgaatatgtttgtgaatccattctattgtgtgtttctttgttttgtaataactctggtcatgagttttgagtagagagacattaaaaaaagaagcacatttacaaaatcctaaaagttcattacaaccatcgaccaaaaggtttgttagacaacttatcttaatcttgttatagctaattctcacacgagaatccaaaagactaaaaatccataaacgtagatagaaagataaaccctaagatagataacaaaagagggcattacatccttagattaaccctatacaatccctaagatagcttcttcttcttcttcttcttagttggtttgagcaagcaccgaagtcacatccttcaaaacatccatctccgccaacaacaactcacatttcttagcgtccacaaccttcatcttctcttgaatcttcttcttagtctccagagacaccttgctccacttcttcttcacagaatactcatccaaaccgagattcgcgataaccggaacaagaaaagactcctcaaaccactccgaatctgctccaagaatcacttgctcatcttctataaccaaaggtttctccaccttcttctccttgctattagccttacccttaacaagaatagattcatctttcttcacaggagattcaacgttcataccatcagatccccaaatcaaaacagccaaacccaaacatttcttatcatgattcgattcaccacttttgttcttccggttaacaaaatacttattctttaatcttctaatcttgtcaaagaactggacatgactaacatcaaagcttatagatttcttggcgatatcaaaaaacgcattcttatgatcccaaggacttgtacctgtctcagctttgaaatcaatcactgcctgtagaagagagatctcatcttcttcactccatactctctgaggattcgcctttttgttatcgtcctctttcttaactcttttgacatgcatgtcccttgaggtgcttccttcaccagctcgcttcttccctgacttcaccgccggtgattcagcagcaccttctttcttcttccgcctggttaagacgaatgactgcttctctgagtcatcagaagaatctgtcttagaattcacagcggcggaaggagattttagggttttagaggaaggaactgtgacaggatctttgggtttgctttcttcagaagaagacttaaagatctcttcagaagaactctcaacttcgcttgaagaagcggttgctggactttccaaaggagccattggattttcttctttcagattctcgggtatgagtaccaagtgggaactgaagggacaattttagggtttgtgagttgcgagactttttatttttttacactgtaacatctcttatatttaagaaacaattaaagtaaataaagctcaacaacaaaaactaattaagcccaacaaaataaataaaccatcatccttatatgtaacactgtaacatgggaaaaaaaaacaattttttgcccaaatgtataagaaatttgtataacaaaattcatactagattttcttgttgtaattcttggtatacaaaatgaaaggtttctttgttgtaaaacaaaaatatatgtactaaaagtaattttacaaagtcgctttatatttttacatttagaaagatcatttgatcaagtgggaaacctttattgaaattaacaaagtggaaaagattgtaagtagtgaaatttagtgtcatctatagacaaaaaaaatgtaaattagaatttaggaatatgaattcggttaggattagtcgattaggtttattgagtaaactcaataaaaattactgtagtaatacttcagtactcggttcggtttatagttaccgaactgaaaccaaacgattattctaatttaattgaagttaccaatttttatcttaagtttaattaaaattattgaaaaatatgaactctctcttacagtaaaccgacctgaaattggtttttggttccaatttgacaccaatattttatcttgaaccaaatcgaaatttatgctattaaaattgaaccgagccgaactttactttcggtctacttcggttcaagaaatttcaatccaatacatatgaattctgaaagtcctgaaccgaaccagagtgtttaaccacaataaaagtctcttcaatggtctcttcttgagtatatcaatggtctctcatagtttcaacaacaccaataaactgtcatcttcaagttggagtttattacactcgttccttcaagaaactgtaccgtcgactttcagatttagccatttaggacttctcaagattttgaaaatg

SEQ ID NO: 21936 - DNA, 3003 bp, Unknown; identical to SEQ ID NO: 21935
  misc_feature (1)..( 3003): 2750-1469P.txt file - cDNA_ID_2038555; gDNA_ID_1972020; Annot_ID_178018

SEQ ID NO: 21937 - DNA, 3000 bp, Unknown; identical to SEQ ID NO: 7704
  misc_feature (1)..( 3000): 2750-1469P.txt file - cDNA_ID_2038555; gDNA_ID_1621157; Annot_ID_173587

SEQ ID NO: 21938 - DNA, 3000 bp, Unknown; identical to SEQ ID NO: 9186
  misc_feature (1)..( 3000): 2750-1469P.txt file - cDNA_ID_2038561; gDNA_ID_1972020; Annot_ID_178015

SEQ ID NO: 21939 - DNA, 3003 bp, Unknown
  misc_feature (1)..( 3003): 2750-1469P.txt file - cDNA_ID_2038779; gDNA_ID_2214546; Annot_ID_185426
tggattgaaaagagtgataaataaagtgatgtttgtacccttctttgatagaaatggaagcaatagtaacagtcaaagcgagaatgggatgattcatatcaatgccgtgatgatgtccactatgaattacctcaggagctgcggacagtgcaatctgcaaatgagaaaggaagggagaagaactctgtaaattgaatttattatatcccaaataaaacaaacaatggaggatcgataaaagataaacatgaagtgcaatatattctcatacaatgaagcaaggttgtggaggtggagatgagtaattaaaaaagaaagagaaaggagagagtggtggtcatacagataaaaggtctaaagcatgccaggcaataccagagccagtagccaaaagcatggcagagatgccaagtgctccaagcgtttcaaatttaccatgacctgcccttgtatgcatggggaaattcagttcattgttattataatgtatttacatcaaaggaaagagaagagaaaaggtaaccataaggatgttctttgtccttgggaacatttgcagctctgtaagacactagagcaacaccacttagaacctgagatataatgatgatgatcatgtgagaaacaaaaccaaaggaaggatcatctctcgtcctcagcaaatgagaattttcattaccacatcggaaacggaatgagcagcatcggcgataatggcggtgctgccgcagagataaccggtgagagcttttgcgacagataaacctatatctgcggtgagacctagccggaatatcttctccccttcttctccaggcttttgatattgctggtgatgatcagggtgaccaaaatgccaccttctggagaaatcgaaactaggtttttgcgatgaagaagaagatactcggagtggtgatgatgatgatgatgatgatggcagataacggcaagacatataatatatagtagacctacaaatcctcgtcggattcaggatttgaaatctgataatacccattttgatttcagctgagaaaccctctctccctcttttctccgatcagtttcccaaattgacttctcattcattgcgcggtaagatagacggcgctcatttttttaccgtttacttagttaccttttcaccgacgattgtaaaattatactcagtcaatgatagcttcattaaaggccccccatactgttctttcatattgggccaaatcaaatgttgggagtataacaaaaaatattttttttaaaacggtaatggttaattaacaacactgattgatttggtctctcttataaaccagaaataaccgattctagaatcgaaaacccgaacactgagtgaggtagatattggccggaattagagttgtctaccggcggcatcagcgacaaatggaatgtatggagttttgccgagtaaggagctgacgactccatacacaaaacacataaagctgaagacgaaaacccccgtgtgcccccacatcatcgccttcattccaaacccgcctccttgacccggatccagtattcgggtcagcagcaccggaaccgccaggagcacatccagcgtcaccgcctgcatcgcgttgaacctcacgtacctactgaaactcgtgttcctcaccactcccaggtacagcccgaagaatgccacgaagctcgcgtacggcaccgatctgtacaggttcaggattgggaagattggctcgaacagcaatcccagccttgggtactgcgcgaacaggaaccgcccgtactgcagagaattgaagaacggcagcgcgtacgacgctatcgaaatcacgcgctcagtcgccggcgtcggggtgtaggaggcgcgggtcgtcaaggcggttgcgcgtctgctagaggggcggatcgagaaggttgaggatccggggaaggagaggctgagtggtctgcatctgggagccgacaggggattagttagggtttggtggagagaaaggcacagagacgccattcttttatttttttgtttgggattttcgctgtttagtcggcagtgtcgatttgttgacaagaagagcaaaaaaaagtaacagctcaaacgctgccgttttcgaatctaaaatttggcccgcgcacactaacaacataattgggccgacttagctatataaatgggcctatatatggtactagagggcttcgtgaacaacagaaggtttttgtggcgccgacaaatgggaagcggaaacgaagaaatgtgatggcattgattgaaggcgagtcgagtcgagtcagactcggtcagagcgagttgagagagcagttaagaaacagtagcaggtagaaatgacggatgtgtccccactttcggaccagaccactttactccccgagttagcaagtgaagtgagaaaactgtctgtgtgtcacatgttggccactcgcgcgctatccccgcccaaggaccttaccgtcattttggttggaaactagtaaaaattagtttatttattttttgtttgttgttttgtcaagtagtatatttcttggaaatatcttcccttttctgggatgcttttacttggcgacccaaggaccaagagagaaccaaaaataaatctcacaaaacaaattaatacaaactactactatatactattattatttaaaaaagaatatgagaaaaagaaattgaaagctaaaaaaagaaacagtagtgcagagggcagaccgtacggtattcctgaagagcgaaagaagagagagagagagagagagaccgaccaaagaagaagctcctctcaatcactgtcgaagcatctcttcttcttcttcttctttttttcttctctctcagagcttttctaatcggcttctccggtaaatctctgtcgatccaccgatgagcttttgacatttactctcttattagtttcttctagtttggtgagaggagtttttactagtatcttttttactgtacaccaaatccctaaatttaaggacatg

SEQ ID NO: 21940 - DNA, 3000 bp, Unknown; identical to SEQ ID NO: 8334
  misc_feature (1)..( 3000): 2750-1469P.txt file - cDNA_ID_2038840; gDNA_ID_1971748; Annot_ID_175257

SEQ ID NO: 21941 - DNA, 3000 bp, Unknown; identical to SEQ ID NO: 8334
  misc_feature (1)..( 3000): 2750-1469P.txt file - cDNA_ID_2038840; gDNA_ID_2926195; Annot_ID_141255

SEQ ID NO: 21942 - DNA, 3000 bp, Unknown; identical to SEQ ID NO: 8334
  misc_feature (1)..( 3000): 2750-1469P.txt file - cDNA_ID_2038840; gDNA_ID_2926195; Annot_ID_201403

SEQ ID NO: 21943 - DNA, 3000 bp, Unknown
  misc_feature (1)..( 3000): 2750-1469P.txt file - cDNA_ID_2038893; gDNA_ID_1971748; Annot_ID_175239
tttccgcctttttgtgattggataattattgaaaaaattaagaagatttcacttacattgttgtcaatattttttaaaaaaacataaaatcagattaaacataacttatagaggtaagttttaaataattgtgttgctgtagttaaaaacttaattttctgaatcagtatgaataaaactttgagagttcctcatcatttcttaaatttcttaattcttataatgatgatgatgaatagttaaaaaaaaacaaatgtccgaatatttgatattaacattattcataatttttctggatgattttaacattttacaatgataacctattgtatacaatggacggatctatagatcacaatgaccgacaacttaacatacagtaataatccgcaacacaaagatcatgttagaagggtcaacttgcagcaagaacctccaaaaaaactaacctttaatgtgtgggaaaaattgtatagtctgggaattgaagacgttaccttatgtacgagcactaacctttaatgtgtggaaaaaattgtccacttcgaatcgtatatacaattgcatcgaaatcacgaagagttagtaagacaacattgtaaccgctataaattcagggccaatctctttcttctatcttgcacataatctttgtgttgtggatgacgttttctcgtagcagctcgatctccttcttcatcctcactttttattcgctgtcataattaatcctacgatctcttcacacgtctcatccttcatcaagctccagagctccgacgaatctcgctcttccgtcgcttcctactgcgagggctggagattgaccgccgagaccaacaatgccggaacctgtagggtggttccgtctcaatgcgaaaactacgttaaaaactatatcaaaagcggccagttcgacaaaaattacgatgtactcgctagttacgccatacggtaaaacgatcaatcttgccggaaacggtaaggacgtgttatacgatgaaacttttctcgaatcttgagtactacaaggctcatggttacggataattcccatgcacactctattattagccttaatttggattttgtgttattatatctaacgttcataatgattgtttgactaacttcgttaaccatcaaaccgggagatttgcgcattcagatctggtttctcggttcaagatttttggtggcggactaatcggtttttgagtaatttgttaaccatgacttaggagagtgaaaaacaatgtcgagaagccatttttaccaaatgagaataaatacctcattctagttaattaagaaaaatttacatgtaatttatattacaaaatacaaatcaatcacaatggcctctcctcacgtccttccgatttttgtatgcatgtgagtatttatttctaattttcagtggtctgtatgaattaccatctttaaaaatacccatagaattcaaattaaccttttcatgataaatatatataatttgaaattttcctaaaagctaaggacatacatactaacaaaattagggggtagtgttaattaatctataaatatggtgatgaataggatagaaaacagtcaaacacaatagttttgctagctacagtgtgataagagaatcatgggataatattaattaatctagtattatttgtttgaactttgaatacattttttaagtatggaaatggatagagatacacatgaaaaaaaaaaaaaatctatgtattaagttaactgctatagttttaagttttaacactttgagaaggtgcatatagtaatcaatgtagtcaagtcaacactacatttttcaacatttatttacttactttttacttttatttctgcttagatgtttttattatgtgaataataaagaaaagtcatgtatacctcgatatatattaacacaagcattacataacaataaagcaaagaaaatagcttttcatttttcatctctaatttacaaaacattagtattctgttgttgtgaattgtgatatatttgatcatggccaacatatcatggtctcattttcttatactcatgcttgtgttctcaggtaatttcatgtttcccacttccaaacatcaaaaagtagttttcatctttacattacattacacatctaagcgtgtacacatatacactatattgtttcacatcataacatatggtattttactttttaatattttcagtggttaagaagggtaagggagatcagactgataagtattgtactataatcattgatccaagaactccatgtgaccttgttgattgtcgcctaagctgctatacggggtacaatggagttgggaaatgtattgcatccaaagctagtagaactcctaattgtgtgtgtacttataattgttaaagtggcaaattctaaataataatgttttataattaagaaaatattttccataataatctatatgaataaataaaattggaagttcttcagcccttcttgtaattgaatatttaatggaaacattgaggtgatgatttcagccaccttattgttaattttcaaaattataaaattaatcaaacatatatagtaatgattggaaactttatagagataattttttaccaactctcaaaactatataaagatgcaaaaagagggagcttataacctaaccactaatgaatacattgctttgccatgttcaaaaacgctgccaaagtgaccgcatctgattagcgtcgtcatagcgcgtgtaatgacaatttgaacaataattcattaaaatatggttatagtataatttttggaaatgttttgatttacctctattattaccaaatcaaattcagccagtgaagacgttgtagttctcaacaaaaatcacgtgggagtgtaaatacgacaataatgttccatctttctatattttaaattcgcgacctatcttcttctttcatccaatagttgaaaaacagaaaaagcctctccaatg

SEQ ID NO: 21944 - DNA, 3000 bp, Unknown; identical to SEQ ID NO: 21943
  misc_feature (1)..( 3000): 2750-1469P.txt file - cDNA_ID_2038893; gDNA_ID_2926195; Annot_ID_141243

SEQ ID NO: 21945 - DNA, 3000 bp, Unknown; identical to SEQ ID NO: 21943
  misc_feature (1)..( 3000): 2750-1469P.txt file - cDNA_ID_2038893; gDNA_ID_2926195; Annot_ID_201389

SEQ ID NO: 21946 - DNA, 3003 bp, Unknown
  misc_feature (1)..( 3003): 2750-1469P.txt file - cDNA_ID_2038917; gDNA_ID_1971748; Annot_ID_175228
ttcacttcaagtggtacagagtctttttttttttttttttttttttgttaaaccttgctttcattcaatggaacatagaacaattacaagaaatagagtttaagaactcaaagattaaagcattacaacaaacggtattccccaataccataaaaagaaagataaagtgcatcgatttgaattccatgagagctttgaggcataagcaaagaagcacagtgcaacatgtgaggtcacagtaaatcgaaggatcatcctcgaaatagtcgaaggacaacaggttggtcacggtcaagggacgtagtgacgttgacaaagacatcgaagctatagatctcaccggggctagctgcaatacccacggaaaaaggatagcaaggattcgaaggactatggttctatagtcggttaaggttagctttaggatccaacacaaaaggcaaacaaatctccgatcaatagcggcatacactatgagacaatgaaacatgatgatggacatagtgatgagcttgaaggcgatagatgagctacttggtgaccattgagcgatgaaaacccataattcaaagccacatttgacacaaaggcaagtacaattcagaaaaattagagagaaggtcttcaagactttggaatgaggccacacattcctagatatagctaaaaccaggattcgcaaatgataaatgaagaaccaaaacctccatggtgatatctctatcaaatggtgtccatggccattgataagaggagatcgacacaaaaagattaatgggcctaacatagaattaaagaaatcagatctgagaataaaagccttacaagttctaaaacaacagatgggcttgggcctgaaaggaagaaatgggccagcgaaagaaactaggtccactggggaaaaccctagtttcatgtcgaggtgccaaaacgctgaggtagagcggcggctgtccaagaaaggcgagatgatttgcagcgcaggagtcatctccgatgagtgaaagatcgttggaagcagactatgaccatggctcaagtaggtggcaaagatccagggggtcgcatccttttctacatgggatagctccgagcacgaatctgtccaaagagctgcagcagaggaatgggagaaggagagagcatgttgcttcaaccttccttccttgatttgtgttgaagagcgtcctggtagagatgcaaggtgaggtagattggttaacaagttatgggctggaataacaaggggaataacaagaggggaaaggatgggaaaaagcttcaaaaggggaaaaataaagaaggaaactaaggtaacgaaatagcgacgaaaagaagagaagttggggtcccgatgccggtgaacagaggcttcaccggcgccggaaagagtagtcgatgagagagcttcgataatcggacctgaaagagaaatagtttttactttagttagttttgtggtacagagtctctgaattggaattgacgttttagatatacaatggtatccatatatatatataccaaattaccaatggtataataccatcataaattcattatcacatcacttttattttagtgaatgaagatgtaaatatgctattatgaaaaaaatttgatggaaaacaaaatcattgatataattgttttcactcgtacttaggaagactccctaatagtaaagcaaagttagacgatattgttttcgtctttggacacgaaatattttgaaaaccttccgacataaattaacggtgaaggccttttaaaagttttgtcgttaaaaatatgatttgacaaatcgacttagttagtgggtttctggagatgtgtactatcatggaaaagaacgagaaagatttttttttttaaaagttgatgtgattgggcccaattagaaaagttttcggtccatacaaaagcctagtaaggttgtgttaactagatcattattaaaaatatttttggttgattagtattattattaattggccgattgactgaaaaataatctgatatggttttgccatcttttttgaaataatcgttaaatcattttataaaactatccacatgtaaaacaatgcatgaatatatacagttgttaatcgtctaatattgttagtttattttgataattgaattgtactattcttgcagctgtttgaatggttagatgttgaatcttacctggtacacaaatcattactggttagagcacagaaatcatatatggaccggcacaacattgaaataagaaccatcttctctaatcaggtaactaaaaaggaggtcacgaaacctcaacgaagatgtgaacgcaaactaactctctcgtcacaactcttaaactcagtctctcgtcagtcgtcacaactctcaaggttttgttttagatttatatgtatgtaatacatgaatcttttgtttttgaacttatgtatacatgaatctaaaacgtgcatttttctaatctaatcaatatcttacctcctttttccaaatatttaatcgacatagtccaaaaactgtatgttcatccataattaataacaacaataggtcttgtaaaacccctttagtatgttgtaaaacctagcaaatctactagatcgcatctaacatatctgtttatcaaatttaacatgtgtaattatctagatttaaaagaatctctctcattttctaaaaaacaaattttatttttctttaacagacttttattttctaaacatcagatttaaattgtatttttaattatcttgatgctatatattgggaaccacgatactaacagactttcgttgtcgcatgtaaaatgttttttttttgtaatcagacttccaaccaccaacttagaaaagtatctataaaacagagaccaatcaagaatacacttatctcttttcttaaaagaatcttttttttttttttacttcattgactctttttctctatctctctagatcgaaagggaaaaggagatagagattgaagatg

SEQ ID NO: 21947 - DNA, 3003 bp, Unknown
  misc_feature (1)..( 3003): 2750-1469P.txt file - cDNA_ID_2038936; gDNA_ID_1971751; Annot_ID_175323
aattagtaattttcttcgaattagatgttgtttctccgtcgaatcgccgtcgtcttctttgtcttcacctctttctccgccgctcagaactccacgtgtcctctggacttttccgtccttgaaccgttccggcgtccgaaacccgatggcgccaccacctgccagtacctcctccaagggctacgcctcctctactctcaccatctccgtcagacgggttcctttctcccgccacctgagtctgctgcttcttgctgggctgctctccagtcttccgtcgccggtttcctccctcgctttgacgtccgatccacctgcggtttccagacgccgtggatttcgcaggggtgcatggacatcaccaccaggtctcaattcgaatcccttatccctaactcctccctcgccaccaccgccatgcgctgtaacacctctctcgagagcaataccccttgcgcctcctgcactcagagcctctccgcgtttcagccctatctctccggtccatccctcggtaatgtctccgactgtgcttcttttccctctatctacgccgctgctttcgccaattccttgggccccaccgacaaaggcaccgccaaatgcttgtttcagctcgatttggcttctcccactagctccggtgctaacaaagtcaaagttctagtttcttctttctctgttttgctcgtcgcctctgttctggttatcaccgcttggttctggtactgccggaggaagaaaagcaagcttctcaagcctcgggatactagtttagaagctggcacgcagtctagacttgattccatgagcgagagcaccactcttgtcaaattcagcttcgacgagatcaagaaagccaccaacaatttctcacgccacaacatcattggccggggaggttacgggaacgtcttcaagggcgccctgcccgacggcacccaggttgccttcaagaggttcaagaactgttctgctggaggggacgccaacttcgctcatgaggtcgaggtcatcgccagcatccgccacgtcaatctccttgccctcagaggctactgtactgcaaccacgccctatgaaggtcaccagaggatcattgtctgtgatcttgtcagtaacggtagccttcatgaccatctctttggcgacttggaggctcagcttgcctggcctcttaggcagaggatcgcccttggcatggccagaggactggcttatctacactacggcgcacaaccctccatcatccacagggatatcaaggccagcaacattctcttggacgagaggtttgaggccaaggttgcggatttcgggctggccaagttcaaccccgaaggaatgactcatatgagcacgcgggtcgcaggcactatgggatacgttgctccagagtacgcactgtacgggcaactgactgagaaaagcgacgtgtacagctttggggtggtgcttctagagcttctgagcaggagaaaggcgattgtgacagacgaggaggggcagcctgtgtcggtggcagactgggcgtggtcgctggtaagagaaggccagacattggatgtggtggaagacgggatgccagagaagggacccccagaggttctggagaagtatgtgctgatagcagtgctgtgctctcaccctcagctccacgcaaggccaacaatggatcaagtggtgaaaatgctggagagcaatgagttcactgttatagccatacctcaacggccaatccctctggtggcttgtagggaagagattgaccgctctgttagtagcagcagtggctcagggaagctcactagccccacgggatatcaggccttctcattcggaggtgatggcccctcagggaacacgaataccacttagatgagatatgtatgttgtagatattaatttagtgtgcattcatttcattctttgatgcttcttctgtcacttatgtaagtacagttgctttttccaataaactcatcttgttgtaacagctttggatgcaatattatacaggcttagaaatatatatatacacacatttcacattggtatcaaatgtcagaccacgacaaaagcttttgttggaaaaagacacgaaagatgcggaggtccatgaagatatccatgtgtgagtgtgcaacactttgattgatccgctccggtgatttctctgctaacgtcattaatcaactttgcaatgacattttggtgggtgggttatcttacattcttttcttttctttttactcaaatttttataaacaaaatctttctgaaagaagaaggaacgatcgagttacataagcaagatcgctgtatcaacagtcacgtcttttaatgttaacaagaaagataaaaaagacagatctgattcaaatggatctgcgtgagttttctgtttttcttggatgattaatgaatgattcacaagaatttcagaaaaaaaaactgagatcaaggttttgacaagaggccaaagacatcacgtgtctgtctctgtccaatccacgccagccactagcatgtgtgtgcgtattcagttttacttgtacatctttcttcttttttttttttaaatgtgaatttgcttagtgtatcttttagtatacacatagtggataagtagtttataaactcatttttgtttgaactcccccgagtgggctcaacgttgtcattagctatattctagtttaatggttatcatcagaaaatctgaaatcaaatttttggattgtaatccatggctgctcttggtaaaggacataaaacagctttcatctcttgaatggtaacaaaccccacaaaggatttcttgcctaaagggtcactcttacccataaaaagttttcacctttaattcttgtcctccgcttttccattttactcttcttgtatgtttctgtcttcttactcaacttttgcttcaggcttcgtctcttttgcaatttttgagttagccaagtgctcaagggagatacataatacctgaagatg

SEQ ID NO: 21948 - DNA, 3003 bp, Unknown; identical to SEQ ID NO: 21029
  misc_feature (1)..( 3003): 2750-1469P.txt file - cDNA_ID_2038951; gDNA_ID_1971751; Annot_ID_175298

SEQ ID NO: 21949 - DNA, 3003 bp, Unknown
  misc_feature (1)..( 3003): 2750-1469P.txt file - cDNA_ID_2038973; gDNA_ID_1971751; Annot_ID_175288
gatcaaggagacattaccgtcttggttcatctcggttcacggagaagaagatgagttgggaggtatggttccgatgctaagaggctatgctttagcctactttgcaatcctgagcagtgcatttgcctggggagtggactcctcatatcctgcatcaaaacgtcggccaagggttctgtggctgcatttggagtttatggtgagtgccttggaagggaagatatcactgggctgtgattgggcgacatggcaagcttacgtgacaggctttgtgagcctgatggtgcaatgcacgccggcttgggtgctagaggtggatgttgaagtaataaagagactaagcaaaagtctgaggcagtggaacgagcaagacttggctctggctctgctttgtgccggcggccttgggacaatgggtgcagctacagaactcattgtggagacttgccatcaacattagcttgacgtctttcaactttcttttctcgactaatctaaactgtgatcatgatcacttttgttcctgagattagctctctcttttttttttttgtttgtctatattgtatattatatttattatttagagcaacatgattcgctatgtgtcacagacactgactggggaaacaacattagattatgaaaggaaatgaagccaagatttttcagatttctttgagacatttttcaattgagctactagtactaagctacaccacggggtttaatttgtgaaatccgaaactagggagactaaatccgaatagatatagatagcctaagggattcggggctgcaacaaaatcactcccactcactgcgaagctcgactatggcggcgacgtcgctggttctgacgtgcgcatcccctctattcagcagccctcgggttatttctgctacgaagaagctgactacagagttgtcgatttctacaggtcagtttcgcggggtttaatttgtgaaatccaaaattagtttgtttcatctaaaatgatcctctgccgatgtctcagctaaattccgaagaagatgctcgggaaacaatgatgaagtgcttctagaaggaatgccaccggagtattacgatgatgttcgtctcctcatcctttttttgtctctcagtctgattttttctaagtcggttggttttttgataccaggaatggcaagctcgacagagagagaagaccaaagaactgcggcggatgcagcgggaggaagaagaagaagaggagagaaagattgaagaataccgtgaaattggcacgaggttgaaggaatttcccgagcaagacttaaggaaagccagaaagctcgtctccagcttcatcagagctgccgaggaagtcgaagaggtaaaaatcaaagtccccttccttccttatacaagcaggcaattattattattatgtataagacaatttctgtagagaattgaagaagcagccgagaaaggagaacttgacgagcttgtcctcatgatcatatggaaccggcttgaccttgctaggcgcgatgtaacatttttttccttgtgagttatgcgttttcatgatgaaatgttcccttagatcctgtgttgcttactttcaggatgagaaggacgccatcagaagtcttgatcttttgtatagaagagtcgaggtaattgtttctcttcattcttttctatgctataagatcttgagctgctgatgctttatatcaccatcttcaaacttactcatttgtcaaggaagattatcaactcgtattagtcagctttaggtgaaagtgaatccttatatcgggtgtttctctatccagacagagatcttaaaacggcaagcaagtcctgcaatgaaactgctgaatgatcttctaaatatgcatgatggctttgaagacgatgcttggctcaaggactgcagaaaacgaatggctgagaccttcccccgagaagaccccttcagcattctaatgccaccgggattcgacattgatatggtgcgtccctttttctcttttttgtttttttttattgataaaaacctctcaacagcaagaatcaatgctgtgtttgtagcatcaaggacagttgcgaccgcccattgagactgagacagacaacacccttctgagagtagactttgtaagagaagtggatgcactgctacaggaagtgaggatagaggaagacgctacaactggtagcaaaggagaagggcttgatcctgaagctatagcacttaagtttaagcaacaggagaagcaacgaaccatccgccaaattgaagccattcttgatttagccctcaacttgaagtggtaggcagttaactagaatatcaatctatacgccataataatttttttaagatagaccctagagttagattgattcaggcgtttttgtttagaaatgaatggagtctaaataataggttttggctaaaaattccaaatccaaatgttgctgactatctctctgctcatagtctccaccacaatcatctcttcctctttcaaagtatagtatggcctttacttttccggttccacgatacactccgccagtctcctaacagctcctcaaccaccgctctgtgtccagacggtggagggaggggacattgataaatttcggtctgggagctgatatggacgtgagaagcttgaccgaagaaggtagaggttaaaaaaacattttccgatgatacaagtaaaacgactgatttctggatctcagatcaaaaaaacccgtataaatgggccatgttgagccactaatgggcctcaatactatgagattttaagtgacagctctgcttcttgcatccttcaaagcataagtttgaacacccgcggttttgttttgagcggctggaatatgtaggacagaagatacaggtgaggataacgatctctcatcttaaaagatcaaaagaacggttcttttctttctttcttttttttaacccgatttttcgtcttgggatcatgcaggacatagcaatg

SEQ ID NO: 21950 - DNA, 3000 bp, Unknown; identical to SEQ ID NO: 8826
  misc_feature (1)..( 3000): 2750-1469P.txt file - cDNA_ID_2038996; gDNA_ID_1971898; Annot_ID_176930

SEQ ID NO: 21951 - DNA, 1123 bp, Unknown; identical to SEQ ID NO: 8363
  misc_feature (1)..( 1123): 2750-1469P.txt file - cDNA_ID_2039153; gDNA_ID_1971785; Annot_ID_175427

SEQ ID NO: 21952 - DNA, 3000 bp, Unknown; identical to SEQ ID NO: 9870
  misc_feature (1)..( 3000): 2750-1469P.txt file - cDNA_ID_2039230; gDNA_ID_1974092; Annot_ID_180638

SEQ ID NO: 21953 - DNA, 3003 bp, Unknown
  misc_feature (1)..( 3003): 2750-1469P.txt file - cDNA_ID_2039230; gDNA_ID_1620835; Annot_ID_169830
gagtttttaaatagatggactaatatctaactttttttataattaaaacttttatatttaaaaggtttttctattaataatttaactaagggtttttaaagtaaattggccaattcgtgaaggatatttcatttaaatccccaaaaattcatattcattatgctgtcgtacaatgaattgaaaatcgattaataagaaggtgggtaacaaaatttcctttagtttccttttatttaagaacaccactttacttctttcattattttgaccaagtttaactaggcccgtaaggagaaccataaagagaggacaagaccttgttacagcttacaaccaaaataaaggagaccacagttaaaaataaaagaggtttaaaaacacttctactaaaaaacatggttgataaaaaagttggcggtatccaattttgaaagtatgcaactaactatgcatcattcataaacaattacatatgtaacgtgtgtagtgtagacaaggtaatcgatattcgaaatgagcaaataaataaagaaattgtgattaaaaaatttttaagagttaatggaccagtctaacattatgtgccacttcatttttatatttcacatcaaaaccgaattcattttaattaattagaccgtgtccatttttataaaatattgacgggacatttcaacattgtgtatgaatgttataatattattattctcttcgttagccgaatggttcacattgacatcatagggacatacaaatattgactttttcgaagacacattacaatatatgtcgttttttgaacctcgtggccttgtcaacttataatttgcgtgtttgcgaagagataatcatcaccaaatgtatgttaaacatgtaagtaattaatattcaaaggggccagtatatcccacttaaacttatactatgtcagaaaattaattaatattattgaaggtattaaccatatcaaatattcgatcactataccatagagagatattggaaacttgtgatttcgattatttgttttagcaacaaaataatttctgtgaatgaaaagggccatgtggtgttggccgtggctcatacaaagtttaatgacaggtcactcccacctcactgttttgcctaataatttactacttaattatagtatagaatctttccgaatttttgtttgatttggagtttacatattcatcgtagttttaagatttctaaggtataaatattggtaggtgcatgcaatcagttgaactttcacatcatttcttgatcgtttgttgatttagaattaaacaggtgatcgtgagaaacgctcctaagcaaatatatagtaaatggaaatcgattaattcaaaaaaattgaagtattattattctattaccatgtttattatactatgtacttatttgattttaattttatcattgaaaacaagaaaggagaagcgacctcaatgattaacattcgtcggccgaatcaatatagagactttaaaaattaaaaaaaatggtggtggggtttgcagtctaagcttttaggttaagcctttaacatgtgattaactttccacaccaatggctctccaaaatcccggaaaagaagaaaattatttcgaaactcacttgggattctaaaaatgtgaaaactaagaataactcgctagtcacttccatgaaaaaagtagtggtaacacttaatttgaaattgaggaataacattttatttttgagaaagaatttgattgttagagtatgttattattagttttctaaataataataacatgttagaaaaatggtaatggtatgggagattttattttttattttttataatgagtaaaaatggtgagagaaatgatggtgaattgagagttgttggaggaggtggggggtccaatggcccctctttttattccttattaaaaagtaaaataaccattacatagttctgattaattttgcaattaatagaataatattaagagtaaattttacaagatgttattttgactaactttacgggtgcttcatacacaaacgtaaaagaaatctatgtacagatgaatagtatcatgcaaatctaaaaaaggttacaaaataatgtaacaagtactttatcaaaaaaaaattaacagtgaaacaaagcatgtagtgtgttatgggagactcatgtcttatccgtttcaagatccatgcaagaggaaacattggaatgtctctgtcagtgtctctactgtgaagaacattaagggacagtagtttttgtctggttcgttctcaggttctgcattgtaacaataccacacactcatcaatgtttctctttatgtaatgaatgaggatcaatcaaatagcttataagcaagcaagtgaaatctcacaataggctactgtgaaatcacaacaaaaaacaactttatctgtatcaggtttcaacagtttctttctaattgaacagaatcaaatctttatgccaatttcattctatctacaagttacaacaaagtaaatcattatcctagttatgctcacttgctcagtcattatttagctagctttctattgaagaataacaataatcaaatatcgaaaatgctatttctctgttggatcaaaggatttcagcttcaagataatgacaattgacacatttcaccattcttgatctctctttggttatatctactctaatttacatcaatttacttactttgaactgcctcactttcaaagacatgaaccaaattacagaaacggcgatgcaactataaaatttggaatacatgtggaatttggaatgagattattcgtttttatttcattttcttgaaataaaacactatatgccaaaatcaaacgtgggacctccttatgacacgtggaatttatgtgattcagacaaaagtaatcctagaagtctctgccattagaaccaatctcaagagataaggaaacttcacaaccaaaaacaagaacaacagacacatagagatg

SEQ ID NO: 21954 - DNA, 3003 bp, Unknown
  misc_feature (1)..( 3003): 2750-1469P.txt file - cDNA_ID_2039305; gDNA_ID_1620835; Annot_ID_57969
taataattgaaatccaatatataaaattcatgaatcaacaaaagcaaaattaaagagaaaagtaaacgtgaatagattgagagagagaaggacagatgaaggtgggtgtcggccgaaccacggacaccggtcggagtctcaagacaaaggaaggtttgcgtctggggaccattcacactacctcaatacaacacccatgccaactccaaatccattcttaattctttttattttcagtaaccaaaacataaatctactaatatcatttaatggaactaatttagtttaaagctttttttaatgttgctaatgaaataagcaccttaagtatattctcccattggtgatatgttttcttatcggttggtttgggtaattttcgacacttttggaaaatggacaacccatgttgtcatttccctttagattttcttgatggttatggtgtggctagtttttttttttcttattttcttatttttggtatttaagaagagaattataaaggaaagagaaataagtgtatagtttaaaaggaaaaaaaacaaaggaatgtaaaggcaaatacaagtgtatcccggcattagtttggttttgcgtacttgttgttgtgagcttcatgttctttagcgacttttcgtcacgttatctttggttcccttcacttattttttcaatgtaccatttgataatacatattttttcgttgtttctgaaatgcaacgtataatcttggcgtgattttacatatttttaaagaatacacgatgaacaacaataacatgaaacaaatgtctaagattatactctcccggaggagaacatgcattcacccatcctaatcctatgaaacagttattttacgttttgaccattgactctagagtagcagctgtattaaaatctggtacaaagagatttcacgacacattttaatgcatggcatcagatggatgccatttatgtcgcatacgctacccaaatatgcacaccatcaattaggctacatagggccataggatcgcatgcccaacaaggtcagacaaaccaacatcaaagtctacgtactaactttgcagcagcaggcgaatccaacccaaagaccaacaagtatcaagatccaaatcatgtaacctctataaacatctccttaaggaaagcaaatcttgcagttcttcaacaataacggccagtttaagctaaaacaatgaaaccatgagagtgctcactattcgagatgaactatacaagaattaatgtctcgatgttaatagtatattatctacgatcacaagtaagaaagctaacttgaataaagcaaggattcatccgcgtttgcttagaagtcttatctcgagttctagcctcattcccatcgttttgcctttaccttctcaaatgcattcatcttgttgatcctgaaaaactatatccttcagatacgaaaatgaacaacaaaggtttttgctttaatgcttaaaacctaatttatgtttgccatgtccttggtcatttccttttctctccatttgccatcctctccaatcaccttcttcaaatcttttaggctcctaaaaccatcaacgttgatgcatgatgataataaaggcaaactcaaatatcgcaaatttgcaactgatattagcacacatttttgcagtacatagactatatttgtattaattactctctattcccaaatttgttacacaatctctttcgattcttccaaaatttgttctgctttgacttctttttatttttttgataaacatgtgaagattcataccaattttaaagtttctacagagtacagagattcaacgaaaaaagcagaaagcagaaatctacaatctgctttgaccagctttgctttcataatttttactgtacagagaataataaccaacctaaatcagaattcaatatttcctctaccaacaaaaaagataaaccctgaaacgttttgtaagagaatcacgtgagagaccacgtgaccatttttttccctaagcatcgttaatcttaatgggctcaagaaaagtttcttaattggatcttattataatactgttgagtgagccttagtccattattatgacgtggcataaccctgccactttcagggtatcgatccacatctgccgttaaaacagtaaaccgccgtctaaactttatagcaaagaatctggaccgttgataaacccctaaataaacgggaggactgataacggagaacgtgagcatcctctgacaagaaaaagacaaaaaaagaagaagaaaaaaagcacatgacatgattctttcaccaccctttcgtcttccactctcatcaatctagattctcttctctcttctctatattccaaagcttttacatttcttcaaatcttattttccttgagatcaattatggcaggagagattcaggacccgtttagtcttagttttcaggtaaattcttctactacaatgtcacacttttacttgtttttcttctaactcttttcataattgctcttgacgaatcttggtaaattatgtatgttcgttttaagatcaatctaaatggacttgaaattctactgttttcagctttacttcaacgaaatttgctaaatttaaccgcttagtagcatgtatgcagagtagtgcttcatgtcttgggaaaaaagtcaattgctaggtcacattttgttagatttgtgtattcagtttgattaatgtgtttaagaaatgctaggtcttaaatttatttaatgtttattgtggagcactcaaatgaacataggcaagactctgaatgtatgtaatacgttttagcattgttcttattggtttgatgaatacaaactacaggggaactctatccactctggatcgatatcctttggaagattcgagaaagagggtttatcatgggagaagaggtcatctttttctcacaataggtatcttgaagaagttgacaagtgttctaaacctggctctgttactgagatg

SEQ ID NO: 21955 - DNA, 3003 bp, Unknown
  misc_feature (1)..( 3003): 2750-1469P.txt file - cDNA_ID_2039305; gDNA_ID_1620835; Annot_ID_169860
aatatttaatatgttaaacaataagatagaattctaagataattgaccacatgtctataaataaatttgataaaatatattcatacatagaaaaatagcatgataccaagaaaaataacgtgtcttacaacactgagaggatacagataaacagtataaatgagatacctacgtaaaaaataacatgttacgaaaaatgatatgtatcgaaatagtcaaatgaaaaaatgaaaagataatcgtccaacatggtcaaaatccacttttatcatatgtgcaaaaaagtaatcaacgagtgataatatgctgatatttgttacaagaattcgaatatgagatatgtgtatattgacatattgtgctggatagataaattatattagggttaactttacaagcatattttccttatgattactaattttcacatatatagattttatatatgactatcagttagtcaaggatttttgtgagaataaggtaaatggagaactgaaagaagataactggggaaaagtttaatgagagggtatggtggtgtcctcgtgtgcgtggctgcattctcgtggcatgccatctcaatgctaataattgaaatccaatatataaaattcatgaatcaacaaaagcaaaattaaagagaaaagtaaacgtgaatagattgagagagagaaggacagatgaaggtgggtgtcggccgaaccacggacaccggtcggagtctcaagacaaaggaaggtttgcgtctggggaccattcacactacctcaatacaacacccatgccaactccaaatccattcttaattctttttattttcagtaaccaaaacataaatctactaatatcatttaatggaactaatttagtttaaagctttttttaatgttgctaatgaaataagcaccttaagtatattctcccattggtgatatgttttcttatcggttggtttgggtaattttcgacacttttggaaaatggacaacccatgttgtcatttccctttagattttcttgatggttatggtgtggctagtttttttttttcttattttcttatttttggtatttaagaagagaattataaaggaaagagaaataagtgtatagtttaaaaggaaaaaaaacaaaggaatgtaaaggcaaatacaagtgtatcccggcattagtttggttttgcgtacttgttgttgtgagcttcatgttctttagcgacttttcgtcacgttatctttggttcccttcacttattttttcaatgtaccatttgataatacatattttttcgttgtttctgaaatgcaacgtataatcttggcgtgattttacatatttttaaagaatacacgatgaacaacaataacatgaaacaaatgtctaagattatactctcccggaggagaacatgcattcacccatcctaatcctatgaaacagttattttacgttttgaccattgactctagagtagcagctgtattaaaatctggtacaaagagatttcacgacacattttaatgcatggcatcagatggatgccatttatgtcgcatacgctacccaaatatgcacaccatcaattaggctacatagggccataggatcgcatgcccaacaaggtcagacaaaccaacatcaaagtctacgtactaactttgcagcagcaggcgaatccaacccaaagaccaacaagtatcaagatccaaatcatgtaacctctataaacatctccttaaggaaagcaaatcttgcagttcttcaacaataacggccagtttaagctaaaacaatgaaaccatgagagtgctcactattcgagatgaactatacaagaattaatgtctcgatgttaatagtatattatctacgatcacaagtaagaaagctaacttgaataaagcaaggattcatccgcgtttgcttagaagtcttatctcgagttctagcctcattcccatcgttttgcctttaccttctcaaatgcattcatcttgttgatcctgaaaaactatatccttcagatacgaaaatgaacaacaaaggtttttgctttaatgcttaaaacctaatttatgtttgccatgtccttggtcatttccttttctctccatttgccatcctctccaatcaccttcttcaaatcttttaggctcctaaaaccatcaacgttgatgcatgatgataataaaggcaaactcaaatatcgcaaatttgcaactgatattagcacacatttttgcagtacatagactatatttgtattaattactctctattcccaaatttgttacacaatctctttcgattcttccaaaatttgttctgctttgacttctttttatttttttgataaacatgtgaagattcataccaattttaaagtttctacagagtacagagattcaacgaaaaaagcagaaagcagaaatctacaatctgctttgaccagctttgctttcataatttttactgtacagagaataataaccaacctaaatcagaattcaatatttcctctaccaacaaaaaagataaaccctgaaacgttttgtaagagaatcacgtgagagaccacgtgaccatttttttccctaagcatcgttaatcttaatgggctcaagaaaagtttcttaattggatcttattataatactgttgagtgagccttagtccattattatgacgtggcataaccctgccactttcagggtatcgatccacatctgccgttaaaacagtaaaccgccgtctaaactttatagcaaagaatctggaccgttgataaacccctaaataaacgggaggactgataacggagaacgtgagcatcctctgacaagaaaaagacaaaaaaagaagaagaaaaaaagcacatgacatgattctttcaccaccctttcgtcttccactctcatcaatctagattctcttctctcttctctatattccaaagcttttacatttcttcaaatcttattttccttgagatcaattatg

SEQ ID NO: 21956 - DNA, 3000 bp, Unknown
  misc_feature (1)..( 3000): 2750-1469P.txt file - cDNA_ID_2039603; gDNA_ID_1971953; Annot_ID_177417
aacatcctcctccatctgtacagaaacaataccggtgcatggctcaatacgagagtggtggtgattcttcttgcaacacatcaagaattggaaaagaacctctttacttgccggagacggtaaagatccggtgcggcaacaaaagatgtaagagagctcggcgaaaaggatgagcagaaagaagagtaacacggcgagaagtacggcgccggagttggtgagggcatgcatcgtttgagagagagtgtgaaaaaataatgaccgggacgtagtgtagttaaagcaggagagttgaccggcgtttaccggtcatcagttgacggaggaggttgggttgatgatgattaatgatgttggaatttgttggcagggggacacatgagcaacttttttacaggtagcatcagctttttaaggatcataattatcatatagatgcattaaagaaagagaaatgatagttttataatttctgtcctttggtttttttacaggtcctttaatatgactagcgtatatggtagaacaatggcttctctgtgctatcaaagaagatcacaaaatggtcttgatttttaccattaatatgtacagtgtacatgcttaggtaagtgatcaactgaatatgaatttgtaggcgtaacacaataagacttccattaacggaaaaagttttttattataattttggggacaaagtgagaatcaaacaaaggattgttttagcgtacaagaaaaaaaactctgctcacatataacaaagattgtacctttttgctatcatagtagagtttctaaatagctgagaagtactctttgctgagttttgggtcgggtttcattgacttctcacccggcttccatcctgctgggcagacttcatccgggttttcctggatgtactgtaatgcctgcaacattgaaaacgtattaagcataccggaaatcgagtgaaaggaaagagcggtttttggagttgtgtgtatttatttgtatctttacctggagggttctcattgtctcatcaacgcttcggccaataccaagattgttgatggtggaatgttggatcactccttccttgtcgattatgaaaagtcctctcagtgctattccctgttcttacacaaacaaagttcttgttttcatttatcccaaacacttcgaaagtttaaaggaaggtagccaagatttaaaggctaacaattacctgatcatggatgagcactccgaacgactttgagattgatttagtgacatctgaaataaggggatagttcagatcaccaagccctccagatttcctgtctgtttggacccatgcaaggtgagagaactacgaggacacacagaaataagaatgaatcaaaaatttgcaaacagataagaacatggtgatgtcaaccaaggatgaggaactgagtaaaatgagaacatagtaaatgtatagtgatacttaccacactatcgacagaaacacctaatacttcggtgttcaacttctcaaattctgaatgccggtcactgaaggcagtaatctctaaaagacataaggaaaaaatgagaaagattaggactcaaggatgagggaaccttggatattcaattttgatatacttctcgagcaatgctaacctgttgggcagacgaaagtaaagtccaatgggtagaaaaagagaatcacatacttctttccaatgtaatcagagagcttaacctgaaaccatacattcatcagttaccaattagtttccaatcacaataagacatatactcactaaataaaaaacactaaagactactcattcagcttcaaaactaaacttaatctcagattaactagaagcagcaactgtgattgataactgctgtaagtaccttgatgaactcttgatcaaacacagcctctgcctcaaaatcaggcgccttgtttccaaccagtggaagatcatcctataatcaccaaattaaaactcgttaacacatcaaatctaaggagaaagatcagtcaaattgacaatcagataaccatggtactataccaaaactacatagacctcatccgaacatactaatcagtcaatgagtatagctcatatgtcactcaatttcacttcaccagagaaattaacaaccctaaacgaaaatgtcactcaaatttctgaacttttcgagtaatctgcagaaacacggtcgcataacctataaatcgttaactatttccccaaaacctatagggctaacaagtaggaagagagtgaaatctataacaggctaatgaattcagatttcaatgacatcgaataagaaaagtatcgacatttagataaacttacggcctgggctttgacagcaaagctccgacgagaagtggagctgagggaagagcgtcgagcaaatccggagcggagagaagcagatgcggaaggagaagaaagggttcgaaggaaagaaacagatggagaggaaagtgaagactttgctggaaaaaccctagaagagggagaagagatgagagtagttgaagaagcaacagacgccattgctgctacacacactttgtgactctctgagtctgagctaccaaacactcttatctatctgtcaatcacctctctttgtagtggaagtatgaggtggagataagcctgacgacacccaaactcataaaacgacgtcgcgttactcaaaacgaggtcgtattactattgctgcaaatatgcgtcttcttcttctaccttgggtaactccgtctctccgttactttcttcctccgatcggtggttcagttctccaaagtatctaatctactcctgttgtttcaggtgcattgttgtgctctcttcacttggtttactttaaaaggcttcttcacttattttgcaaagttttgatttttagtggtttctctgttgtctcattaattctctcgatcttctcctttcaagtgttgacagttctgagagaagatataagttgaatcgcgtgaccggagacatg

SEQ ID NO: 21957 - DNA, 3003 bp, Unknown
  misc_feature (1)..( 3003): 2750-1469P.txt file - cDNA_ID_2039641; gDNA_ID_1971893; Annot_ID_176867
atatggagctttattatttaaatctttgataccttcttctgtaattatgaaacacagataattatgtaaattagcaggcaatggagtaaatatggtgacattatgagtcactgatctgcctaatggagtttgatgatacaacaatgaaggaaggtcatgtgcacttgtgtgacgtgagaatatcctccggcttgtttggtctttaaaaggaaaggacaccacaataacaattatcaattagaaaacaaaaaatactccttttattcttagtcaccaaacaaataaaatcagctccttttttcataccacacaatgggaacaaaagcaatgataaaagaagcccatcaccttcctttgcttttaaattattcataatttatgaaagaaacaaaaaaaattattatttttatttttgcttctcttccggtaagtcaaaggagataatattaagagtttagatattaatctcttaaattctgtgttcattttaagattttgtagcaaaagtttattattactaatcatgtggttgtactgcatgtttaaccaacatgaaagaatatgtattcattttttcggaatgcgaaataagagaatcaatctcagttcagttcaagttcgaatctttgaacgacatgcggtttatataaaaggaactatagtatataaatatatatttatatatatgcctcctttaatagattttcttatattccttctttgttttgtaatttatggagaatatttactatgtattcttcatgaagcaattttacaaatattcgaattttaatttttccttttttgaacgtctgatgatcgatcattcgcgtgcacaagaatctcatcagggcatgatagattcgaaattttgatttgctcagttacgatatatctttgattattcttcctacggcggtttaaacctaaaaacaagttttcatgttttattcacctagattggtttcaagtgtattttctaaccactatttttttcaagaaaacgggaaacaaacagaaactatttctggtgcaaaatatagtctgaaaatagtagaatgcaatccatatcaatcttgaaagatatatttttttaaagtgtacttgagaagaatgtaagaaataagagattaaaaaaggtacggagaagataacgagaaaagcaataaaatgcataacttttgtagtcataacgaaaaaaaggagaaagaagataatgaaaatagtggaagatcggtgtcttcgtgatgaattaaagtagaattgtgtgtacgtaacttttgtaatcatactttctttttcttcatcaactataagacgtaacaatgatatctataatgcatgcatatagttttaaaattatctaggttcttgaccaaggcttagttagctcggtaagtttctaagaacttcgatttaccaataaatcaagccaaactatatatgatctttcgcgatgccaattgatattctgacaggatcatacaatattgttgcttttcttgtatttatttatttgcgtatcaccgcaccgattcatatttattatagtatatagattggaaaaacaatatagagggactctttattaaagtaaaaccaagagaggaaataaaactgaataagaaaataaacaaacatgcttgtctttgtcgaacacacagatttttattacacaagtggttccgaactaattaagattcctaattttaaaataataaagagatttaaaaatgttatcttttgtgtttggtaggccattaaagctccaattatttgtcactaagtcagggaaggagactaagcataaagacgccactgcataaaccttatggtcccctcaaaataaacctaaagttgtaaaagaaagaaaataaaaacataacgttgataaaataaaatttgaagaaagaaaatcctacatctttgtaccacctatatgaacctaacttatagggaaaaagacattgattcttttgcagacccatcagcgtgcatgtccaaaaagatgtgaaaatggtttcgaaaattatggattggtcatgatcagttagacgataattcgggctatgattatgaatatatatttatatttaaaaggatgaatcttttcaactttagatattctaattatagtataaatcatgatcattttatcatttacgacatgtttaaatcgccgtaacatacatagaaacatatgaaacgattttacatatatgacaattcaatttatatatatactacaaaacgtacggttctatatacactacatttatgataaacttcgaacttgtctatagtttaagaaaatctgttgctgctgtcaaaagcactaaatctttgatcaaccaataaatcaaaagtttcccacgataccaaaatttaaagaaacgggggaaaagtatatttgttctgttaaaactatttattatttgaaccctaaaacataagactctttccaattctggaatgcaaataaattatacaccaccggaataatcgactgaacttggtacgtgtcgacatcggaaggtatttcagctcttggtagatgacatcacgtcgtgcgtacctcagaaattaaagcgcacgataaggtcaccttctcggctttgccaaagatgcatctctctcttgcgttttgtttgtcgttaaacgtttcgttcctttaaattgattgtgattatttcttaataaacttgattactattattaattctttaacttaaatattactctaatggtgatgccgtgatggtcacaaataaatgaaatagaaaaagaccaaaacaaaaaaaaaaaatccttttttcctctcttttacatgatgggaactcttgacctttaagttttttttttttgtgacaggaagtgttcaaaggaacgaaatacacttcttcttccatttgatgtctgtggtccgaatgaaaaatatctctgtattaaccagaaacgtgtttcataagcatctttaactcttcagctctcaaattcttcatg

SEQ ID NO: 21958 - DNA, 3003 bp, Unknown
  misc_feature (1)..( 3003): 2750-1469P.txt file - cDNA_ID_2039691; gDNA_ID_1971785; Annot_ID_57993
ggaaataaaaatacattcacaagcaaacaaatggttgcaccaagaccaataagcaaaatcctgtaataagcagtgcttaagaagtctcttgagttgttcccggaaacaagaacgatacaatatgtcaacttgaacactctgaatgcgtattcgtatggtttcatggacgcgtatagtttcaaataactagcaccaaaacctgacatagacaaagaaaaattaaatgttagtatcctcattgtgtgtaatgaaattgtggcgatataaatgttgcaaacctgcaaggaatatgcagattacgatgatgacttcttcaaactctcctgctaaaacagagagctgcgcgacgccgagagcaagtcctccagctaacattgtgcctaatgctctattgaatcctttaaccaaagttgctcctgaaaattgaacataagagtgactcaataagtatgagaataattgatctgaaaatgtaaataaaacagtaaaatgcaaagtcaataagtaaatctgaacagagaaaatagaaaaaatctttgaatccacttatacaaaaagatggattatacaatcaaccaattgatgtctttagttccatcaaatggattccataaacagaaaactcgaaaacagtgaaaaatattcaatccaagtaacaaacaagcaaagaaagtataagagttggtctgaaaatgtgaataatacagtaaaatgtaactcaataagtaaatccgaacccatcaaaatgaaagatggaatccaaaaaaaggaacagtcttaggattaaaagaatctttactagatttgcttcacatgcgcaagtgtcttgagttcaagattccaacaaaacataaaaacaaaactcaaagatccaatcaaaggatcataaactaggctatgagttaagaatcaataccgacgtaatactcgaaaatgagaacgacggtgagaatcgcccaaactgcgaatttactagcatcttgaagcggctctttgagaaagatgacgaaagaacagagtgccaaagcaattcccatcttgatggagaagtaaagtttcctacgatcagaatgtcccagcgcgtacaacttcgccggagcctcgtagagagccctccacgagcaacaccggaacttggagtcacggctatcagcgacgtcgcttgactgccagagaagcttctctgtgttttgctccggtactgatcccattttacctcccattagaaatgattctgacaattctacagaacctgagagattcttgtcgtccttacgaatagaaagatgtttatttatctatttatcaagatttgttttgtactacgcaattaatgcatgccttcgattcatcatctctaaataatcaagtttttttaaaaaatttacaatttggtgcatctacattacaaattttaataattgtccgatttataactttgatgtttttggttgaaatctaatcattaacatattaaccaccaaaagtgtccaaattttttgaaacagatggaatttaaaacgtgagaatttacatttgtggaccagtaatgcataaatggaccggtaaggccgtaatatgattttttgtgactattagttattcagtaaaaaaattaaaaatagaattatattatttcttaatttctgttcaatgtgttaatgtttcttaaactgtagactttacctttttggctcagctacataatattttttcatagttacccgatttagtaagtttttttgttgaatctaaacatcaacataattcattgtgaccagtaaaagtgtcgcagaaataacaacagatatctatggataaacaacctgagaattaactatagtggacgtgtgtaatgtaaatggaccaataatgtgacggtgaacaaatttacacacatatcttaaagtctcttcaagttcaagactctaataattgaattacagacccacagttttggagaagttgcaagtatcaaagagacgacaagtttcatggtcgtgacttgtgtgaatgtgacattttgaaactcctacttactaccgcatcgcatcttactacttcctaactatgctcaaaagccaagccctaccctacacagtgtacccaccctcacatgagatttttcctacttttttttgagaaacaacaattatttatgtattttgggtgagtttgattgttttatccaattattgtatgctgaaaataaaaaatatcgtgtgcacattatataataactacgatgtaagaagtatttcaaacttttactatatatactcatcgaatgatgttcatgaatgaccatcatggtgtctttctccttaaaggctttctcatctcatctatccagtgctacttcaagtccaaagaaagactcttctttggcctcagcaaacctgtgaaaataaagaagacgattttttaagatgaatcatgtgacataatgtaaaaagaatcatgtgacatatataatgtaaaggccactttctcaacaattatttgtttttgataaataaataaaacaaattgaggacatcttgcagcgtacaatatcgataattatattttgttaaaaattgtgttttgattaatacaaaaatttatttcacacaaaaaaatttattgactttgatcaaatcatgaacactaaacaaagatgaggtttttaatttttgtataaatacttgtggctgtcaaatgtcattcgaattaaatatgatatgattaatacttatatgttgagatctttgaattagtccctcgaaaatacttgaaacagagtctgtatttttaaaagtctacttctcaaagcttcaggtttgtattcatgggcttataataaactctgtattcttgacccatttaatgatgggccaagtcaacaaagcccataaatttgatagtcaaactactttgaaactccacccaaaaatgtgaccatatcttccttatccatattctcacaaaatctccattgttctctgagaaaacacaaaaatg

SEQ ID NO: 21959 - DNA, 3003 bp, Unknown; identical to SEQ ID NO: 21958
  misc_feature (1)..( 3003): 2750-1469P.txt file - cDNA_ID_2039691; gDNA_ID_1971785; Annot_ID_175452

SEQ ID NO: 21960 - DNA, 3003 bp, Unknown; identical to SEQ ID NO: 21588
  misc_feature (1)..( 3003): 2750-1469P.txt file - cDNA_ID_2040033; gDNA_ID_1971801; Annot_ID_175714

SEQ ID NO: 21961 - DNA, 3003 bp, Unknown
  misc_feature (1)..( 3003): 2750-1469P.txt file - cDNA_ID_2040042; gDNA_ID_1971801; Annot_ID_58086
tgagatacatgaagatgagtggaacatcggcgacaaaggtggctatgaaactcgagtgttcaggggagagtgttccatgttccaaccttttcatgagagacattgacttatctccggccgatggtattgattctgtctcctctctctgctcttttgctcacggctccgcacaaggcatcattcgacctttatcctgtttctaactattttagtaatttgtaaagttttggggtgtaaattgaattactatgtaaatgcaggggtcatattggaataaacaacaatgttttagttaaaaggcctgtataacaatgcaggcccaaacaaaaagatatgagcccaatagtcactgaaattgttttctcaaacccaaaaaacctaaaaccttaaacctccgtatgtgttccgtcgttagcctcctgctaatctccatctcagatcgcaatttctcccttttccggtcactgctccggcttacgactatagcgttccgagataaagttcggctgtgttaattaaattcgccgtcggagggattttacggatatggctgttgttgaatcgcatggggatttaggttattgtcgattgaggtaaatggatgtcgagggtttgctcaactcttcgctctccttatctttgaagctggttctatagattggttagtagatcttacaaattgcaaagattggagatttgggggatttgaataagctacatgttattcgggtatgtttaggctcgagggaggccctggatcatgctatctctgcgacacattcgcagattctgccattttccttcctctgcagccactggtattgcatatgtttcaacagagtccaatcagatccagggtttgaaaccgctcgaggaacctgcccttgtgaagcttaaatctgagcgagaccctgagaagctatacaatctctttaaagctaatgccactaaccgtttggtgattgaaaatcgatttgcttttgaagatacggtctctagattagctggggcaggtcggcttgatttcattgaggatctgcttgagcatcagaagacacttccacaaggtaggcgtgagggtttcattgttaggattataatgttgtatggcaaggctggaatgacgaagcaagcacttgatactttcttcaatatggatttatacggttgcaaaagatctgttaagtccttcaatgccgctcttcaagtcttatctttcaatcctgatctccacaccatctgggagttccttcacgacgccccatcgaagtatggcattgatattgatgcggtttcttttaacattgccattaaatctttctgtgagctgggtattcttgacggggcctatatggcaatgagggagatggagaaatcagggttaacaccagatgtagttacatatactacacttatatcggcgttatacaagcacgagaggtgtgtgattggaaatggattgtggaaccttatggtcctcaagggctgtaagccgaacctcaccacttttaatgttaggattcagtttttagtgaataggagacgagcttgggatgcaaatgatctgttgctgttgatgcctaaactccaggtggaaccggacagcataacatataacatggttatcaaagggtttttccttgcgaggttccctgacatggcggaaagagtttatacagcgatgcatggtaaggggtacaaacccaatttgaagatataccagacgatgattcactatttgtgcaaggcaggaaattttgatttggcttatacaatgtgcaaggattgtatgagaaagaagtggtacccaaacttggacacagttgagatgttgctcaaagggcttgtgaaaaaggggcagcttgatcaggctaagtcgatcatggagttagttcacagaagagtacctcctttcaggtcaaaacagttgctctcccttaagtccattttgtaatgtttacatgaaatggaacaaatttgctacatgtacacgacaatgcggccaaaagaattctttctttctttctcctgagtttattttgtatagctgtggtggaactggaaatgggatgtagcctcatattaggaggcacacttatcttccaatcagattcaactatttgttgttcaatgtgaataaagcttaggatgatttggaaacttcaatggagggatacccagtaagtcatggatgcctctacaatcttaagttgtgatagcacagaactagtttaccttttgtaatgctacttacaaaacatgttgttgatttcagctggagagcaaaatggcatacacaaagcagggaccatgtgctgaagaaaccaaaaggatcttcgtctgacgatgcaaaagctcttgagcacctggaaaaatgagttatgttgtaagcttcatctagccaaattaaaagcactaaacatataacaaaggatatcaacgttgatagctttttcttgatatagcacgaatgtaaacaacagagaatagaacagagacaacattaccagcaatgaatatttttattattatgtcgaataaatacattttcccacaagtgacagagcaaacaaaattcacatatttttgtctattacactttggtgtcagactgacttgttacgtagatttatggcggtggattataacattgtaactttaaatatcttttaacgtaagaaacaaaactccaaaattggtgtttatttttaaaaataaaaatttgagggggcatgtatgtttgtttagttgattcacgtgttctttgtgtctgaaaattctgaatttgatgattttgaaaaaggaaaaaaagatacgaggtatcctcaattccaaaaggatgaatgatacaactcatatatacaagattatagtaaaaagaagggatgcatataaagaaacatagacatcatcgccatccatcctcagatcagttccgtagtttactggatcacgacacacacacatatacacgtgtacatataagccattcttatcaaaatg

SEQ ID NO: 21962 - DNA, 3003 bp, Unknown
  misc_feature (1)..( 3003): 2750-1469P.txt file - cDNA_ID_2040042; gDNA_ID_1971801; Annot_ID_175709
gtattgattctgtctcctctctctgctcttttgctcacggctccgcacaaggcatcattcgacctttatcctgtttctaactattttagtaatttgtaaagttttggggtgtaaattgaattactatgtaaatgcaggggtcatattggaataaacaacaatgttttagttaaaaggcctgtataacaatgcaggcccaaacaaaaagatatgagcccaatagtcactgaaattgttttctcaaacccaaaaaacctaaaaccttaaacctccgtatgtgttccgtcgttagcctcctgctaatctccatctcagatcgcaatttctcccttttccggtcactgctccggcttacgactatagcgttccgagataaagttcggctgtgttaattaaattcgccgtcggagggattttacggatatggctgttgttgaatcgcatggggatttaggttattgtcgattgaggtaaatggatgtcgagggtttgctcaactcttcgctctccttatctttgaagctggttctatagattggttagtagatcttacaaattgcaaagattggagatttgggggatttgaataagctacatgttattcgggtatgtttaggctcgagggaggccctggatcatgctatctctgcgacacattcgcagattctgccattttccttcctctgcagccactggtattgcatatgtttcaacagagtccaatcagatccagggtttgaaaccgctcgaggaacctgcccttgtgaagcttaaatctgagcgagaccctgagaagctatacaatctctttaaagctaatgccactaaccgtttggtgattgaaaatcgatttgcttttgaagatacggtctctagattagctggggcaggtcggcttgatttcattgaggatctgcttgagcatcagaagacacttccacaaggtaggcgtgagggtttcattgttaggattataatgttgtatggcaaggctggaatgacgaagcaagcacttgatactttcttcaatatggatttatacggttgcaaaagatctgttaagtccttcaatgccgctcttcaagtcttatctttcaatcctgatctccacaccatctgggagttccttcacgacgccccatcgaagtatggcattgatattgatgcggtttcttttaacattgccattaaatctttctgtgagctgggtattcttgacggggcctatatggcaatgagggagatggagaaatcagggttaacaccagatgtagttacatatactacacttatatcggcgttatacaagcacgagaggtgtgtgattggaaatggattgtggaaccttatggtcctcaagggctgtaagccgaacctcaccacttttaatgttaggattcagtttttagtgaataggagacgagcttgggatgcaaatgatctgttgctgttgatgcctaaactccaggtggaaccggacagcataacatataacatggttatcaaagggtttttccttgcgaggttccctgacatggcggaaagagtttatacagcgatgcatggtaaggggtacaaacccaatttgaagatataccagacgatgattcactatttgtgcaaggcaggaaattttgatttggcttatacaatgtgcaaggattgtatgagaaagaagtggtacccaaacttggacacagttgagatgttgctcaaagggcttgtgaaaaaggggcagcttgatcaggctaagtcgatcatggagttagttcacagaagagtacctcctttcaggtcaaaacagttgctctcccttaagtccattttgtaatgtttacatgaaatggaacaaatttgctacatgtacacgacaatgcggccaaaagaattctttctttctttctcctgagtttattttgtatagctgtggtggaactggaaatgggatgtagcctcatattaggaggcacacttatcttccaatcagattcaactatttgttgttcaatgtgaataaagcttaggatgatttggaaacttcaatggagggatacccagtaagtcatggatgcctctacaatcttaagttgtgatagcacagaactagtttaccttttgtaatgctacttacaaaacatgttgttgatttcagctggagagcaaaatggcatacacaaagcagggaccatgtgctgaagaaaccaaaaggatcttcgtctgacgatgcaaaagctcttgagcacctggaaaaatgagttatgttgtaagcttcatctagccaaattaaaagcactaaacatataacaaaggatatcaacgttgatagctttttcttgatatagcacgaatgtaaacaacagagaatagaacagagacaacattaccagcaatgaatatttttattattatgtcgaataaatacattttcccacaagtgacagagcaaacaaaattcacatatttttgtctattacactttggtgtcagactgacttgttacgtagatttatggcggtggattataacattgtaactttaaatatcttttaacgtaagaaacaaaactccaaaattggtgtttatttttaaaaataaaaatttgagggggcatgtatgtttgtttagttgattcacgtgttctttgtgtctgaaaattctgaatttgatgattttgaaaaaggaaaaaaagatacgaggtatcctcaattccaaaaggatgaatgatacaactcatatatacaagattatagtaaaaagaagggatgcatataaagaaacatagacatcatcgccatccatcctcagatcagttccgtagtttactggatcacgacacacacacatatacacgtgtacatataagccattcttatcaaaatgaccaccttcctcctgaattctcattcattatataggcgtatatttcggaattctaagttttgttgctacgatcgagccagcgttctgtttctgtacgtctctctgggtaagaaagaaaaaatg

SEQ ID NO: 21963 - DNA, 3003 bp, Unknown
  misc_feature (1)..( 3003): 2750-1469P.txt file - cDNA_ID_2040045; gDNA_ID_1971801; Annot_ID_175708
tgctctgatgtgttctctttatcccggaaaacatgttcacaaatgacaaagacagaggattaagcgactcataagattgaaatctcctactgagttctaattttggctggttaagttacttggcggagaaagattcttctatatattgatcatactttttccggctctcccacttgtttccagttttctgaaaaagataatgttctattgactgctgcgaatcctaaagtcatttttgctgtggttcttggattgagtcaagcaatgtaaaatgcggcgggtgctgattcttgaatcattgatcttcatgctaaacaagacacgttattttttgtgataagagataaaacagagcaacttaatatcatcatacttcttgattaatctttttattaatttgaaatattaacttcgatttaaaaacaaatgcctatttcctttattgctggaaaattcattgaactttcaagaatcagtacacagaatccttggatggcactccgatattagaggaaaattaagtctacaaatgaaatacattcagagaatatatccataaatagatacctaaaaatttaagaaaaccaaacagagtgcatgcatttatatccaatgctgttatgttactaatgtgatatttgaatcaatcccttatgttgtgtgtttatatataccttaagacaatctgaaagtaatccactattcaactctgcttagatcgatccatttctcgttaaaatggtaagactcgttgcctatatctactaacattgaacctgatttttaaaatattaatcctctttttgtacatatgtgtaggattggtttttgatcgtactcgttgcaattttaggatttcccgggttaagctatagtgaatcagtgatgaaatatggagcggtcggggatggaattgtcgatgatacatctgtaagttattggtgtatatatattatatatcagtacaagcagcataattgtttagtcatcatataaaaaaaattaaacttttgcatggtatatgtgggcaaaaaaaaacaaggcgttccaaaaggcgtgggaggatgcttgtaagggaagctccaaaatgggaagtgtaaacgtaccagcagggaaggtgttcctcctcaactcccttcacttcacgggtccttgcatacccaaacctctccttttcattgtaaatccctccaccactttacttgattgatattacatgaatactcgaatatgaacctactcctccaagttaattataaagttacttttgctgatatatgtatatatagatcgatggagagatgatagcgcagagtgatccacagaagtggggaaatggtgagaacggggtaataccatggctcatattcgatcaagtagatggacttgcaatcgtagggcgcggcttgttggacggccaaggcaaatcatggtgggatattcattgtagagaccatcccggacccgtaagtttccttttttttaactttttatttttcttgggttataatgtatcctaacaaaccatctctatgtgataatacattttgtaacctataacgtgtcacagaattgcatctgccttgcaccaacggtaagtttgctatttacaaaaggaagtacgtagtatgtatataataacttggacgtctctataactatagatatatttctcgcagatgatgacatttagcaactgcggaaatgtaacattaaagagtttgagatttagaaatagtgcacaaacacatgttcttgtgatgggaagccaaaatgtgtatatcgatgatatcaaaataacatcaccggaggctagccctaacaccgacggtattcacatcacatcttccaccgccgtttctatcaatcattctgacatcgccactggtatatttccttacctaaccatataaaagatcaaacaaaagtttaatttgtttatttattctcacaattaattaaacaggtgatgattgtgtgtcgatcggagatcaagtgaataatttgaatgttacttttatgaattgcggacctggtcacggtgtgaggtgattaccatctccttatcgacctcgtaatcttatatttttcataataaaaaaatgagaactaataagaaattagagacagcattgggagtttaggtagaggaggaacagaggtaacagtggaaaacatacgtgtgtcgcacgttaacttcactggaacaacaaacggagctcgaatcaagacttggcctggaggaactggttacgtccgaggaatcgagttcttcgatatccgtttctcgtctgtacaaaaccccatcatcattgatcagttctacggttgtgcccctacatgcgttgagactgtgagaacctttttctttctatctttcaagttaatattaaatgtaaatgagctaatgtttgaatgtaatgtatcagatgaagggagttcacatagagaaagtgagatacatgaagatgagtggaacatcggcgacaaaggtggctatgaaactcgagtgttcaggggagagtgttccatgttccaaccttttcatgagagacattgacttatctccggccgatggtattgattctgtctcctctctctgctcttttgctcacggctccgcacaaggcatcattcgacctttatcctgtttctaactattttagtaatttgtaaagttttggggtgtaaattgaattactatgtaaatgcaggggtcatattggaataaacaacaatgttttagttaaaaggcctgtataacaatgcaggcccaaacaaaaagatatgagcccaatagtcactgaaattgttttctcaaacccaaaaaacctaaaaccttaaacctccgtatgtgttccgtcgttagcctcctgctaatctccatctcagatcgcaatttctcccttttccggtcactgctccggcttacgactatagcgttccgagataaagttcggctgtgttaattaaattcgccgtcggagggattttacggatatg

SEQ ID NO: 21964 - DNA, 3003 bp, Unknown; identical to SEQ ID NO: 21576
  misc_feature (1)..( 3003): 2750-1469P.txt file - cDNA_ID_2040066; gDNA_ID_1971801; Annot_ID_175698

SEQ ID NO: 21965 - DNA, 3000 bp, Unknown
  misc_feature (1)..( 3000): 2750-1469P.txt file - cDNA_ID_2040232; gDNA_ID_1971814; Annot_ID_175888
ttattctactagatcatgaaacttaaaatcgtctatcaaacgtgtacacaatacaaaaagtaatataggcatgtaaatggaatcaaaagaagaagaaagaattaggaggccattaatcaaaagacttgacgatcaaggttattacttattacgtagagtgaatcccacctttaagcctaaaatggagaagtttggcaatggaacatgtggtacaaaaccatcgtagtgaacatcttaaaatcctataaattatccacaaacctcacttcatttcagttcaccagtatccgtacaatatagtccttctttaaggacatatatatataacctcggacaaaatgaatccaaaatgttcaaaaacaaccctagccctcttcttcgcattcaccatcctcctcattggccacgctgaatctaatagccgtccccgccctagaacaccacctccaccacgaaccccaagaactccatcacctcctccaccacgaaccccaaaaactccaccacctcctccaccacgaaccccaagaactccaccacctcctccaccacgaaccccaagaactccaccacctcctccaccaaggaccccaagaactccaccaacagctcctccacgtacgccaccagtttctccgcggataccaccaattcttcctccaaagactccaccaaccgctcccccacaaacaccaccggtttctccaccaaagagtcccccaaattctcctccgcgtgcaccaccactttctccaccaagaactccaccaaatctcctccgcgtgtaccaccactatctcctccaagaactccaccaacttctcctccacgtgcaccaccaattcctcctccaagaactccatcgacttctcctccccgtgcaccaccactatccccgccaagaactccaccaacttctcctccacgtgcaccaccggttcctcctcctaatactccaccgacttctcctcctcgtgcaccaccactatccccgccaagaactccaccaaattctcctccaagaactccaccaacttctcctccacgagcaccaccagttcctcctccaagaatttcaccgacagctcctccacgtgccccaccactatccccgccaagaactccaccaacttctcctccacgtacaccaccgctatctccccctataactccaccaacttctcctccgcgtgcaccacctctatccccgccaagaactccaccaacttctcctccgcgtgcaccaccaatatctcccccaagaactccaccgagttctcctcctcgtgcaccaccaatgcccccaccaagaactccaccaacttctcccccgctttcacctctatctcctccgccaagaagtccaccaatgcctcctacacgtacaccccctgtgtccccaccaacttctccttcacggacaccaccagttactcctccaagggctccaccaaccgctcccccacaaacaccaccggtatctccgccaatagttcccccaaattctcctccaaagagaccaccgatgtctcctcccataactccaccaacttctcctccacgtgcaccaccacaatcaccgccaataactccaccaatttctcccccacgtgcaccaccaacgcccccagggacaccttcagtaccaccgccgccgaggactccaccaccgcctcccccgagtggtagatgccctaggaatggtatcccactacaaatatgtagcactatcctaaatatgttcgatggtttcctaggattaggaacggcgcaaccatgttgttctctcattcgtggtctttctgatgctgacgcacttgcctgcctttgtgaatcagtgagagcaccaagtcgcagtcttcctcgtaatatcatcaacctctttatgacttgtggtcgtagcattcccccaggcttcacttgcccatgaccacctcctttccccacaataaactaaaaaacctacttactatacacttaaccgtgattttcttttgtttctaaatatatactttgttccaataatgtaataaaaaataaaataaagtttgtacgggagtgttgattgtctttattttagattttgaatcacgttggagtttacaaatattactggaaaaaaaagtaattgaagaacttacatacgtaaattcaaatctcaaacaaaatgattgcattctgtttgatccccgcttcggtaaacctcaagtatattcattcttagacaatgaaagaaccctcagtaatcaaagattttccttctaaaactagatcatgcatggcatcggtttctataagtagaacatagaatttcaattgacacatcaagttattgttccatacaaagacggggatggagattttagaagttttcatttcgttagattacgaagacatagaattttattggaggctgaatgtggaagataaattttaattatttagaagacatgaaatccgggaaataaaattagtattgaagacgcacttgtgaaaaattatttattaatgtttattgtgtgtattgtgttccttgtaacatctatatcaattgatggtctatatctacttctgtaaatatgtaatttcaagttggttcatatatcaagtgttaaaaaaaccaaaattacatccattcaattcataaaaaaatgcatacattcatgaccttagatttaaaccgtatatactggttataatttgtgttgaactcttgaatatatgaaagaaagaaaaaacaaatctgaaaacaaaagaaaaaactccttggaagccaaactagacattttgagcgtaaagttgtacataagagagagaaccaacaacttgcctaaatctctaaaacctcattaattaaaaaagagtaatgttaggcaaaaaaaataaatgatacacaagtgtttgtgattccaaggcatctcttggctctataaatacatactacacaacatcatcgaaagcatccacactttcatatccacaaaataaaataaaaaaatg

SEQ ID NO: 21966 - DNA, 3003 bp, Unknown; identical to SEQ ID NO: 19063
  misc_feature (1)..( 3003): 2750-1469P.txt file - cDNA_ID_2040276; gDNA_ID_1971821; Annot_ID_176186

SEQ ID NO: 21967 - DNA, 3000 bp, Unknown; identical to SEQ ID NO: 3349
  misc_feature (1)..( 3000): 2750-1469P.txt file - cDNA_ID_2040297; gDNA_ID_1971821; Annot_ID_176176

SEQ ID NO: 21968 - DNA, 3000 bp, Unknown
  misc_feature (1)..( 3000): 2750-1469P.txt file - cDNA_ID_2040393; gDNA_ID_1971822; Annot_ID_176215
cggctccctcgggagtcttgtagtcgagaacctcatccgctcccaacgatttgacaaactctatgttccgggcaccacatgtagcggttacgtgagcatttgcaagttttgccagctggactgcatagtgaccaaccccaccagatgctgctgtgaccaggatgttcgccttcttgcctgtaccatccagcttcaaccccgcaggattagtaagagcttggagagcggttagacccgccacaggtaaagctgctgcttcagctgctcccacttcttgaggtcttttgacagtcagcttctcggttgcaacagcgaactcagcaagtccacctccaccctgaaagaacaaaatcagtttcccttaacatgtttcaaggtaattaaagtttctacttgtctgtctgaaaaaacttactagatggctaagaaccgctacaactttgtcaccagccttaaaattttttactcctgatccaacctcaacgacctctccagcaacatcagtagctgttcaaaacaaatatcaaaggttccaaactcaacgacctctaagcaaagtaacctctttcttctatacagaaactaaaatcttcaaagctattagaatacctggaatgcaggggaacttgcggggcagaaatgggcggatcattcctttctgaattttccaatcaacagggtttagactagtagcttctaatttcaggcaaacctcattactctttggtgttggaaccggaacttgaacatgctgagaacatattcagataaccacgtatttatcatcaaaagagtacagaatacacatacaggaatgcatcacaaaagaaaaaaaaaagaaaaaaacactacaaaaacagataatgttaccttttaatcagaaaaaaaatacacacatgagaacactaacttcacaaaataatcacttaatcagagacacttcacatatgagatgcatcatgcaatctagtggactctgcaatccaatccaatcgacaaaaacagagaaataatttaaaactatcactaataattcctcttttgtgagctactctcaccaccatcgtctcttttcttcattctctcatttcgtacataatctcaatcacattatctagcttaaaaggcgtgttctctgtactcaaattttccatagattcccagagcaacgagatccatatagaaaccgctagtgactacgtaagcatcagaaatgaagaaaatcatttacaatcatgattgtgttttatcatgtaatctagtagcctttacaatccaaatcaaattgatgaaaacattggatttttcaacatctgaggcaacaaaatcttctaagtttatcaaaaaatcaacgcatcggcagagagaagaatacaaataaaatcgagacggtatcgataaatacagagaatcaaatcgcaataacacagtagtttagaggaatatatagaaaagagagatgaaaacctctaatccggcggcgccaccaccgtaagagttgtactgaagagcgtgcatgagttttccagccatttttgaaggtttctgaacgacgacgacgatgatctctgaatcggaacaacggtgcttaagattttgttctcggttttacgcggagaggcttaaggggtaaaagcggtatatcatataaaaagtggttgtgaatttgccacgtcacctcaagtattgaaaggtgttatacggaaaaagaaaagaatctaccggtgcgcgaattcagaatttgccacgtcacctcaagtacgacatcatgggccattactggttgatctagttttgagttatcatgggcttgtttgggctttaattccactggccagtgattttaattatccaataatgatcttgggacgatccatttaccttattataacttttttttctgcaatgttaatttttctgttaatgagtcattaccagtcaaacagtttcctgctcagccactgtggttatggttaatatgcttgggtgttgtctggcagattccacagtggtctcaccatatatggttggttcctacgggtttagggactcgacttcttaatttctcgctcagcacgtcaatcgtttgtaatgtatttttttttttggttgtcgcaaccacacctaaaatctaaataaatgtttttagctaagagcataagactcatcctcggttgtttttgtttcttgcatttctccccatatgtcatgaatctagtttgattcttctgaattgcctaccaaatgttacataaattggtagtgaatttcttgtatcttttcgcaagaaattttctaccaaatttcgtctactctattttttcatcaaaattttgtaagtaattagtaggaaaaaaaaatccattttctaactcgatattcattgaagaccacttcggaaaaaaagaaaatcttcttactgtctttgtatatgagaatgaaaccatgtgatttttatgatattttttagagattatttataaatttagaccaactgtttatgtgttattttaaaatattgaatcattatttgttgttgttttcgccaagaatctttactcgttttaacttgtttgttagtttgtgtattgagtaggaacgttaagaaacaagtaaattttttcttttttcttctatttggaaaatgttattgtatgttgcgctaaatagttgtgtatctctatggaaaattttcaattttactcaaatataaacgcaaaaactgatgtttgaaatgactgaaaatatttgatgcttagtaatggtgattcgagaaggagtaaaatggtaaaagtaatccgtgtcttactacgtaaatcttttgcatttttcttttttggttaaaacgtttattcaagtctttcccggcaaggaaacaaaatctatacggacctacctttagaaaagcttaaccccttctctcttataaaaactgctttaaagacaaccaaaagaatattgaaccataaaaaaaaatcaaaaataaactcttgagcgatg

SEQ ID NO: 21969 - DNA, 3000 bp, Unknown; identical to SEQ ID NO: 9209
  misc_feature (1)..( 3000): 2750-1469P.txt file - cDNA_ID_2040507; gDNA_ID_1972022; Annot_ID_178108

SEQ ID NO: 21970 - DNA, 3000 bp, Unknown; identical to SEQ ID NO: 21459
  misc_feature (1)..( 3000): 2750-1469P.txt file - cDNA_ID_2040708; gDNA_ID_1971948; Annot_ID_177309

SEQ ID NO: 21971 - DNA, 3003 bp, Unknown; identical to SEQ ID NO: 19846
  misc_feature (1)..( 3003): 2750-1469P.txt file - cDNA_ID_2040847; gDNA_ID_1620691; Annot_ID_164793

SEQ ID NO: 21972 - DNA, 3003 bp, Unknown; identical to SEQ ID NO: 19846
  misc_feature (1)..( 3003): 2750-1469P.txt file - cDNA_ID_2040847; gDNA_ID_2926159; Annot_ID_198639

SEQ ID NO: 21973 - DNA, 3003 bp, Unknown
  misc_feature (1)..( 3003): 2750-1469P.txt file - cDNA_ID_2040893; gDNA_ID_1620691; Annot_ID_164777
cttacaagaccggtggatgagaaaagtcttatgtgacgaccgacgagtaacagccacgagtagaaagatgattaggaatatttcagtctgtttttgatcagttctcaacctccacaagaccgcaaccaaccaccatggtaaggaaatgattgttgtcttttcttttaaaaaatattagttattttagttttttttttttatgattgctaatttaatacagacacaaaactgagaatttgatctcttttaacagtttgttacttcacagtgaccatttgagaagttgcatccactgtccatccattctcatactgttaatcaaaaaataaaacaattatcgatgaatcaaattttgtcatgtttttgtaataaagtgctagtatgtatagtggagttcttaaagaatcttacaaaaagttattggtgggctatgctttttaggatatgacactaaagtaaagaaggctagcctaagaactcacactttcttctttactcttcttccctacaattacgatcgccaaaaaccctaaatttctaaaaactgcttttatctccaagtaagtttcaatattgatcttctgctctttttatttgttcaagctagcatgttgtttgatctttagcttttcggttggttttcaggaagttgaaaaagatggatcttagtggttgtagagatataatcagtagtttaccagaagccattagttgccatatcctatccttccttcccactaaagaagctgcttccacttcggttctttcgaaaaaatggcggtatctctttgcttttgtccctaatcttgatttagatgaatctgtttatctgaatcctgagaatgagacggaagtttcttcaagttttatggattttgtggatagagtgttggcattgcaaggcaattctccattacataagttctctctaaagatcggagatggcgttgaaccagaccgtatcattccttggataaataatgtgttggaacgcggtgtatccgatcttgatctacacgtgtatatggaaacggaatttgtgtttccttcagagatgttcttgagcaagacactggttaggctgaagctaatgctatatcctctcttggaatttgaagatgtttatctcccgaagcttaagacgctttatattgactcatgctattttgaaaagtatggtattgggcttaccaagcttctttctggttgtcccatacttgaggatttagttcttgatgatataccttggtgcacttgggattttgcctcggtgtctgtcccaactctcaagagactaacgtttagcacgcaagtgcgagatgagtttccaaagagtgtgtctattgatactccgaatcttgtctacttgaagtttactgacactgttgcaggcaagtatccgaaagtgaatttcgattcgcttgttgaagctcatatcgatcttagattgttacagggccatcaaggttatggtgaaaatgatatggttggcaatgcaacagattttataatgcgtatatgcaatgtgaagactctctatctatcttccaacactcttcaggtttgttttcatcatgaaaaacaacttgtaatctttttaacattgttcaaggatttgagttagtgattgcaattgagtgatgataatctagttgttgtggttgtgtttcaggtacttacttacagttgtgatgctataccaatattcaacaacctgactcatttaaccatcgagagtaatcccgaagtaggatggcagtcattgccaggtttgctcaagaattctccaaatcttgaaactcttatcttccaagtaagaaacaaaacccttggaaagcatttgttgactcaatttttcaaagtttaagaatatttcactatgtatgtttcagggcctcatccacaaagccaccgataaatgtggagacgtgtgcttgtgcaaacctcgtgaggagattcgcagttgcttagcatcaagtccggtgaaggttataaagatactgaaatttggtgaaatcagtgatgacatggagaagcagagagagcagatcaagtatttcttggagacaatgccgaatcttgagaagatgattttgtactacaatacaacaagtgttgaagatgtaactgaagtttcaagccgacttcagaggctagtttctaaattagcttcatcgacgtgcattgtccaactaatctctgataacctcagcttgtcatctactgtatcgacaaatgggctcctctgtttctaaagggtacctcttcggtttgaagatgaacctctttatctcagagatgattaccaaagcttagggagtaccctagcttgtcgtcactaaaataatcttctcttgtttctgcctaattatgttctaaagacgtgttatttaggctttgtccttattgacttgcaatgttaacttcagttttttcttgttacagttggtctgttgtgtaaaatgatcttgtaagagtaattggtaggagtaagcagacaacaaaagctgaaacatcccttttgtgtaaagatctgcaacaaaaccgaattaacattttatctaatcaaacaaataaaacaattatcgctaaatcaaattatgtcaagtaatgtttttgtaagatgctagtatatctgattaaatatattattttatctaatggagctcaaaatatcttccaaaatcttacaaaatcttttagccttttaggacaagacactaaaaaaaggctagcctaggaagtaggaactcacactttcttcttcactcttgcctacaaatacaatcgccaaaaaccctaaatttctacaatagttgagtcattttggtgagctatcttcactttagcctacaaatacaagtaagtttcaatatcgatctttttattttttcaagctagcgtgtttgtttgtttgtttgattcttagcttctcggttggaacacgtagaggaagattgaatcggtctcgtgtctttggttttcaggttgttgaaaaggatg

SEQ ID NO: 21974 - DNA, 3003 bp, Unknown; identical to SEQ ID NO: 21973
  misc_feature (1)..( 3003): 2750-1469P.txt file - cDNA_ID_2040893; gDNA_ID_2926159; Annot_ID_198625

SEQ ID NO: 21975 - DNA, 3003 bp, Unknown
  misc_feature (1)..( 3003): 2750-1469P.txt file - cDNA_ID_2041030; gDNA_ID_1621094; Annot_ID_170875
gcctatccctgataaagaaggtaacgactttaggactaaacacagacccttcccgttcttttgcaacgtctccgacacaggcttcaagatactcggcaatagagtcaagtgggctaactggaaattccacgtcggatttaccgcaagagcgggagtaactatatcgacggcttcggttcttgacccgagaaccaaaaggtttcgacgagtgatgtatagagggcacgtgtcagagacttttgttccgtacatggacccaacctacgaatggtactaccgtacgttcatggacattggagagtttggtttcgggagatccgccgtgaatctgcagccactcattgactgcccgcaaaacgctgcgtttttagatgggcacgtggccggaccagatgggacagctcagaagatgaccaatgtgatgtgtgtattcgagaaaaacggttacggtgcttcttttagacacaccgagattaatgttccaggacaagtggtaaacttacaaaatacagattactaaatgatttgtttacgtttctaggaactttgattagttactttaattaatttttgcagataacaagtggggaagctgaaataagtttagtggttagaatggtggccacacttggaaactatgattacatagtggattgggaatttaaaaagaatggagccatcagagttggggtactgtttacttcatgttctctttaatatagtatttaactttttggattgatacaattgttttgaaatccagaccaacctggccagttttgacctgtaaagattctttaacatatgttataattttttcaagtgaactcagtttgattttcgtttgagaattttaaaagaaatggagccatcagagctggggtatagtttatatattagcatggtctttcattttttatacataataaagtattcaagtatatcaatcttaatatatatgtaggtggatttgactggagttttagaagtaaaagcgacatcgtacacttcaaacgatcaaataacggagaacgtatacggtacactggtggcgaagaacactatcgccgttaaccacgaccattacctaacgtactacttggacctcgacgttgacggtaacggcaattccttggtgaaagccaaactcaaaacggtaagagtaacggaagttaacaaaacgtcttctcggaggaagagttactggacggtcgttaaagagacggcgaaaacggaagctgacggtagagttcgactcggctcggatccggttgagctgttaatagtaaacccgaacaagaagacgaaaataggaaatacagttggttaccggctgataccggaacatttacaagccacttcgcttttaaccgatgatgattaccccgagttaagagccggttacacgaaatatccggtttgggtgaccgcctatgaccggtccgagagatgggccggtgggttttatagtgatcggagccgtggcgatgacggtttagctgtatggagtagtaggtaattaatttaaagtaaaaataattaatctaaagtttaaaattatttttcatagtaagtaatttttttttttggtttattaaggaataaatttgtggtttgttatatgggaacaggaacagagagatagagaacaaagacatagtgatgtggtacaacgttgggtttcatcacattccataccaagaggattttccggttatgccaactcttcacggtggttttactcttcggccttcaaatttcttcgataacgatcctttgattgggtaaatacggtcttagacaaacaaactgatggcttatgtattgattgacttatgttacgtcaaacatatgatcattgaaaaaacaatttttagccttgtgactaagttattaatttgattttgattattatgtcttgaatgtattaatttcttatgttttgaatggtttagttaattagctttgatgctttttttggttcaatacttgtgattcacttatttctcaattttcaagttggtcgtgccatcggcaaaatcctttcattgtaacaccaaaacgtcgataaatttaatgaaatttggttaaattagaatcgacccacacggttgtatgagtttgttggtatattttattattctaattattattatttcttttttttaaaaaataaataagaagatgatttaattaaactatagtttaaaattttatctataacaatactatataatatatgagttgaaccgattaaatgtgatattggtttttgtaatagtaaaaaataataaaaatgttaaaaatgataatagtagcgataatattatataactaactaaaaatattttctattattttttcctaaaaaaactttttttaactgtaacaaatttttaaatttactcaattttatcgtaaaaatagaaaatggcacgttgtacggatcctaatcaaactatactttgtttttttttgtgtgtatgtgaaaatcatggttttaagttcgttaaattcgcatactttccagatgtccggttcaaccgatctaaccgaaaccaagcaagaacgaaatgggctttaaagcccagtgaaccaatcaatgaatgtagaggaacgagagtttttctgaactctgttaaatttcgtttgcgtcttctttccattctctgaattccttccatatctctctctgtgtgtcttctacaaagaccagatctctcatctgtgttttgttggtttatctcgaccaaagcccacacgtcacgttacgttaggttacaaaacaagttttttcccttataaaaaaaacattgataaaatcgaaaaatcaattcctattttgtttccaaagcaaatctatatatctattacccatctcgaattcgaccgaacccatgttctaatctccttcgcaacattggaaatctattttaaaaatccgttgagatatagttatataagtagtttggtgactcaattaggtttacacacaaagacatg

SEQ ID NO: 21976 - DNA, 3003 bp, Unknown; identical to SEQ ID NO: 21975
  misc_feature (1)..( 3003): 2750-1469P.txt file - cDNA_ID_2041030; gDNA_ID_2926162; Annot_ID_198829

SEQ ID NO: 21977 - DNA, 3000 bp, Unknown; identical to SEQ ID NO: 6481
  misc_feature (1)..( 3000): 2750-1469P.txt file - cDNA_ID_2041104; gDNA_ID_1621094; Annot_ID_170845

SEQ ID NO: 21978 - DNA, 3000 bp, Unknown; identical to SEQ ID NO: 6481
  misc_feature (1)..( 3000): 2750-1469P.txt file - cDNA_ID_2041104; gDNA_ID_2926160; Annot_ID_198724

SEQ ID NO: 21979 - DNA, 3003 bp, Unknown
  misc_feature (1)..( 3003): 2750-1469P.txt file - cDNA_ID_2041162; gDNA_ID_1621095; Annot_ID_170972
gttatataaaactgtggattttcttacttccttataagaaatgatcggatgtttttttgtatatatagttgtatactacctgtaaaatatattgaaatttttttaaaaaatgatgaatgatatctcgtaaatatttacttgatcaaatctctatacataatcaaatatttttagttaactctgtcttttgataacatttaagcgacaaaaaaatattgagaatgtttgcttcttgagaataagttgatgacgtttactcctagcttagtaaatttccgtgtcttactttttgcatttttcccaaaaaaattagacatggaccagtttttaggacaagcttatttggaggcaaagttatcatttcgactgatattggattgaacatggagatcgcaaagacaaatcatattcccggtatgccgaagagcttagagcggttatttggggcaaccaacttgtttgtgaataaggatactcataaacatgcccgcagcttgacaaaccagtttttaggttcgcaagctttaaaattaaggatgattcaagacatcgatttcttggctcgcacacacatgaaggaaggagctaggaaaggctgccttgacgtcaaggaaactgcaagcaaggtaaaaaaaaagtcaatccattttttacagtttttgtaactcataacaagattacattctctcgtttaattaacaaatcatcctatcaaatacatcaaacattacagatcgttattgaatgtctttcgaagaaagtaatgggagagatggaaccagaggcagcaaaggaactcacactctgttggacatttttcccaagggattggtttcgattcgcttggaatttcccggggactggtgtctatcgcatagtgaaggtgcatatttttcgatcatctagctttaatatatgtatagtactgatcaatatgcatgcataggatttgggtggaaaaatagatgcgtgcgttgtgttttgatgtttgtctcaaatagcaatgaccgaagtgcccaaagctagtttaaaacattactacacaaaatcgccatgcttttatttctttttcaatctttttcaataacattccctgagggctttcatatattcttgaactgagcatgtattttttataggcaagaaatcgtatgatgaaggttataaaggagacagtagttaaaaaaagagcatcaggaaagaaattgggggagtttttcgagaccatctttggagatacggaaagtgtaactatgagcatagagattgcgactgagtacatatttactctgtttgtgcttgctaacgaaacaacaccaggggtccttgcggcaacaataaagctcataagtgataaccctaaagtcatgcaggagttacggagagaacatgaaggaatcgtccaagataagattaagaaggatgagacagctgacctaacttgggaagactacaaatcaatgacttttacccagatggtgagtatcccaacgaaaccatatattataacttaacaaggatgcaaatatattaattaacatgcaaatatattattagatacgtaacttcctaaatataataatgacgacttacctaccgtttacttcctcgcaaatgaataagaaagaaaaatgcacgtttaatacttacttataggcatgccattatcaaccaaattaatttaaataataaacttagcaataatgcataaatatatatttagtaagaaaaagttataaaatatacaagtaatatacttgtttttatttttataacgaaaatatgagctatttatttataaatgagagtttaaagtcagaagtacatgcacttccaatgtattccgttttggtttaggtgataaatgagtcgcttaggatcacaagcacggtaccaacggtgcttagaataattgatcatgagatccaatttggtgattatacaattccggctggttggatctttatgggttatccttatgtgcatttcaatccagagaagtatgatgaccctttagcttttaatccatggcgctggaaggtgattttaatttgatgttcatcttttattttatttttacttacactaatcaaatttttaggaatttaagcatgcatatattaaactaaaatttcagggaaaagacttgagcacgatcgtctccaagacttaccttccctttggctctggtactagactatgtgtgggagctgaattcgttaagttgcaaatggccatttttatccatcatttgtttagatacaggttcgttttttctcatttaatgactctacgattcaagccaagtttaactgcactcaaagtttttttttacttacgtttattacctatggtgtgaaggtggtcaatgaaggcagagactactttacttcgaagatttatacttgtgcttccacgtggatctgatgttcaaatctcataagacaccaaacaggataactctgtatagtgttatgagagaataataaaattcagtttctatacctttcactctttctccttataacttttcatgtagttttggtatcatagccaatttcgatttttctagtatttgctttataaaaaatatatgttattgaaagaaagaaataaaaattgttaactgcacaaagtattgtagaataaaatacctgagcacacgtaccaaatttaataatatatagccaactacgcatatcttatattatataaatcagatgcatgtccacataaaaatagatattacaagagaagtataaaaaattcctccgtctgaccccatccacataaaaacacaacgtgctaattacacgttatagaacaatacaaaataatagaggtctcagcgagccaacaaacctaaatcatgcaaataatcttaaaatatatactaatcgacaagagagctcactagtatacaaagagagagagtgcctccctcagttatcctaaatcaatatctccaaaaagagttagaaagaaaaaaaataacttaagatg

SEQ ID NO: 21980 - DNA, 3003 bp, Unknown; identical to SEQ ID NO: 21979
  misc_feature (1)..( 3003): 2750-1469P.txt file - cDNA_ID_2041162; gDNA_ID_2926163; Annot_ID_198913

SEQ ID NO: 21981 - DNA, 3003 bp, Unknown
  misc_feature (1)..( 3003): 2750-1469P.txt file - cDNA_ID_2041166; gDNA_ID_1621095; Annot_ID_170971
atcttgacttcatctggtttgtaatttaacgacttgccaattcacctattgcccatgatctaattctttaaaccaccagaagttgtattgaactgattgatctattttttattttttttttttttgaatatttggaagttcgggcccaaagaccctatgtttctcagagacggaacccatagtagattaaattcatctcttttatagagagattccttccaacgtgaaaccattcctgaattgcttagaatcttttctaaattttgtaaactcttttctaaatttcagtttttttggcaggaaaatttgagagtagttttctacggaaaacttttggtgttaccagaaatgtttttgcgaaaaacttttaacgaaaaaattttgggcaagaaaatattgtcaggaatttttggtgataaatttacgtaattttttaaattttaattttaatattaaaaataaaataattatttaaatactatttttgtgcaaaaaaaacttttaagtactatttgtgaaaatttctcattttcaaattgccttaggattttatgtttctagccttctaggcccttttcggttatgtctatcaaactcaaagacaaaggaattaattggtcggccaagggacctttggttttggagttaatcttgaatatgattatatgaaatatgtcttaatatgattatatgaaatatgttaatcttgaatccaataaacgtccgagctgtggaaacctccagttaaaagatgaaatacaccaattttctcctttttcgcaaatctccctaagctcttttaaaaaaatctcaatccacgttttatccatattgtggaactgtgaacccaaaaaaaaaaatctgtattgtgaaaaacatcattaatgatacaaactacatcatattcactaattaaatcttgtaaatgtgatgcaaaaaatcatattttacataaattacaagtggtttgtaccatcctactatattatttgggaagtatattttaaatataaccttaatttctgtaattaattacatgacaatgtcattagaaaaatttaatcaaaaacaaaatcgtttaatgacgtcattaacaaaatcatttaatgacaatatttatttcttaattatagggcttattggatctaaagacggatcatcaaagattttctaaactgaagcaaaatatagtgaatattcaaatatctatctgttactaaatgataaacaaataagttaataagtcaataactatttagagtgacgggtttttgaatcaacattaataaaaaaaagtaaaatataattaatccaccgtttcaatacgagttaaatcattaatttattaaacatatcaaatcaataatatttttaaaatattattaatatgttgttttaataagagttaaaacttcagttttttaacaattgtctcatgtattcgtcgtataacgttacttaataacaattataaactgtaaaatataaatattttataaaaaataaaatttgtaagttttaatatatattacctttaaaaaataaattgtcctgcggtgtaccgcaggttaaaatctagttggggtataaatcgggaggatgatgtttaggccaatttttataaaacaagtgtcctgagtcttattgtatacaataggagtgtcaaaatgggtcaaaattcatgagtcaactcaactcaactcaacccatgaatcctaataagttgaaatttttgactcaaatgagttgatgggtcaaatgagttattgagtcaattggtttgatgagtaaaatgagttgagttgtaatggttaatggtttcagtggtttacccaattaacccattatattttgtaaaattgaattaaaccaactaaaatctctaaaccaatatcaatttaagtttaaccaacacatgtaaaccaatttaatacaatcattatttttccaaatttcttaaatatacaagcgatgaaattaagaaaaaataaaccggtgatttttccacaaaaaaacataaatccgttattttcccgccaaaaacgtaaacccatgattttcccgccaaaaacgtaaacccgtaattttcctgccaaaaacctaaacccgtaattttcccgccaaaaacgtaaacccgtgattttccgccaaaaacgtaaatccgtgattttcccgcaaaaacgtaaatccgtgattttcccgcaaaaaacgtaaacccgtgattttcccgccaaaaacgaaaaacccgtgattttcccgccaaaaacgtaaacccgtaattttctcgccaaaaacttaaacccataatcttcccgcaaaaaatgtaaacccgtgatttttctgctaaaaaagtaaacccgtaatttttccgccgaaaacgtaaactcgtaaaaagtgaaatccgtaaatatcctaagtttgatgatagtgaattaataattattaataatggtaattatttattattgtttaataataatatgaattaaattattacttaaatgggttaacccatttaacaactcaacccattttgtaaatgagttgggtacaaaatgagttgggtcaacccataactcatttaaccttaaactcatttgattatgagttgagttgagttgggttacccattttaacatccctagtatacaacttggttttaaagttactcataaacatgatcgtgacacatgtcaaatgtttatataaatatttttaacaaaaagatatatatactaatttaaaaataaattaaattttctttcccataatccaaaaacgaaaatgtataaaatattaaaaatgtataacgaaaaacaaaaactaacaaaacaatatataattaattttatattaatggttataattaatcaacgacttgccaattcacctacgtactactagttaatcgaccagagagctagactagtataaaagagatagtgcctccctcataatttttatatccaaaagactaggaaaaagaaaataacttaacatatg

SEQ ID NO: 21982 - DNA, 3003 bp, Unknown; identical to SEQ ID NO: 21981
  misc_feature (1)..( 3003): 2750-1469P.txt file - cDNA_ID_2041166; gDNA_ID_2926163; Annot_ID_198912

SEQ ID NO: 21983 - DNA, 3003 bp, Unknown; identical to SEQ ID NO: 18214
  misc_feature (1)..( 3003): 2750-1469P.txt file - cDNA_ID_2041353; gDNA_ID_1621108; Annot_ID_171667

SEQ ID NO: 21984 - DNA, 3003 bp, Unknown; identical to SEQ ID NO: 18214
  misc_feature (1)..( 3003): 2750-1469P.txt file - cDNA_ID_2041353; gDNA_ID_2926207; Annot_ID_202323

SEQ ID NO: 21985 - DNA, 3003 bp, Unknown; identical to SEQ ID NO: 18216
  misc_feature (1)..( 3003): 2750-1469P.txt file - cDNA_ID_2041364; gDNA_ID_1620619; Annot_ID_162214

SEQ ID NO: 21986 - DNA, 3003 bp, Unknown
  misc_feature (1)..( 3003): 2750-1469P.txt file - cDNA_ID_2041423; gDNA_ID_2936554; Annot_ID_194181
ttaagttctcactccttctgtatccatttcatctcatctttctttgctggtttaatattaccaaagctgctttcagaaaacgaagaagcagagtacaacaactggactcaggacctgcaataacatattggcaatgacaaaggtgaaaaacagagccatattttcttacctctttatgtcccttgctttctaggtaacttgtatatatctgtttaataaatcaagggtgttagccaatatgactgtttggtatgttacagggattgcatgcaaaagcgccttcatttatcggaaacaccagtgttactctttcttggaaagaacccacgaaagtgacgaaaccgttagcctctacaacgactgggtacaagccaaatcaactttgttagttttgcaggtttcttttcttgttttgcaaatgtggaaaaactaatgtttgtacgtttcatgtggctctaccacagaggaaaacggcctgcaaatggagccggtaataacgtgggtgcaaaaaaggctcgtgtgcagaatcaacaacaggttgtgaacaaaagatctgagggaatctcacacggtggtggtagaggcagtcacagaggccgaggccggggccaaggtcagggaagacacagtggtggtggtggcggccgtggccgtggaagaagaggcttctggtaatttcaaaggattctccatgacactcttttttgtctgttcttgtataacagagtatgtttatccttcttgttttggctcttttaggctcctaacattcgacaaacaaattaatctcttttgcgatttctttggcttctcctttatatgacaaattctttgttttcttttctctttaactaccctttctgggaagtcaactgtcctaaactcataatgcaatagtcagaaatgattaatgccaaagtaacagtaaaaaatattaatttataaataaccccttcaaccttctctgtatttatcaacttaatgtcactccatgttatatattcgacaatgtaactctgtgtttcaacgcccatgcatccttccaatggcacaacttgttctgtccctgacttctctctttctagcctctaatctttaaatgatctcatgaaactggtgtgtaacttcctacagaatccaacgaagccaagcccagagctattaaagagacttggtgagtacgtaacatgatggtgattctgttttgtggtttctgcagatatatgaccttcttcggattatttttcaatctgcagaagcaagtgtggaaacagatcatgcttctcacattaattcctttcctcattgtgaaactttcagagctattcgattcacgatcttggagacactattgttctaatgacgctgatggctgatagtttccacttctgcaactcttttgcttttggctctttcggtatacatatgtacataactttatagctttactgaattaagttcaagattttgtgtctaatctttgacatattatgaatctctgaagcttttggatacgagtggactaaagaatagcttggataagcgaggatttagctcatgtccgaagtgaaaaagaaactgcagagagatattcgcttgaacgcattctgcaagatggacaactcactagggaaagcttgaaaaagtaaaccactgatcgattgttttgctctggttcttgctttggtttttaatagaaaactaactgactttttacaggctaagggaatcacttgcgctgtaagtttttaaaagaagaacattctttctgttccattgctcttactggttctcggtttttaactttcaagagactaaaaactgctgtgtaggcggcagctgttgctccgagtctgaaggtgggaaagcagaacaaaagtgttggttagaaacataaataacgctttgtctagaaacctaaagaacgctttgtctcttcacttctgtgccaaaaaaagaaaagcaagaaacagcatctctcacattttcacaggtacacataatcattgattcaatcttggttctttagattttttctttctttctttcttgttgctgaatcttgaagttttcgggttcagatctacagggatgttacattcaacaatttgatggggatgtcgagaatcttagtgatagtgtacgccaaaagattgacatggaattgttcaacagagaaaatcttgattttgtttccctgcttcttcctttgtatcatatcccttcaatcattgtctttactacatttcaatgtctcacattgtaaaaggaaaaatgtacagagaagataaaatcttttgacatcgatacatagttatctttctatgcaagtaactctggtacagtccttgttctactaaacaagtatacaagttgtattttctagttccataactctgataaaacaaaattggccttggtgtctacattgacgtttaaagttgtataatgaacattattgatacacatattaaactagaaaattagaagtttgttcaaacgattttaaaagtcaatataatagtcaccaaccaatcatagatgcataattaaagaggtgtcaattcacgttcttctaaaatccagcctcagcttcatcaattttataattttaccaacctcaacaagtatttatttattctaatatatgataataaacctcgagggatattatgataaaactatataataatcaccggcttataataattagaaaggtggaccatttccgttttttaaaatcagactcaataaatgtgaaagtccagtgtttcaatattttaacctcagtttcatcaattttatataccttattgtctttcattattcttttacgtaaaacccttccaaaaatcatgttacattgcttaatttatgtgtgtgtgtgtcagtgtattgcttaatttatgtgtgtgtcagtgtatataaatatatgcagcgtaagaagagaaggatcagaccaaaactattgacttaaaacactgtttcaagtttacttccatg

SEQ ID NO: 21987 - DNA, 3003 bp, Unknown; identical to SEQ ID NO: 21986
  misc_feature (1)..( 3003): 2750-1469P.txt file - cDNA_ID_2041423; gDNA_ID_1620819; Annot_ID_169380

SEQ ID NO: 21988 - DNA, 3003 bp, Unknown
  misc_feature (1)..( 3003): 2750-1469P.txt file - cDNA_ID_2041439; gDNA_ID_2684234; Annot_ID_192359
agaccactacttcagtggtaccaagaggtggccccatttatctgccaaacatggttggaaatatttctaccacccctgaattcaagtcttcatttctcaatgtactacaggatttggaaactcatttatctctggactctacttcttcttcttctcagcagtttgatgtctcgtatgtattcttgcatcaattggctctctttttcatcagttaaaatctggttttttcaatacattaagttatttaattgggatgatttttgtttgatgcagaattgattctctcaagatttatacggatgaggaactcacagagatggctatgaaggaagcctttccggtacgttgcctaatcgtttgttgatttacttctcttcttctgctgtctttcaagtgtgagaacttgtgtcttgatgagtttggtttcttatttcattacaggaagattacctttcccaagaggagctcgaaccatctttaaacgtttctcatcagtaagtatcattaccagcctttcgttatttcttgatataatgtttccccttgtgtgaatccttagtaaaaacgaattggcatgtagcttctttctattagtgtgcttcgatggttgttaagttttttgtttacagtctcaattggttctggttcagccgtgcagccgtgctagctcccaatatatttcgaaagtcttgtagacaatatatatgttaatagcttagtcatgattagaaatcttccagagacaaagtatggttgacgtagacaattgtagaacgataacaaacagttaccttctcggtatgctgcagtgaaaatccattagctgggagggcaaaaaggaagaggacagtaaagaataccgaggtaaagaagaggacactaaagaatactgaggtaatgaagatgacagaaaagaagactgaggtgagtttatgtaacatggtcttggcatggctgggaattactatcttttcttttccagaggctatttgtgtttaggatctcttgataccaaatttacatggtcttgccatgatggctttattgcattttgttatgattgatatggtcatttttttgtttttaggaagcttatcttgtgaaagtcgagcagcttgctaaactcaaacaaaagcaggaggaggataaagcagctgtgacactgcactgcttcaggtctgtaattactattgcatagtctggtttgctgtgtaccttgtctgttttatgctgatgtttcttcgatttgaacttgttttcagcaagaccagtgagactggtaaagatgtagttgcacctccagaaggttttgagcagatgcaatctcttaggttcatagataataattacacggcaagtgatttccccttgcaatgtctttttagtgttgattatgctagtccaagttctaaagtgctcatgcatcctgctaagtattatcttcttcctatttaaacagaagttgaagccatctgacatccagggacaagtggatccgctatttcctgaagtcattttgtgtgttgagatttataacagtcgcaaggttaaggtactgtattgttctgtaaatctttgatgcgggatatagaatattgactgaattctcgtacatactaacaatacttgtgtaaatttttgttcagacccaagaatttttggttctaggacgtcaaatgttgactgagttgaaggacaatattcactgtgctacagaccaggtgatgcaaaaggctggaaagtatgatccctctggatacttcctcatagaagtaagaattcatctcgtttctgtatcttttgatgtttaagtaagtttaacttctgcgtcgctggtttaatcagatgctttttgctcgtctaggatgtctttcacaatgatttaaggaatccctcggctaaagattacagctatcctattttagattggctttggaactcgaaagatgaagctcttaaaaaatgggaatgtgttttaaccggcgaattacagaaaaagcagaaactggttctaggtgaagcgaaatctgtggatttacctcgttacagaactgcagacatgcagagtacacacttctgtgatataagattcagagtcggagctagttatgtctattgtcatcaggtaaaatcttctctctttctcttttggttctttaatttctcatcttgtgaaaacatttggcacagactcgagatattcactgattaaaaaccgtggaacagggagattgcaagcacacgattgtgattcgagacatgaggatgagtcatccagaggacgttcagaacagagcagcttacccgatcatgttctggccgaaacgtaggattcagaaatgcggtgtttgtaagataaagagagcttcaaaggttgcagtggatgacaagtgggcaagcgagaacagtagctatttctgtgatgtttgttttgagcttctacactcagaggaaggcccacttaactgtgacttcccagtgtttgattatgtgcatgagtaaagatgatcttctttgttgcataatatatagataggaagaatacgaagaaatagttggcattgcaagaagaagacatgatgagtcttgtcttggtaaatttgttgcataattggatatatataaaagattttcttgaaatgatgacatgacaactatttctgaatttagccattgtcaaaagctctcttcgttttgaagcggtagaaaattagaaatgtttatgtttagccaaattcaaaagtagaggagattccttgaatttctgttttctctcgctgtcttctcaatattcaaaactcaaattggtgtcttctccaatttagaaaacgttaaaaacaagagaaaataaaactaaactttttagaaccaaaaaaaataaaaataaaacgcatttgggatttctcattgtcatcccaagttcttggaacagccaaatactttttcattattagtttataatcgtctcataaaggcaaaaaggtttatttcggaaataagatg

SEQ ID NO: 21989 - DNA, 3003 bp, Unknown; identical to SEQ ID NO: 21988
  misc_feature (1)..( 3003): 2750-1469P.txt file - cDNA_ID_2041439; gDNA_ID_1620819; Annot_ID_169414

SEQ ID NO: 21990 - DNA, 3003 bp, Unknown; identical to SEQ ID NO: 21988
  misc_feature (1)..( 3003): 2750-1469P.txt file - cDNA_ID_2041439; gDNA_ID_2684234; Annot_ID_137673

SEQ ID NO: 21991 - DNA, 3003 bp, Unknown
  misc_feature (1)..( 3003): 2750-1469P.txt file - cDNA_ID_2041443; gDNA_ID_1620819; Annot_ID_169413
ccacacaaaaatagttccaaaaagttgggagcatgtactattttggattagcatgacctgttcaagtctagctccatagactttctctattttggtttcacccttcttacaaaaacacatatgaataattgattttaatgtataagcacgtggaaattatgtagtttgttgttaatctaaacacctaccacgcaattagctctgtagtatgtgtgatacgtattacagtggataaatgttttttgcttcatgttgaaaattttgtgagaagaaaccaaaagatctttggctctttcttatgtaactcttcccctgtcttattgcttgtgtgtaactcttcctttaacttcttcttcttcttgatgcttttgcttgagtaacaagtttgattgttgaaaacctaggatcatctaaataaatacagagaagccttattgatgatttctcaacttatagttcttttctttggttctgttcacagctgaatttttgggttttccgcttgtgcctcctttttacggatctcaaaatgcaaattttgagaaaggagttaattttgcggttggaggagcaacggcactggaacgttcctttcttgaagagagaggcattcattttccttacaccaacgttagtttagccgtacagcttagtagcttcaaggagagtttgcctaacttatgtgtctctccttcaggtttggaagatctactttgcctaacttatgtgtttcctgttttacatgataagaacatcaaatctgatttcttaggctcccatcatatcgtactaaaagttatgaaatgttccacttcaccttaatattagcctcatggactagtatttgaaaggcaatgattggagcatttttgattattcttttaaaggttctagctatagacctagtattcatcttttggttaagaagtagaaagtcaaaacaaaagtgggaaaaaggttctgttttgagatgtgcttagagatcctacccgttattctgttaaactccaacacgcaatgaatcaagctcacttgtaaaacaatggcttactttggaatcttgtttttttagactgcagagatatgatagaaaattctttgattctcatgggagaaattggagggaatgactataactacgcattctttgtgggcaaaaacattgaagagatcaaagagctggttccgcttgttattgaaactatctcttctgcaatcacggtaaacacttctcttttgaatatagcagtccaactaaatattaatatttgaaagcataaaatatacaggagttgattggtatgggggggaaaacatttctggtgcccggagagttcccgctcggatgctcagtagcctatttgagtttatatcaaacatcaaacatagaagaatatgatcctctaacaggatgtttgaaatggctgaacaagttttcagaataccacgacgagcagcttcaagcagaactcaacagacttcagaagttgtaccctcatgtcaacatcatatacgctgactactacaacacactgttgcgtcttgcccaagaaccagccaaattcggttagactttttcatccttctactaaacccaaacaaagaatttcattgattaactgtttctaattatcaaatcagggttcataagcagacccttgccggcttgctgcgctttaggaggaccgtttaacttcacattaggtaggaaacgtgggactcaagtacctgaatgttgtgacgatccttcaaagtatgtgagttgggatggtgttcatatgactgaagctgcatatagattgatggctgagggtatacttaagggaccttatgcgattcctcctttcgattggtcttgcctcagctctgaaattaagaacacacagaattctttgatgaacaactgatgtatgttggtcaaaaatttgagacaagaatactgataatatcatgtatgttcctcagtcctgaacatttggtcatttggatcatgtgttgtgtgttactgtgtttgacaatctgtattgttgttatggtaaataacggttgtgttgtatcacacactataacaggtttacgtttacctaaacatattaagttataattaatgggccacaggcccatattatataatgtagttgggttttgttgacttgaacggctccagtaaattaccggtctgatgattgattgacgaataaagcgaataaaccatcggttatacaatttaaccgggtttatgacaacttcagagaccttatatcagatttcaaatcttcttcttcttctccgcgacgacgacgagcttcttcgattgatgactgtaataatctttcaagtttaattgcatcgcataaagataaagcccaatcctttattcttctaaaaccctaatttagcgtttcgagaagccgcaaaattgagttttgttatttcaaaaaatcgaaacctaaaacctcaattctctgggaatttcaaattctcttttcagtgtaatcgtcgtctcttctcaattcgacctaccgagtaagtttatcttcttccatttaagttaaattttgactctttccagcatccatggtctcactgtgcttctctttccttcacctcttcattgggagctttgaatagcgttttaatctatgtttaatatagtaatgtcattgacactgtgaatgatgctgatggttgttcttgtatgtgcacatgaattgtatttctgcgtatcacttgcattactgacgttaatctagtttatcaatcaaattctaattcagtgattttattgacttgcaattctttgccaatgtattgttgaccattttctttcttgatccattcatgtgcacgtttaagaacatccttgtaaggtcatgctttgtgatttacctttcttctgttatgccttgtaagtaagtatagttttttttggtacttttgttcacaggctgtagtacgtttgctgctatcagaaagagataatcaagaagcagaaataaaatg

SEQ ID NO: 21992 - DNA, 3003 bp, Unknown
  misc_feature (1)..( 3003): 2750-1469P.txt file - cDNA_ID_2041449; gDNA_ID_1620819; Annot_ID_169411
tctacctaaaaattgattattgttttcttgtctcctagcgaatagaaaagagaaggagtacaaccttccggcctctcccatggcatctttagattctcttccggcgatgaagctcgtgagattcatattatctacccttttggtcacttctgtgaactcgcaaacgcaatgccggaatttcaaatcaatcattagtttcggagattcaattgctgacactggaaacttgcttggtctctcggatcctaacgatcttcctgcttccgcgtttccgccatacggagaaaccttcttccaccacccaaccggtcgttactccgacggccgcctcatcattgatttcattggtacgtttatttacataaggtgtgagtgtagaaaaaaagagctattaattattattaattacccttactctcttttttcattctatattagctttcttgaatagcaagtttgattgtataaaacctaaaaccatctacatacaaccatattaagtgttgttgagcctccttattggttcctcaacttacagctctctcttgtttttttttttcggttatgttcacagctgaattcttggggtttccgcttgtgcctcctttttatggatgtcaaaatgcaaactttaaaaagggagttaatttcgcggtcgcgggagcaactgcattagaaccttcctttctagaggagagaggaattcattctactatcaccaacgtcagtctaagcgttcagcttaggagcttcacggaaagtttacctaacttatgtggctcaccttcaggttgggaagctcaactttttcttctctgtttttggtgtttcatgttttatatgatcaaactatcaaaatttgattttcttatatgcttatattgctataagttgtaatactttattttgctgttttgtatttagattgtagagatatgattgaaaatgctttgatactcatgggagagatcggaggaaatgattataattttgcactcttccaacgcaaacccgttaaggaagttgaagagctggtaccgtttgtgatcgctactatttcttctgcaatcacggtaaacattcttgatcagccagttccgggaatgactaaaacatatttgtatctacgctgataattagtttggtaagaaaaaacacatgtacatgttacgttgttttgaaactgaatgttgaattcaggaattggtttgcatgggaggaagaacattcctagttcctggaaatttcccgatcggatactcagcatcctatttgacattatacaaaacatcaaacaaggaagagtatgatcctctaacaggatgtttgaaatggcttaacgatttctcagaatactacaataagcagcttcaggaagaactcaacggactcaggaagttgtaccctcatgtcaacatcatatatgctgattactacaacgctttgttgcgccttttccaagaaccagccaaattcggttaggcttcttgaatcctccaagagatttcttcacaaccaagtcactcatttgattcactaattaattaaccgattttattatccaatcagggtttatgaacagacccttgcccgcttgttgcggtgtaggaggatcttacaacttcaactttagtagaagatgtgggagtgtaggagttgaatactgcgatgatccttcacagtatgtgaattatgatggcattcatatgacggaggcggcatacagattgatatctgagggcttactcaagggaccgtatgctattcctcctttcaagtggtcttgcctcagctccgagattatgaataagatgtcattagatactcagattcttgatgaacagctactacaaggttgtctgaaagtttgagagacaagagaaagagtggaaaaaacatataggttcttaagtgtttgtgtcttcttcttttttgttccgggtaacggtgttaattagccttaggtgcatcatgcatgtgttggatcatgtattatctttgtattgtattgttttcgttagtttgggtaagagttagtatccttaattgttggaccatgtacactgtcatatataatttaactatatacaaaacaattaaatgcataatttacgcatcgcgtggccaaatttctagaatcaaatatggttttatggtaagaaatcagaacactatgtaaatttgattaacgatgggactaattcagaaaaataaataaatactaagtctaaagaaatagttgggaactggcggaaaaaaaaaagttggagagtctttaggtctaaacacatgttacatgtataaaaggaatttaacaaggttgtatacgtagttacgtacattaggtgtttctctgttcgtgtgtacaaccgcatatttttaatctttggatcatatagtgttgatgaatgtgtacatcaactattggagatataatgtattatgctgtatacgtacaacagaatgttccaaaaatctttcttcttttttttattttattttaaatcggccccaatggtgctataataaacgagaaagccaaaaatactacaaataaaagcctcagtgatgggtttatcgtttaagcgaaagtgacgaaagagaggaaactagacagatacgacagtaagttttggtcatcgaagatacgtattgggatccgctcacaagaatttgttgtgtgtctttttgctaaaaggccaatacgaaaatcgttgataattcgtttcatctaccgcaatcactttatccttgaccaaaaaaagaaagaaataactcaaatatcaattttataatcaaataaaaacttaaataatcaaccaatatacccgtgtgtgtcaaaccatactgcatcccaataattgatcttttaatcattctttattatcttatccttggtattgtggctagtggggtattttcaaaagacttttttgacaaatcaacatcacactattaaaaaagggatctcgacggagaccaaccttcagctctctggcaatg

SEQ ID NO: 21993 - DNA, 3003 bp, Unknown
  misc_feature (1)..( 3003): 2750-1469P.txt file - cDNA_ID_2041459; gDNA_ID_1620819; Annot_ID_169407
agttcgcttcttagacgtgccataagtttcaccgcttacggtttcagttgatgtttcgattctcgaatgtctatggttctatgtttattttttatttttaatggcataagaccatgttttatgagttacttgatgtaatacctaaactttcattttttgaaatgatatatacattcttattaaaatataataaaaaaatcttgatgtattattttaaagtaattttatcaatgaataagatccatttaacattaatgagcatgtgaaacttatctaacatacctttgaagcatattataatagttcatcctttatggttgtcttttacattaatctttttcctagtgatatctggacgaagacagatggtttcagtataagattcataaaatagttactttgatcaataaatttttcatttagaaaaaaaaattgctgacatatatattactcatcttttttcattagatatataaatatttatactcgcacccaaaaccaacatcgtactggtgctccttatagagttaaactcatggccattatctgcatgatctaaacaagagtgagtataaatacttagtgcgagcgaatatttccgtccatatgcaacacaaagcgatgaaccactaatttatatgtattttcaaccaatcaattatcatagcctagactacacatgcatattccttcaactagctacggttcactattctaggctatgataaattactatatcggcctaaagcataagtttgtgcacaaaaataaaattaataataattaacttgtgacctaaaaagcatataagtataactactatatttagctttatgaaccggccgggcctcccatctaatgtcgccttcaaagtttcatttgtggaagctcacatgttttctgatcactgtagccaccgaagtcttaggctcagagtctttccaacgttataaatcgatcatcagcttcggtgattcgatttcggacaccggaaactttcttcatctctccgacccaaatcatcttccccgatggccgcctcattatcgacttcattggtatgaacttctttttacaccatcccatattcgcagtttaaatcaaaacttcagaaatatttttcagtttttagtatgaataatcaagattcaacaagtgttcaaaaaaaaaaaaaaaaaaaaaaaaatcaagatccaattagtcaacttaatttgacagctgaattcttggggataccatatatttccccttactttggacataataatcaaagctttgagaatggaatcaacttcgcggtggctggagcaaccgcggtggagcctgaattgcttcaagagaaaggaattactgctaattacatgactaatgtaagcttgattgttcagctaagcatcttcaagaaaattttaccaaacctctgtggctttccttcaggtgattcctcacaaatctcaactcatcttggaacacaagggacaagcataagccaatctttacttgttttcaagattgcagagagattctcgaaaactcgctgtttattgttggtgagattggaggtaatgactataactacggattcttgattggaaaaagcatcccggagattaaaaaaaatagtcccccttgttatcaatgctatttgctcaacaattgtggtaataaaaatctttcttaaatcctgttcaatgatccttccctttttcttgttttgtttgggagactaagaattgaaccttgcaagcatgaacaacatggtacaggaattgttcaatttgggagccagaacgtttctagtgccaggaaagtttccaactggatgttctgctgcatatttaacgagatttaggacaacagatatgtaggactacgatgctttaaccggatgtttgaagtggcctaatgagttttctcagtaccacaatgagcagcttcagacagaactcaatagactccaaaaactctatcccattgctactatcagatacactgactactacgacattgtgttacatttttaccttgaaccgacgaaatatgttgccctttcttattccgtccccttaactaacatatatacagtattgtcacaattatttatattaccaaatttactcttttgaaggatttatggagagaccttcactgttgataagccatgtgggtctagaggagtgaaacattgtcgagttccttctgagtatgtgacgtgggacggttttcatttgaccgaagccgcctaccgatggattgctaagagcttgcttaatggaccacttgcgtctattgctttggccgctcctgcattttcctttttaagctgatctacggacatagatcactttcccttgagcacttgggacctgttgctgcgagtaaactaaaatcacgttcttcgtttaatcacattgattgtttttttttttttttgttggtttctctttactttgttttcaaattaatacacaatctcttgcttgtacaacaagtttatgggagtaaatctttaaactaatttttatttgtttataaaaattttctgaataattttctctctaagaatgtaattttttttattttttttgataaaaataaatgttgatatattaaaatagccatactagattatgatttgcagtggaacccaagcaagtataaatcatggtagataatccgtaactagctcgtaaataacctgcaaataacttatcactcatgaataacatgaaaataatctgtagatattttctagaggttggttagaacttagaagtccacctacccatcttaaaacgatacaaatacaaaattttctagtccataaaaagttttgtagtcttggcccaccattatttataaggcaacaacaaaatcattgagacatatactcaccagtcctttcttttgttgtttacgaaaaaacgaaacaagatgttttgtaaaataatataacattctaaaagccgaaagataaaaatttcaccgcggacttctcgtatg

SEQ ID NO: 21994 - DNA, 3003 bp, Unknown
  misc_feature (1)..( 3003): 2750-1469P.txt file - cDNA_ID_2041489; gDNA_ID_1620819; Annot_ID_169399
ttcttactggcataataaatgaaatccaataatggcctcatctcttgcattattcagtgatccaaaaagactttaaaaattgagtgacaaagacgaacgaagaccacgattagctcttcccatggcttcttcactgaagaagcttatctcaagctttctacttgtcttatactccaccaccatcattgttgcttcatcagaatctcgatgtaggcgttttaaatcgatcatcagctttggtgattccatcgcagacaccggaaattatctccatctctctgatgtcaatcaccttcctcaatccgcctttcttccttatggcgaaagcttcttccatcctccctccggtcgtgcctctaatggccgtctcatcatcgacttcattggtagctattttttcatctctataggcaaaaccacctgttatcatttgctctaagtctttcttacgtgaacagcaagttatacttcttcctgatctttttttcttatgttgtcttactatttgaacagccgaattcttgggactaccatacgtaccgccttactttggatcccaaaacgttagcttcgaacaagggatcaattttgcggtgtatggagcaaccgcattggaccgagcgtttcttttgggaaaaggaattgaatctgatttcaccaatgttagtttaagtgttcagcttgacaccttcaagcagattttgcctaacttatgcgcctcgtctactcgtggttagaaacttagccttgtcttgttttgttttttaacagaaacgtgcccttgttcttttctatgtctatggactatgatgatgagtctagctagcttggttctaacagggtttatttcgtttcttgtctagattgcaaagagatgcttggagactcgctgatactcatgggagagattggaggaaacgactataattacccattttttgaaggaaaaagtatcaatgaaatcaaagagcttgttcctctaatcgtcaaagctatttcttctgctattgtggtaacaaatcttaacattgccctccagtcacaataataatcacattatattttgtgttttatattttaaaaaattaacacaaaactacaggatttgattgatttagggggcaaaacatttttggtacccggaggcttcccaacaggatgttctgcggcgtatcttactctatttcagaccgtggcagaaaaagaccaggaccctttaacaggttgttacccattgctcaacgaatttggcgagcaccacaacgaacagctaaagacagaactcaagcgactccaaaaattctatcctcatgtcaacatcatttacgctgactaccacaactccttataccggttttatcaagaaccagctaaatacggtccgtgaaatttcaaactctgtcgttgaccctcacggattaattcattaacagatattttgtttgtctttttcaatagggtttaagaacaaacctttagctgcttgctgtggagtcggaggtaaatacaacttcactattggtaaggagtgtggatacgaaggagttaactattgtcaaaatccttctgagtatgtgaactgggatggttatcatttaaccgaagccgcctaccagaagatgactgagggtatactcaacggtccctatgcaactcctgctttcgactggtcctgccttggctctggtacagtggatacataaagggtattctttcagcagtaagaattcattcgttgtaaaaaatcaaagaggaagaaaattatgtgatgatgatgatgatgatgatgattaacaaaaacattgcttgtacggcaagacttgactaatgacaaaacttccgaggatatatggctatatgcatatatcttatcactgaaaaataccacacgcaaatagaaaatcctatatatacggttcgtagcactagttgcactctagttacaatgttgagaaaatctggaagtacgtataattttaagaccattctaagtttataaacagttccctggaagatgttggagaagttttggatgagttgagtgggacaaacgacagctaaggatttaaataatttcataacatccattgaactgaaagattaagaacataatatactatttgggacaacttacaatggatggatataacagatgagaacaagtgaggttcattgattacacattttggtcatttaattttgaaaaggttcaaaattctaaagtcttgctatttagagccagggttcctccggggtcacaaccagagacctattatataaaaaagaaaattatttaaaatttcttatttggattacactaaattaaaagtgattaagacgagagactagcccatttgtatccatgcataaacttaggtgtctttttatacgtggcactaaagtacgacttagccatctaatctaaagtggaagtttctgaagttacttcattgaacactcaatagtcattaataaacctgaccattttcctcaatttactaataggcgttgggataatacataaaatccaataactaatgcctcaaactctgcattagttaaagattctaaaaattgagtaatagagacgacaattctcctatggcttccctcatactatcgcgtgcgtcacatatctccataaccgtttcataattgttctctttctttttcactcattttataatggattagttaaagaatccatttatatgattataataagtaaggaaggccaaatagaaaaaagaaaaagcaacgaaggaatatttcgttattactagtttcacgaattctatcatcgaagaatccaatttcgtgatggagcctccaacttgtctgacgtttctgccgttaacttctttttctcatttctctctttcttactggcataataaatgaaatccaataattgccacatctcttgcattattcaatgatccaaaaagactttaaaaattgagtgacaaagacgaacgaagaccacgactagctcttcccatg

SEQ ID NO: 21995 - DNA, 3003 bp, Unknown
  misc_feature (1)..( 3003): 2750-1469P.txt file - cDNA_ID_2041493; gDNA_ID_1620819; Annot_ID_169398
tctgagcatacattggcacacatccatttccccagtagcctttaggcaaaggtggattcatcaatctccttatatttatcgaatacacaaatttcacattctccttttcctcagtctttgcagctcttaccctgaatttcgatattttattgtttcagatcaaacacatttcaaaaaatttgattgaatcaaacatagtgaagaagaggttacttactttgcacgccaaatgtaagcaccaagagcttcgaatgtggtgaaattcagacccgatttctcgagtaattgagccttcaattgatccaaagaatcgtcggtcacaaagaagcagtctcttttgacgtctccaatggcttgtccatatggatcaaagtccttatccaggctcaagaagtcacgaactggagctccaacccaaggcttctcccttggaccaagtaaacgttctctgtcccaaaccggttcgatcgaaatctttgtcgctccgcgagctaattccgccatagcgttgaagaacagactcgcacctaacccatcgcagatcgcatgatgaatcgatgcacctagaacccaaccaccacactgaaacatagtgacctggaggatacaaggattgaccattccttcctcccgggtcggatccggtaccaatctctcgacgaaacctggatcgggtccatccaaatacccgactgactcaagcgtacagttcactgtagcgttgactaaaggcacgctttgaccagcggagcagagtagttcaaatcggttatcggaggcagagcgacggagagagccagcaagagggtagtagtgaacgagagcggtggcaagagaggcggatacgacggcagaggggctttctccggcgacggtggaagaggaggaggagtagacgcggaggtaacggaagctgacgtggaggttgttatcattgtcgagatgggaaagagagagagtttggtcgttggagagtggttggtgagaaggttgaaccagggctatatcggtaatttcaagtgtcgccataccttaataataagaatggtatgggtctttgttacttccaaaataagttttggggtccatatttataagagaagcaaaatcaatgccttgaggggacacagctcacgagagtaggcttcaccaactaccaaacggtcaagtcccatgtccaaatttctcacctacaacagtttcaaacaaaatcattttagtctttttgttattcataccatacttcatacttgtcttcactgtttttatgatcgagttttgtatgagtcttttcaaaattcaatcatgcttcttgtcttcagtcttcactgtttttctcctccacaagattagtatttttttttctttttttgtgcgtaagatagagttgtggtcgaaaattgtaagaaaaagaatctagcgtcaataatacaattggtggaaagaccaattttgaatctgattagggaaaaatgttgactagtgaacaaaaatttcttggtaagaaactataatttttttttttcaaaattataaattagaagtcgagagctattggaagtcggtggaactaaatggttgattggttcattagtaaaacacacgtggtgccactacacttttttaatagttacttgactggtgctgtttgcaaagttattatgattgatgattatttttgaaagaaaattggaatataaattcggttaggtcagtattgtcatgtatttgttaaaccactgtatattatactcctagcttagtttaatttatgagatttaagtggaattcatactaatcaaatgtgagatttcttgaaaattgtagtggaatttcttcaaggtcgaataggattattaaagagatactataaaggagcaattggtgccgacaaaaaaaaataaaaataaaggagcagttggaatggtcagctagaatttcatactccctccgtctttttttacttgatgtttagcagaatacatacaaattaaaaaaaaaaaaaatttgtttatttctaaattaaaatatcatttattatttaatcaactacaatctaaaaaataaaaatcatcaaaatcaataaaaatataactaattctgcattaaaagtttaaaacatcatttattaaagaataaaaatataaagcttaaaacatcatttataaaagaatttagaaagtagtactaatataatcgttttttaaagtgagccaaaatagatgactttgacacaccaaccaaaagcctaaaaagtggaacatgtaggctttcaaggcaccgcggacaagatattgttaatcgcaacgtcattattattgatttcgattcgtccatctgtggaataatacgaatatcattattagagtatttactaatcaaatataaaattatgtagactataacgaatcatttttttcttcttccaaataggtaaatactctaagaaagatattcatattattccaaaatgaatgatagctatatttgatttctataataagattccacataaaaactgactccataaagatatagatcacgcagagtcgcagactatcgcgtgcgtcacactactcacacatctccataatcaattctttctttttcgctcgtcttgtaatggattagaatataggtaaagaatccatttatatgattataaaatggtaaggaatttgcgaaaacccaaaagaaaaaagcattgaaggaatatttcgtaatcccttattattttcacgatttctatcatcgaagaatccaattttttgatggagtctccaacttgtctgacatttctgaagttacttcgttttcaaccaataagcaaaatttctttttggaaaataacaaataaccaaattttataatttctctctttcttactggcataataaatgaaatccaataatggcctcatctcttgcattattcagtgatccaaaaagactttaaaaattgagtgacaaagacgaacgaagaccacgattagctcttcccatg

SEQ ID NO: 21996 - DNA, 3003 bp, Unknown
  misc_feature (1)..( 3003): 2750-1469P.txt file - cDNA_ID_2041497; gDNA_ID_1620819; Annot_ID_169396
tatataaattaactaaaacaacaatttcattttattttgttacaggaaaaagaattgaaaagcagtgattttctcatatattaggatttgatctgcagtagccgcatgataataattttgtgcatatacataaagtctttgacatttattttaaaattgtgcatattttacatattgaagtttgtatttaaaaatacttagttttataatcaagaaatcagtaatatcgctgataaatatgactaattggattaaatttgatatagtctatatatttgaagtgtgtaatttgtgaatatgaattttaagtaacatcataataactactgctctatataacattgtggaggttaaaatgtaagaaaggaaaatacagatagtataataactaaacaaaaagactaaacatcagaacaattggagatattttatagttctttttcaaagtattataatatttacataattatatagattattagaattattaattagttggactattatagatatcgttttttttttaattattgtgtgaaatttgatcattttaaactaccaacgatcccaaagatgatgcaagagaagagtctttgaccaaatgtaagagaaaaacgtgttttcgatgattgatggatatggagatcagaattaagaaaccctgatgaagcactcaaactcttcactataggatgaaggattccgtatagaacccaattacatatgtaacctttcttggagctctctcggcttacaactacatatgattagtgggtacctaaagcatggattgataaagtaaatatttataagattctctaatctctatagcaaatataataatatgttggcgtgatgataatcgtgagactaaagtaggaaacaaaaaccctagaacaaaagatgattcatgtgtgacgtattcgagaaggaaccttaaaaacgtttgtgatattcacattaaactggtgttatacatccaaatccggtaatataaatatagtgttgaattgttgtgtgaatcaaaagagagaaaatagggcacatgaaatagttgtgagtatatcctaataatccgaacaaaaaccaaaaacatatgacttcctacaataactcctccggcagtctcgccctggccgttgctcttctatttgccggcgccttatatatctacttctcatcacgttcagcttctgatcccatctccggtctcctacaaaatgtcaacactgtaagttgattcatataatatatatggaattctagagtacaaataaaggaagatttgaaatatattttgaaatggtacgtgacagagattgatacagtatccggtggacgagctagagacggtgctggacaaggcgtcgacagggaacaacaagacggtgataatagcaatggtgaacaaagcttacgtggaggaggatggaggagggaggacgatgctggatctgtttttggagagtttttgggaaggagaggggacacgcccgcttcttaaccatctgatggtggttgcagcggatcagacggcctacgatcgctgcctcttcaggaggctccattgctacaagatggatacggaaggggttgacttggagggagagaaagtatacatgtcaaaagatttcatagagatgatgtggaggaggactcgcttgctcctagacgtcctcagccgcggctaccatattattttcacggttaggtccgtcccttgattttgtaacatatataacaaaacacttaatttgttgctcaaacaagtagtgtatatacaatgttaggatacggacgtgatgtggctaaggagtcccttgtcccggctaaacgtgagcttggatatgcatataagcgtggacagaaataacgtgagaggacaattgatcaacacgggattctaccatgcccggtccaacaacaagaccatctccctcttccagaaatggtacgacatgaggctcaagtctttgggcatgaaggaacaagacgtcctcaagaatctcctagactctggcttctttaaccagcttggtctcaacgttggcttcctcagtacggccgaattcagcggtttctgccaagacagccctgacatgggggctgtcacaaccgtccacgccaactgttgcgtccacatccctgctaagatctctgatctcagtcttgctcttcgtgactggaaacgctacaaagcctcccgtgtcaacagcaggtggagcccccatgttgagtgcaggcgttcatggaaggacgttcattatgtccccaagctctgactttcttcgttcatataagcaaattaatgagattgctatatagtatacacaattacatcatttataagtgcatatcttcttttgattaatcctctagctagctagatgagcaattctcttttaacaagtaattacaaaacatcttatatgtgtgttacaagctatattctcgttttttattttttcttttaataatatagagattaatttactatgttagacaaatatgtttttgttacaatgattgtagaaaaaactacttggctaatctaattccgaaagagaggagggcaaaatggaaagaaattgagaatgatctcaattaaggtagaagagacatttatatcatttcttacctaatggcatatcatgtaagtaactaaaagttttgttaattttgatatgtagtaaatatatatgtacgtttattggattcatattaattcccttaggtaaacagaatgttacgtgaacgattgaaaatctcacagagtaaaaacacaaaaaccctaattacatgacgattcttatgtgatatattcgtgaaggaaggaaccttaaaaacgttagtggattttctatatacattattcacatatatccatcgtttatataaataaataaataggttaattgtttagtacaaaatcacgagagagagaaataaaaaaggcgtgagtctcctaactagctcctaataatgcgataaaccaaaaacatg

SEQ ID NO: 21997 - DNA, 3003 bp, Unknown
  misc_feature (1)..( 3003): 2750-1469P.txt file - cDNA_ID_2041505; gDNA_ID_1620819; Annot_ID_169394
ttaatgattgtacagtgaagagtggtatgttcttcttttcgtctgcattaagctccttatattttatcttgctgaaatgaaagggtattctatagttcttactttggtttagtactaaataaagatctgattttaagccacgttcttctttaactgagatcatctactatagaaaaaagtcaatgggggcattccgagaatcgaactcgggacctctcgcacccaaagcgagaatcataccactagaccaaatgccctgttgttgatttagttacattgaagcattgaagcattttattgtttgatcttgtggataagagaattcacactttactctatttttagggaaatctacttttggttgttctattcttgatgaagctagcaacatgcaataagttcaaaattttctatatttatattggaatctgacgttagaatgctgaatgttctcttgtttgaaaaatctgacgttttagatctagttctatcagttgactttcagggcttaatagtaaaggtggacactgtactttaatagatgaaatgttagctggttaaaacatttgttttacaaaaagtcaaaggggcattccgagaatcgaactcgggacctctcgcacccaaagcgagaatcataccactagaccaaatgccctgtttgtatatcttgttatgttaacgcattctacttgcattctgttttttccgtgacgagaatttatgctttcctttgcttttcattagatgattattaaatatttccgtgctgtttctgcggctcaatctttggcagcatacacagcgtgtttgtcttttctgtatgaattgtactggttaaaaagacatacattattggacgtgaaactgcattatgttctttttctttgcattatgcacttgatcatagaactttaaggagcttttttgtttttgcttttcacttgctaaattggaagaaaaatatatggtctgcagttggtttatatgtgaaagaataggactggttttctagggaagctagcattgagaacagatgatttacgaaaagtcattggggttttccgagaattgagctccgggcctctcgcaccctaagcaagaatcataccactagaccaaatgcccttcttttttgtattatgttttttagttagtactttctattagcattcttgcttttctttcagagatttgttgcttcgtttgcattttccgtagatacataatcaaaattcttttctgttgatgcagatcattcgttgttatctggatgctaacaaaacatgaaggtcttccctatgtgaagattactgattaatatctattgattggatgtgatagattggtatgttcttcttttcctttgcattataggtcatctaacatttcgagaatcgaactgggtcatcgacttaaaaaatttgattatgttaaaatctgtattcaaatatataagttaaagattggtatgttctgtttgaatataggtcatgtacttaaaaaaagaagtcaaaggggcattccgagaatcgaactcgggacctcttgcacccaaagcgagaatcataccactagaccaaatgctgtatttgaatgcccccactgaagcattgtgttgttgtgtaatcctgtggaaaagagaattcatgcttcactccgttattacaggaaattaagtcatgggggtttgtttaccttttgagggttctattcgtgatgaagctggcaacatgcagtaagttcaaactctttaacttatatagaatgcttttttgtttagataaagaaattatgtttaagatttagttctattagttgatggatttagttctttcagggcttaatatatttagaacttatgtatttaaaactatatatttagttctttcagggcttaatatattcagaacttatatatttgaaactatatatttagttctttcagggcttgatatatttagaacttatatatttaaaattatatattttgttctttcagggttctaacttatatatttagaacttatatatttagttctttcagggcttaatggattgtctgtaattgaaaattgatgaattgaccctagtcattcctataattgaactcgggacctcccgcaccctaagcaagaatcataccactagaccaaaagccctgttgtttatgcaatctggttcaaatatttttgtggtcttctagtttgttttttgaaaaagaggctgaattacgaaatgtttactagttgaagctaagctgcagaagggaggtgtacgtcatcgcctcatcgggcatgtaagcaaaggtatgtaaaagttctggaaaaatgtgatttgatcatagagctataccaaattcttggttattgactatttttgttaagatcatagaggatccccaatagaagtgccattgacaatttatttcttgttgcctaactgatataaatatgaatttacttccgtctctctataggtttggctttaccagccgaaatttatgtctagtactattagttgactttcatggctttatggtgaatgtgatttgtctgtaaattttaatatttgttgaaacataacacaaaaccacaaaaccttgaattgctgaatgtttatctataaaagatctaagaggcaaatatatgggaatatatggaaaattttgttacctgttattctgagataaataagtaaatattgaaaaaatcttttataagattctctttgggaaaatagaatatcgcatgataataatcgggagacattaaagtagaaatacaaatacgtagacacaaaaaccctagaacaaaagatgatgcttcgtgtgtaacgtattagagaaggaaccttaaaaacgtcagtgatattcacattaaattgggatgacttgagtttggtgttacatccaaatccggttatatataggttaaattgttgtgtgcgaatcaacagagagagagaaaagggcacataaaataggtgagtctcctaaacatg

SEQ ID NO: 21998 - DNA, 3000 bp, Unknown; identical to SEQ ID NO: 5819
  misc_feature (1)..( 3000): 2750-1469P.txt file - cDNA_ID_2041515; gDNA_ID_1620819; Annot_ID_169391

SEQ ID NO: 21999 - DNA, 3000 bp, Unknown
  misc_feature (1)..( 3000): 2750-1469P.txt file - cDNA_ID_2041539; gDNA_ID_2936554; Annot_ID_194183
tataaaaaatgcaaaataatcatactaagacaataagtaatatagctcttttccgttattgtcaagttttaaaatttgataaataatatatcaaattgaacctttcgagatgatgaattcaactatatctttaaaatttttaaaataaaatgtatgtgatcgtgaaaacgtttaaaatatatgtaaagttataaaaatggatatactgcgtattattcttgacttcatataattattttgcatttttttttatgtagagggtaaagtagcaaaattgggcgactttgagggttttttttgctcaaaaccctaatgtttatataggtagaagaggaatattatccaaattatgtatgtacatattttgacatcatcgtgaataagaaatattctatattcctatattctaagtgtaacattaatttctataatttatttttttatgccgggtatcatcagacagtaattttgtcggtagaatgaacgctatatcaaatatctttttagaataaaatgttgaatgattattcttaaataagactaattttacagttgtaccgatatttttttccatatttgcctaaattgtattaaccaataactttggattttttttttgttttaacaatttcgagtttcggattttcttaagttcaggaaacataaaccactttatataaatcgaatcaatatatatatatatatatactaaaatgtgaagttttagtatctattacaagcattgatgtgaagtttttactttttagtatcttctgcactgcacctaactacgctttcataacatggcttgcaatggatgacagattgactacatgtgaacgaatggagaagtgtaatactttaatgactacacttgtacatttttccaggaaccggttgagacaagacaataagcaccacctcttctttcaatgctcgttcacaagacaagtatgtgagaagctagctagtaaaagggctacgtcaagaaaagtaacacctcagtttgggatcaaatcactctactcctaacggatgcaacaatcgaaatgaaagctctactaattactattgcagtatatgttccaaaatacagtccacaccatattgagaaagagaaataatataagacatggtgaagaacctcaaacaacttcaagccttggggaaaacatcgataattgttcatattttggctttctactaggagataatttctaaactctatctagtagcgtatgttaaaaacaactcaaaaatcagttgcatttgatgtaataccggttttttgtgaatagattgaacattcattaaaaagaaggttttttacgtgatatagaggataaatagttaatgtgttaatcgtaattttgtatttagccttttctaatctctcttgtacattactcatctaataaagcaattcattctaaaatttaattattattttaaatttttgttgtagagtgaattgatttattagatgagcaatgtatacacaagatagatgagggcaaaggtaattacaataacatccttaacacattaatttatatactctataactggtataaaaaaattagtttgaatcattaaaattataattgaaacgaagattttatgcgagctcaaatagatttacagaaaataaggtatagaaagaaagatatatttcgagtttacaaaagctggaaacagtccattaacttaaagatgtgatttttgtctgattatcccatatctaagagtaaatgcgctatattttcttatatattttctccaatttaaaaagatctttgtcttatattcttcatcttacttagtagatacgcccaagactaaatactgactaaattgatgtgtaatcttttagcttccccgtagatatatattctttcgtaattttgatgaaataattaattgcttaagacaaacaaaaagttggtcaatattgtatgacatatataagtactaattaacaagttggaagatttgtttctatcttttattcctcgtttgtaatccacatgaaaacttttctagtttgtctacttcccatatttagtttttcttttctatttgtacaaattcaacatctatctgttcgctgcatttttccttcaaccttttaaacatagaaattacataattacttttcttaagttcttacgtttgaccaaatttttgtgtttcttttttttgttttttaaattagatattattccaaataaagggaaccaaaataattttaccccatccagccaattcacaaatcacaaccgtggacaacaagtggattagtaaaactaagaagaccgaaagatagtaatcttttattattaacaataaataaataaatatgaaatctattttcctttggtaagaatatttttcttaattatactattacaagtgatgagtacaacaatgacaaatcatatatgccttaccaataatgtaataaatatattgttacagcaaaacaaaaaaattggggttatcaagtaatttctaagttctttcttgaaataaaagcaaaattaaaatatctaaattatatttttatttcctccaatagaattgaagaaaagcacacaacatttttgttttaagcacaacttttcaaagaaaaaatcacggaaataaatgtggattcatgatatctctctccaggtggtttaaaatttaaatcattaaaaaaaaatgatagagatctttagaaagctaaaaacatggagtttgaaaattcctaaaatctcagaactttttttagcactacgccagaagagccgattttgtctcagatttactttcctttaatctctcctatttttaatgacttttatttctttctccttttgcaacatatttttctccaccacctttttttccttcaccattataaattgctctcaatcatttctcttttgtatattcataaactagacaccaagagacaaaaaaaacacacttaagtaatagagagaacacatcacaatg

SEQ ID NO: 22000 - DNA, 3000 bp, Unknown; identical to SEQ ID NO: 5820
  misc_feature (1)..( 3000): 2750-1469P.txt file - cDNA_ID_2041539; gDNA_ID_1620819; Annot_ID_169383

SEQ ID NO: 22001 - DNA, 3000 bp, Unknown
  misc_feature (1)..( 3000): 2750-1469P.txt file - cDNA_ID_2041603; gDNA_ID_1621124; Annot_ID_172212
ggaaaaacacaactcacaattttatgcaaacacaattttacagttttggcgggaaacacacaattccgcaattttatcgccaaatttgtgatttgttgtattggtggacaaacacaatttaggtttggcggaaaaacgtaattccgtaatttccggccaaaatcgtaaatttattgtactggcagaagacacaatttcggttttgacggaaaaatgcaataatccaattttatggttttggccgaaaagtgcaattctgtaattttccatcaaattcgtgattctgttgtattggggaaaaacacaatttcggttttttatgggaaaacacaattatttaatttacggttttagtagaaaacgtaattatccaattttacggttttggagggaacagaattccgcaattttccgccaaaatccaaatttaattgtatcggtggaaaaccaaatattttgtttttggcgaaaaattacaatttttcgatttcatagtttgggtagcaaaatgaatttctatagttttatcaccaaaatattgatagaattaattactcggatatcatagaaaagtatgtttattccaagaataatatacatctttttttaattacttatatattttgagcatttgtgtaattacaattaacatccatgattagtttttattaaataatattatttaattcgtttttcaattaagaaataaataaataaaacaatcattatccacgttactaatccacgtcatttaccctaattcacgttattatccgaatccacgttacacggaaccaaaaattcccttaaatctttcggttttcctttttttctcgacatttcacagttcatcctcgtaaaaaaaacggtcgctctcttttcttgttccgtcgacgaaaccctaatttcgtcgccgttctcggtttatctcgtctcttccggccgaaatccttcattggtgtcgaatttcaagtcatcataaatcaaaacccaaataaaagagatctatggaattctacatgattcgttaaaggtttgagttgaaatcaagaatatctactcttttactttgattttacatgtctctcgtttagtcttcctctttggagacatttatacttctatcaatattttgattcatacggtttagtctttctcctatgtatccctcaaacatattcttacgtttcttaatttgattgttgtcttcccccaaaaaaatttgctttccgatttgaattataaatcagtcgtaaagtgatgtaactcagctataacatgatgtaactcaaccgtaacatataatttacacaacctttcgtcttccttgaatgataactcagtcgtgacatgtaatttaccgaacctttcgtcttccttcaatcatataactcaaccgtaacatataatttacacccatctttcgtcttcctttgagcatatcacgcagctgtgacattttaattgaccgaacctttcgccttcccttaagcatataactcagccataatgtaattttaccgagccttacgtcttctttggaacatataactcagtcgtgacatgtaatttgaccaaacctttcttcttctcttaagcatataagccagctgtgacatgtaaatattctctgaaacaataagagacgcaacatttcgtctaactttatcatcgagcaccaacttcacaagtttgtcctacgttgtttccgcatcaatctgcacaactctacaccctatttcatcggtgttaaatacgtaacctgatcaaccatatcgggagaaggatgaaagaaatagaagaagaatgaggaagacgatgaggaattggaagttccggtggtattaaaaacgcaggtgaagaagacgagttgaaaaaatttggccctattttttggtccattgatgatgctgatatggaatattgcagccgacgtcgttttgaactgatgaggtggcaagtaagccaccaaacgaacatgtaaatttacctaaataattcagctatcaaacaaagctataagtcagttgcgacatcaatactattacagtaattaaaaaacaaaaaaacgccaagttaattcagccgtttaatgtcgtaactcaaccgataataaatatctctgtcgtatcgtttaataattcggtcgtaactgcatgctattatagtaattaatcttttgcaactgagtcggccattacaagactgagttattcagtaacccaactctttacggctgatttatgacactcgaaaataactcagccgtaacaacatctcataactaagccgtccttcataacccaaccagccgaaaaaagataactcagtcatgtcgaggtaataagtcagttgttttctaataactcagccataacgttgtctggattatgctcaaaaatctataactcagacaaaattcattaactcagccgtcatgtaggctggattatcgcataactcagacaaatcagccgtaattattggctgagttatactataattccgtcgttttcttataactcaaataaatttgtcttaagtcagccgcaacataccataactcagccgtaactaccgttgtatcgccttacggctgagatcattaatccacgtcagtgatttctgacatggcgacgtgggtttgctgacgtggcagtggcattctttgtaattatgtttttttctgtgacgtttagtagggcacgatgggtatacaaaaaaaaaaagaaaatatgaaagaaatataaaaaagttttgtatggttctcgtaaatacacttaatttctatgacatctgagtaaagttcctttaataaaattaatgaaattggttgtccaaggtcctcctatctagacgtgagctttattgggcatgggcattttttgagaccattgtccattatggactacacaaaatcagcccataaaaaatctatctgttcggacacgcccaatggtctataaacggaccatttgacagctctacataccgacgatg

SEQ ID NO: 22002 - DNA, 3000 bp, Unknown
  misc_feature (1)..( 3000): 2750-1469P.txt file - cDNA_ID_2041753; gDNA_ID_2214708; Annot_ID_189855
aattggatctagggttcaatagagcgaagcaagtggaagcttacgatgtttctcgatgtggtggcttccttgaagaagagaaccaacgcgagcttgggcttgggcagttccacgaatccgattacccacagtgtgaatcgctcgtcctagggttcccatttttctgatttttccgattacccaaagagagagacagagagggacagagagagcttgttttgaagaagagaaccaacgcgatcgctttattcagttcgttgattttgttgttgacctccaaaccatatcaaattgaaccaaaccgaaactttttaatctaagcttaaccaaataaatagggctggctgaaaataaccgaaatacatacagaacggttcgcttgtcggtttttttccttaaggttccgattgctaaaattgcataatagcataatgacataaattgtagaataaaaatttcgcagaatgaaaatttgcaaactaaaaaatcgtcgaatgaaactaattttaaaatatattaattggatatattttgcaaaatgacaaataaatatttcaagaagatcatgagactgccacaaaccgaagaacacataggacgacacgaggcaaatgaatggctggaagcaaacagttatactgaaggcacaagaggtagtcaaacaaacaagaatacggttcatgacagaggttctcaatggcgaccaccaccaagaggatgggtgaagtgtaattttgacagtggctttatgctgggacgatcctttacaaatacgggatggttgataagggacgatgaaggaaaggttttaattacaggctgttgaaaactaccatcgactaattcacctttacaggcggaagctaccgggttgttacatgtccttcaagtagtttgggcttgtggaataaaaaatgtttgttttgatggagacaaccaagaacttatagcaactatcaataatggtgatgatcattctctgataggggctcttctttacgatattcgtcattggatggccaaactatccaacgtatctctactccatgtcaatcgtgaacgaaatagtgctgcagataagatggctcaatacgttctgtctactactactctgtatcagttctttattgtccctcctcgtttcttactttcttatttgtatcaaccttatacaatttaataaagttgaagttgttaaaaaaaaaatattatattaacaatatatatgtagatatatatatatatatataaacttaataaaaaataatgtttaaaacaaattagtatatttgagtaattttcgatactaaaaatgtaagataattaaaatttattaaaaagttatgaaaatgtttttttgtattactaatgatataattttgtgtaaactatgatacttttttttttacaattgctaatatttgtatgcatagaataataagattatattatgcaaataaataattatatacacactttttggcataatgaatttttacttaaaacaaaaatacaaatcttacgtttttgcgttttctaatacaattatgcagattttttttattggcaaattttctgcattatgtgtgttaccaataagagcctaaattgttttcagattatcgtataagagttaagatcaatgtaaaaaataacacaaatcgatatattaattaaataataaatttttgaaaattttatgtaaatatatggtctcattaatatcataaattaataattgtaaaagtttttttaaatatatatatgttatacggaagaaaaatagtgaaatatgaatttgctaatatttttatttttatttatattaattcttggtaaagtttatttaatatctttttactacatcgaaaacgttcttttttttattttctaaagttaataatttattattatttgaggtttaacgttaccatcgtaaagttaaaaatataatgattataaagaagaagaaaaaattcagacataatatttttttttaaattacaaaattagtctaaaatctctacaaattaataattattaatttatcgataaattaatacttttataaattaatagaatttcatagttcaaacatttatatatgtgataaaattacaaaaatgaagtagcaatatttttgcatggccaaaacaaataataaaaaaagatagcacggccatgatcgaggagattaaaatacatcgaacgtaacgttggatgcatttacaagtgccatagcatgactttcttgggacgaggatcatggatgaataaatatacttgttgaacaacatatgttatgttgcacgagcaaattaatttcacatggtgacgttatcgactaatgatgacagtagtctgttgaagtgaatcaatgaggtactgaaaagtcatagaacgtggaaaatttacatttatcttgtctgctagaaacaattgtatagagttttccaaatttgaaaatcaacatgtgaagaaatttttgttgatcttcagtcttacaaatttttggatagctgctttccggctgcccaaagcatgctttcaagaaatagataaactgtgttcaagttctctgtggtcaagaccatcgatgaacccttgaaaggtaaaagtggcatggactgaggtctgcacaccaaagaatgaaggtggactagggctgcggtcgattgaagaagcaaacaaagtaagtgtattaaagttgatatggcgtatactgtcggctaaaggatctttgtgggttgaatgggtaaagaaatatttcataagaaaaggctccttctcggcagtaaaagacactacaacttgcggttcttggatatggaatatagagggatagcacaacagttctatagagtagaggtcaaaaatggagaaacgacctcattttggtttgatgaatggagtaatataggctgtctatatgaaaaacttgggataagaggatgtattgacttgggaatctgagttactgcaactgtgggggaggtaatg

SEQ ID NO: 22003 - DNA, 3000 bp, Unknown; identical to SEQ ID NO: 22002
  misc_feature (1)..( 3000): 2750-1469P.txt file - cDNA_ID_2041753; gDNA_ID_1621124; Annot_ID_172217

SEQ ID NO: 22004 - DNA, 3003 bp, Unknown; identical to SEQ ID NO: 20867
  misc_feature (1)..( 3003): 2750-1469P.txt file - cDNA_ID_2041837; gDNA_ID_2910741; Annot_ID_193675

SEQ ID NO: 22005 - DNA, 3003 bp, Unknown; identical to SEQ ID NO: 20867
  misc_feature (1)..( 3003): 2750-1469P.txt file - cDNA_ID_2041837; gDNA_ID_1620821; Annot_ID_169460

SEQ ID NO: 22006 - DNA, 3000 bp, Unknown
  misc_feature (1)..( 3000): 2750-1469P.txt file - cDNA_ID_2042017; gDNA_ID_2910741; Annot_ID_193683
ttattcttaacaccacctttttagttgtcatgaaattgaatgcattcgacaccacaaataatttacctacgatgaccttccacgacttttgccatgtttccatcatacgtaggaataaaagtgttgctggccacagataccatgaaatctagagcagccatttgagacgaatggttctgaaactgttgcagctctgctgactccaatagcatttccttctttacctataaccacaggtgagtaaaactgataagaaaaagtgcattgtaatgacgatgcagttgagcattctttgtagcaagaaaagggaaaccaggactggtagactcacaattctcgggaatgcttcccttaacacggatagtctatgctcgctcccataaatctcaccagctgcaatgtatatctgtgtatttttctcaaatcccaacgcttttaataccaaggccacctcctctggcgtcaaaggacacagcccttgcgccctcctctcctctgagactatctccttctctctccaccagggatatgtgtacctaaagaacacagaatggacctatgaattaacaactaaaaagacctataaccagagcaccaattcaggagaaatcttttgaagagaaacctcatcttttttagctcttccgcttcttcctcagtgcaaccatgagtgcagccagagaaagctaacatgtccatctcatatctcagatgcaaagccacaaatggccctctttgttgtagaatccgaactaacttagatcccaaagcctcaagctgtggagtgaactttagtccctgaaaattcacccggcacctgagccactggagagagagcggaagaccattgtttgccaggcgggtatcagtcctattgaagtgtacaactttatgcttgctgaagagaggcaatacctgaacaagaaattaaccaatcacatatgcaaatggttaggtaatatcttgtaacaaggatagtcaaaggaaccaaaacagcaaaactagtgataaacaagacaaacctgcttcaagtaatatttttcatcagaccagctcacaggaggcatttcgaacatttgatatccatactttctactaaaccgtttaggaagcctccttaagatccgaacttcatctcttaatgaatcaatgaaatgtctcacatcaaaaatatcctcaaaaccactgcaaacaaaaatgaggatactttagattgctaaaaaatgttaagcatataagacacatgagtgattctataaacaccaaagatagagtacctaggatcagcccagaaagatgttttgtcaagctctggaacaacgagagtgagattcaataaccgagcaacagtcaccatatcacatatctgaaacacaacataaaaatcagaatttggaaaaacatcaaatctgaaagaagaagaaaaagagaattaaagcaaagtcaccaaccgcggatcgcatttgattcaatccaccattacaggatacaagtagaataccattgcttgtataattccctgcacaaaatcaacaatctcgttaaactctctcaagcaccaacgaaccctaatgtcccctaaatagagagaaaactgactcggagggggtagaggaggtggcaatggaactggctcaacaggggctgagaatctagaaatctgattggttaaaccagtgaagatccgggaatgccaaagctcaccggcggcgaaaagctgaaccaaacacgtccaaaccaaaatgctggagcaaactctaacgaaccatacttgtacacgaggcttcggaactgccggcggaagcggaagcttatcgcttcgcgcctgagtaatattactctccgatctaacttccatctccctcctccgacgatcgtcgtcgccgcttcatgagaataaaattactataacctaaatttctccgatcttgtgagatgtcagaaattgaaattagatgacaaacgcgaaatgaaatgcttcttctctcctttgtgtcaaatggtttgaatctcgaggagtttttttttctttcgaaattcagaagaagaaaaaaaaatcacgagacggaaaaaaaaaaaaaagaggtggtaacggtgagagatgggaaaataagttaattaaccgtcaaagtgtcttcttcttcttctatttattgttttcccaagaaactcattctattgcttacacaatttatttcctaattcagaaagcttcaattttcctaacttgtttcattatatatatcattaaatgtcaaagattattctataaccaaaaaaaaaaaaaaataggtttcaaggataatgattgatcagaaaaacatatgataaataaagatttcaagaatattcaacattgaaaaacatataaagaaagatgacacattttgcctttttgatagtcgttgtcattcgtcaacggattcacctaattgttctcccgtactttttttattactgtcatctatttattgcactaatcacgattcaaaccactgtttatattcatctcctttattcagatattttcaagctgttgtaaaacaaaacaaaaactgaaacgaaatcatgacacgtacctcaatgttgcattattaacatcccttccaaggaaagattactattttattctttactaaaaactcgagtacaattgtcttttcaacaaaatttcccaattaagtttaaaattaacattaccaagtcatatgtagttatgcttgaattataaaatctggatgtgttatttgtttctttatttacttctaacttactttagtgtgatccactacaagtatataggtccaacattattaatgggccttaattttaaagcccaattccagagggtagtactccacgtgttttaacgaatgaaatactaacacgtggcaatgcacgtgttgactttcttttgtttccttccttccgtttaacaagaaaaatagctaaactttgaaatccgtcagatcgatttctctctatatcggagccgtcatg

SEQ ID NO: 22007 - DNA, 3000 bp, Unknown; identical to SEQ ID NO: 5834
  misc_feature (1)..( 3000): 2750-1469P.txt file - cDNA_ID_2042017; gDNA_ID_1620821; Annot_ID_169467

SEQ ID NO: 22008 - DNA, 3003 bp, Unknown
  misc_feature (1)..( 3003): 2750-1469P.txt file - cDNA_ID_2042065; gDNA_ID_1620823; Annot_ID_169597
gtttttgaatgagtaaaccccacaacgacgataaacacaataatacaaacagtgaccatggaagtaatcaaattcaaccaagaagtcctctttgttccagtcatggcaataccattagcaactaaaagcactgcaacagcaaccggatccaaaagatcaaaccctttagcaaaggaatcgactttaatccgaaaataatcagaatcattcttgaccaaactagctagatacgaagaccatgacctccctaatccagcagcaccaaccatagcctcaagaagaatattcccagcagcaataaaggcaataaaatcccccaattcaaccctaagataagagaaagaacctccagcgacaggaatctcaactccaaactcagcataacagagaactgagagcaatgcagagacaccagagatagcgtaggagagaacaacagcaggaccagctccaactcgagcctcctgacccgtgatcacgaacacacccgaaccaacaacagaaccaaagctaagccagagcaagtcccaccaagtgagacaacgacgcatagggttctcgctttcgcggcgggctgcatcgagctcgtacgcatcggaagagcgagagagaagacgatcggcgaggcgtggacaagtggcggagagagctgatttgtaggtagagaagctctgaaaagagaattccgggaaaaaatcctgcttcctccatctccagtagcttctccgttgacttaggtcatcggatctcgactccagctggtgagcttcctccattgaagcagggatcatctcaaatccacaaaaaatccgaaagagcgaataattggcaatttaaaaacttgagtgtctaaaatatgataataaaatagttatggatcgaaatgtaaatagtcgtctaattgtagttaaaattcgtgcagcgttcactgaaactgaaaggtggtgacagtacaaccctaaaaacgagggacccacctaaagtttttattgaaagtcgtctaataagagttataaaccaacggtcaggattggagatgtgagactcgatatcaccttttgagatgaatcgtacaaaatgcaggacccactttgtctgacatgttttgatcaaatagctaaacgccacgtgacgaatgtctattacgagatcatgccacgttcgtcgatgagcttgactgatttattcatcaacttgcttaccatttttttataaaaacaaattgttttaaaatcatatttctttttttttttgtcacattttaaaatcatatttctagtatttgttatttgtttgaaagaaaatgtattagatacagaacttgtgttttgccattcgtttttgatttgacaataacagattttgttatttagtaccttttctgatttttataattgctttcgatttttttttactgatattctacgtgacgttttataaataaagaaaaagtaaaattaattattagaagattcattattacatagtttcagatttcgtcaacagtcattttcatactttataaaacttacatgttcctgtccaaaggtatcaaggtaaaaatcccataataaaaatattactgttaatgtgacatattattttaggacaatgaaagactatttttatggagtatagaattcctttctggtattttgaataggaaaaaatcaactacatttaataattttatcaatttgcttacataattacgtgtgataaaataatagtattccggaatttattaaatgtctacctatattttggttattacccaaaatgagcttataaaattattattaataatctactttctatatttttggttaattattagtttatttaaaaacagcatcctgaaggacggagagagacagagtatgcgaggagtgtgaaaacgaagagcataaacaacacgggacgaggagagagaaactagtgtgttttagaaagaagaaagagagagatagacaaagagactgtttgtgtcttcttacccattcgaggaatcaaagcatctatttccgagctctcaagacgacgagaagctaaaagataaggctgaagaaatttagggttttttcttccttttgtattcagctcgttaattaaggtatgttcccaaattcttattcttaaagttcggctctttcctttttcttccgacttgtgtcttagttttttttttcaatcgtggtcaaaatttgttcttgagctactctgttataagggtttgtgggtactggaatctttgattcgagagcaatggagactttcaagcacctcagattttatggttagagaagtttttttttttgagctgctctgtagaataatgtgcttaggtctgtacggatttggggtaactagttggatcgcgagtgtttctcaccaggtccttggaaaaggatttgttttatacctgaaatttgggatttttcagactcatcttcaagtactttgctttgaatcggggatttagcagacttgggttcttcagtgagatgctttattcagttttgggggtttgttagatttgagagcttaagagataatttcttgttgcttttgttgaaaaactatgaatggagactagatttaattgggcttcccttggaaaccatcttgagctttattgaatctgtgtataatatgatggaataatgagagtataaactgaactcattctattggtatttgtaaatgcagggctatccatcttccgagttcttcagtagcttcacaagctggacctgaaaatagatcttggcgcatatcaggagtgtgattatggttatctgaattcatgtaatttgaagggattttcacgagctgtgatcgggtcatgaatgcgtgtctgaggacatgcttgaaccaaggggagcggacataccaatattgttcctggttttggttgtacttcctgtggtagcttacattttattaggaaaatggagtaacatttctgaaaaaagagtaagggctaacttgctggctcagatg

SEQ ID NO: 22009 - DNA, 3000 bp, Unknown; identical to SEQ ID NO: 5897
  misc_feature (1)..( 3000): 2750-1469P.txt file - cDNA_ID_2042114; gDNA_ID_1620823; Annot_ID_57828

SEQ ID NO: 22010 - DNA, 3000 bp, Unknown; identical to SEQ ID NO: 5892
  misc_feature (1)..( 3000): 2750-1469P.txt file - cDNA_ID_2042114; gDNA_ID_1620823; Annot_ID_169577

SEQ ID NO: 22011 - DNA, 3003 bp, Unknown
  misc_feature (1)..( 3003): 2750-1469P.txt file - cDNA_ID_2042203; gDNA_ID_1620831; Annot_ID_169674
gaggctgttctcttccgaaaagacgataaatcttggttttgagagacgcagagttcttatcgtcatccgaatcggaagaagaagaagaagagtcatcgtgaccatggatcttctcagagatcttctccatgatcgattcctcgtgcttgtgctcttccgccattgttaactttgaaacctccgcaaaaaccctaaacttgtttctggtttcagtaagcgatgagcgagaaacggagaagaaaacgaaaagtctctttcagtcatacctctctctaaataagagcgtttgatacagattcaatctcacccgtcgatttatttaactcaatcttggccgttgggaattaatagcttactttctaagaaaatcattaaataacagtaacatctttgagacggaagacagacgacgaattcttaattaacgtctccgttagtgtagcgttcaatggggtcagcacgtcgtcgtcgtcgagaaggtagatgcttgactacgacgtcgtatgaaatttaagggaaatttgtttatagggatcatagaatagacgatgctatgatgagattttatttgggccaataagaaacttgagggaaagcccaataggttaagtgaagttataaaaataacagcttttttttttttttttttttgacaaatatagatttaagtctaaaatataaaaataatatagatttagtattaattttgtcactagaacacaatatgttatttattttgtgatgctatatatttatgctttctgcctggcatactcatcatatttattgttagtcatgtaagacaaaatcatattctggttattggtctaatcacattggctggttgtttccttgatttttctataacccactgtgcatttaaatgtgtgttttcggaccataatccatatcatttgaaacgatattatatacacattcgaatttaactaaaaaagtatgtagctaccacctagccaaatcaaatctctagggcttactattgcgccatcatgccaaacaattagcccgacaagatcagattttcttagggtagtaatattcttctcgtgatcaataggataaagagaacatattgtataactatctgaaatgatttgggatcgacgtttagttaaaatatataattaacttaatcattgagtttgacggaaatagctaagctgcaaatgcaatgaagcgtttttcttttaccagtaaattataagatttgttaaattcgttggagtcaaaatatggatcactctcatccaaattcattttaaaacttatacattatgctattagtgtatcaatctcaaccaaaaacgtaatagcttctttatattttggaggaagtccactaaagctgaatttcggggaagcctatcaaacaacgagtgactagcttctttgacttgcttttgaaagtgctttgcccttttgaattttagataaagcgaattaatgaggagaaagaaagaaatttttgttttattttgacgagagtgtgtcccattcatttgtttaccaactcaagctctataaacttattttcagaaacactaatataagaattatacatgattgcagtatgaatccatgaattggattaagaaattaaatggaatagaaaaaaaggattaataaataaataaatggatcatacgaaatcacgtacacatgtacagtgtaaagggcccatcatctttactgattttgggaacttgatgaggcccattaaagaagggtgataatgggactttggggtctacatccattgaatctgacggcctgaaattttttggcaaataatgatgatgttaataatacgtctcggaactacaaactttacacatatattgtgcatattttttacaagtagtagtaatattaaacattatccagattctttcagaatcagtttagtttttttaaatgctttgtaggcgacaccatcaattttgtcgattcccatatgattaatatattactacttagtagtataatattatgtaacataatctcgtaaacataaaacaaaattgcactaatttgtgtttcaaatgcaagattttctttggttcaaagtagtgccaaaaagtatcactattatttatgtgtactatgtagaaaataaaagagtacgtatataaatactttaatgatctctgaccttttggtctgactgtctcagtctgaaagtcacgtgactcagctgctccctacgcttagcaacgcaacgcaacgcaactctttgccacgttttttcttatttgcctctgcttcttttgttaaaacatggcaaaacaaaatgaatttacaaatttataacaaaataaaatttgttttattgtgaataatttcaatttttaaatacatacaaaaacagtatccaaagcttttttttttctttttgtggttgtggtttattttctttcagccatagctttgtttgtaaaacgtaaacacaaaatttaaaattttgcctaaaattttagttttttttgtctgtcaactatatacgaaaccttttattgtatcaaatcaatattaaattctactgtattagttttattatggtttgttatatttttcttccttgtaaaaaccaatgtttcacaccaaacagtaaacataaaaatattgtcttgcaatgtaactaaaattactaattatagacttatgaactgtaacctatggttattaaagacagataaattagcatagtctttaagtacgttttcttttgtcataactatttcataccatttttatgaaaatggaactaaaagcaataaagaacattatatatatcaagaaaaaataaagtaataatttttatatatatagctttcactcttctcttacaagcactgttattaacccttctttttcatctaaaaggagaggagactttgaagaagaaagaaaacattcaaagctaaaaaacgcagcgttttaggaaaaaagaggtagagagtgattctggctttcccaacaatg

SEQ ID NO: 22012 - DNA, 3000 bp, Unknown; identical to SEQ ID NO: 5920
  misc_feature (1)..( 3000): 2750-1469P.txt file - cDNA_ID_2042217; gDNA_ID_1620831; Annot_ID_169678

SEQ ID NO: 22013 - DNA, 3003 bp, Unknown
  misc_feature (1)..( 3003): 2750-1469P.txt file - cDNA_ID_2042225; gDNA_ID_1620831; Annot_ID_169681
atgagagttacctaagcaactagtagatccttgtccacatatctccttggtgtcgttatctctctgtgtcctcaccgtttcatctaaaaggatcaatttcgtccttctcggagtgccattaccactactacttctagaaagttttcctcttttcctaggagactccgcactttctggactagcaatcggtgaataaccattttgaggctcagatgaattgtcaacccgaagtttagtaagcctatcatgtacaaagtcatgtgaatgcattaacttgcgccataacgatgaatcagacgctccactgctacttcctgctcctaaatcaagaacaagactaaatcaaaacccatccaaccaaacttgaaaaagtttgcaaatttaccaagaacaaaaacacaaatttggatctacaactataaactgtactcagtgtaaagaagaataatttcaaaatccccaaatgaaatttgaagtcaaagtgaagagaaattagctaacctttcttgttgattgaagcactactacaacgctcaattgaagaattaacaccaatcgagacacgagccttgtcacagttgttatctgctttattcgacgaaaccctaactccaccaccacacccttcagatcccataagcttagccggcaacgaaacatccacaggacaagaaatcttcaaaccatccatcacaaacccaaatcgaaaacatcgcagccgtgtaagctgcgatacgaactcatcatctccttttaaaccaaaacccagatagttcgatcgagctttagagaaagctaaatcttagaaatttctggagaatagtgagctacaagagtgagattgatttggtttttttttcctcgatgaagaaacgcaatggtgcggctgcgtgaatcgagggattttaatctagggcaagaaaatgaaagaggagaaaaaaaagatgagtatttatagttttcgggaaattaactttggccttgttttagataagccgtcgacggtgagattgttccggtgagctcgtctgtactggtaactctgacgtggctactacattattgcgaaacggagtgatttagaaccgttggatgttgactgatgacggggtttttatgatcttgttggttaatagagtgacacgtattcaagtgaagatttcacttggttcatgtggtttgatatgagtttccaaatatgccactggtggattctcaggtgtttgcttggagcggagggtgtttttgattttgacgaaattatcccttatctgaatgttaacgccgttagattgtgttggttccgttaacagatttttgatttaactatttcggttcaaggtcttcttgaacaagtcaatgaagttacattgacaaaaaagaataaaacatgaactttacaatattgaagggattgcttttgtatttaaagttagtttttacaggtagtgattgtttggatatgtgctctatttcttttgtttatttgtgttcgtttttgttgagattatggttgtgtaagcgtggtttagtatttgtttaaaactattgaggcaatctaatgttgggtcctcttggaagatcatctttgtaatctttctcaatacatcaaactgttttgtcaaagagttttcggctatgttgcttttgaatgtggtatttatatattccgtgtgctttaaggttcttctttctttatatccgctttttaatttttggttttagagtttttatgtatccgccagttttatttttagaaaaaaatttttttttattaaatataactatacatatcatagataaatcatttagacgagaaaaattaaaaagacgttaattttatgtacccgtcaattttatttttggaaaaaacaaattttcttattaaatataactatacctatcatggatgaatcatttagacgagaaaaattaaaaagacgtttaattttaaaagcataattagtttcagatcattttaaattatggaaatttaatagtaaagtttcttaaaaataatatgtattactcaaaataataaattttctaaaaactttctttatctaaaaaacatgtcttaccaacagttgatcctaaaccaaaacaattatgaatctaaacacttagaagtttttttgttaacaaaatggaataaaataacaataatccagttttgtcttaaacgtataaagccttattgttttatattggattagcaattgggcctgaaagaagaaaaacaatcatatgggccaataggacttggatctatattgcttcaacttattacaatattcatgcatgtgtggaatttggctatgtcatgtggatggataagcgttggcagagtcttcgttacgttttcataaattatctaaacaacttaattacacaatattctcaggtattggcaagaagaaaaaaagaagaagaagagaaaaatcataatataaatatacttctggacacgttgaagagacatatttgatgactagtctaagcaagattccacaaaaatgaagcatcgattttgatcaaattattcggacttcaaaatatgaaaatagtatagaaatattttctttatgtaatattcaagccgcattttgacaaaaataattaataaaaaaaatgtaagagtatccccatctttagtttttaaaataatagaaaaaataaatttggtcaaaagacaaagccgtcccttccggttcacacgagccgcacgtgtgctttccttttttctccttccccgttctctagccgattctctctgtctagggctcctccgtcttcttcttctcataccttcacataccacaaaacctctcttctctctctattgattctctacgaagaggaaagtgattttgaaccatcttgatcggaaacggcgtttcgaaactggaggtcgaagacgaaaaaaactcttatctcatcgctccggtgtaccgaattcgagaggtttttgttaggtttcgtagtgattgattgattttgatg

SEQ ID NO: 22014 - DNA, 3003 bp, Unknown
  misc_feature (1)..( 3003): 2750-1469P.txt file - cDNA_ID_2042285; gDNA_ID_1621170; Annot_ID_173951
aaaggtcgatgatcatccgcgccaatgtcatcggatccgtttgatcacacgattaaagatttcaccaccgttcttattttccgtctctgtttttgcgtttcacgatctttaccaaatcatggaccgacagtcggaggtggtgacgcaaaccatggatgatgcagcatatgcgtcgttatgacgagattcaggtttgttgcttctagcctaagtcctattttgatctcttggaaccttagatttataattttagcgcaacttgctgctgcataaagaaagtctctttaggttgtaggtcaatcaataattagttttctaaacgcaatttcataagaggaactagggtttgctcttgtagtcagttttacgaaattgacctaatttgcggttttcttgtctgttatcactttgtttcatttaggacaaattgacctttagttttcttcttgttattgtaggttcgtattcttgattcgccaaatcagtgggtgcatccgcaaaactgtttgtttggattcgtgatagacaacatattttgctatagcttggtaacgactttctatactctgtttcttattctttcttacaaaaaataataattgatttagttgtaaaatgtttttttttatttgatgattggattttttcaaaagctcttttttaatatatttattattattttaaaggttttataaatactaaattaatataacgttgtgaaatctaaccggattttggatcccgccatttaaccgtggtcattagcgattccacaaatccaacatgtttttcacatcttcatatgtatttagcatttgtatttttttttctttaaaggttttcaactctttttttatttttttaaagattttataaatactaaattaatatgactttgtgagatctaaccggattttggatcccgccatttaaccgtggtcattagcgattccacaaatccaacatgtttttcacatcttcatatgtatttagcatttgtatattttttttctttaaaggttttcaactcttttttttatttttttaaaggttttataaatactaaattaatatgacgttgtgaaatctaaccggattttggatctcgccatttaaccgtggtcattagcgattccacaaatccaacatgtttttcacatcttcatgtgtatttagcatttatgtttttattttattttctttaaaggttttcaactccttttttattttatttttattttttaaaggatttataaatactaaattaatatgacgttgtaaaatctaaccggattttggatcctgccatttaaccgtggtcattagcgattccacaaatccaacatgttttcacatcttcatgtgtatttagcatttatgtttttattttttttctttaaaggttttcaactcctcttttatttttttatttttgtaaaggttttataaatattaaattaatatgacgttgtgaaatctaaccggattttggatcccgccatttaaccgtggtcattagcgattgcacaaatccaacatatttttcacatgtatttagcatttgtgtttttttttctttaaaggttttcaactccttatttatttttttaaaggttttataaatactaaattaatatgacgttgtgaaatctaaccggattttggatcccgccatttaactgtggtcattagcaattccacaaatccaacatctttttcacatcttcatgtatatttaacatttatttttttaatttttttttcttaaaagattttcaactcttttttcgttttttaaaagttttataaatattaaattaatatgacgttatgaattctaaccgaattttggatcctgccatttaaccgtggtcattaaggattttataaatccaacatgtttttcacaaatcttcatgtgtatttagtattttttttttaaaaagtttttaactgtttctttttttcttttcttattttgattttttaaaaagtttttctatttcagggtggataaaattagcagaaacaaacaaatggaatagaatcaaatcaaaaatcaaacaaaaaccgaaaaccgaaaaaagaagagtaaattataaacataattaattaccattccccaaaaaccattcccaaaaaaactagctaccatattttcatgaaagttaaatacagaccaatcccaataataaaaaatctctcgaaagtgaagttttgcgcaaagaagtcggctcagatattatttgaagttttgaactatggtagatacttatttataaatcaattacatataaaattaccaaaagctaataaatcgtaagccacataattcacgtaagattcctgtccgtctctgaaagtgtggtcgttactcgttaccgacgaaccgttgattctatggaaacaagaaagtccagaaaaaaacaaaattgcatacacgtgaatcaacaatttatgggtcgacctgaaatatatttagaaaaataatttactaattctttttttgatagagaatttataacaaactttagtgacaagtcataatcaaaatcagatgactcatcattttccaattttcctaggacagtggatttttcatatggaccccttaaaaaataaatatattaataaatatctaaaagcttttgtaaccgttgattaattacttaaaaactcattagaagcttgattattagtggaagacagacaacctttgtacttaaataccttttatgagttttgtctgcctctaatttactctttgctacacgcttctagatccctcttccttcgtcaaaatctcatttttcttttttcttgttgatattgagaaatgacttaatcctatttcgtctccttcctcaattcaacgatgcttagggtttgccccaaaattatataaactcgtcgatacatacaaagcttgtgactagaattcgtttcttcaagagtaaagcttcctcctttcttctcctctgttttcatctctctgaaacaatg

SEQ ID NO: 22015 - DNA, 3003 bp, Unknown; identical to SEQ ID NO: 17531
  misc_feature (1)..( 3003): 2750-1469P.txt file - cDNA_ID_2042293; gDNA_ID_1621170; Annot_ID_173949

SEQ ID NO: 22016 - DNA, 3003 bp, Unknown
  misc_feature (1)..( 3003): 2750-1469P.txt file - cDNA_ID_2042315; gDNA_ID_1621170; Annot_ID_173943
gaaatcgttaatgaccatggttaaatggcgggatccaaaatccggttagatttcacaacgtcatattaatttagtatttataaaatcttttaaaaaaaagaaaaaggaaaaaaaaagagagttgaaaacatttttaaaaaaataaaataaaaataattaaatgctaaatatacatgaagatgtgaaaaacatgttggatttgtggaatcgctaatgaccacggttaaatggcgggatccaaaatctggttagatttcacaacgttatattaatttagtatttattaaaacttttaaaaaaatcaaaaaaaatttgaaaaacttttaagaaaagaaaacaaaaaataaatgctaaatatacatgaagatgtgaaaaatatgttggatttatggaatcgctaatgaccacggttaaatggcgggatcaaaaatccggttagatttcacaacgtcatattaatttagtatttataaaaaacctttaaaaaattatttatttaaatgttttagtgaaagttttagttttggttaaaataatttttaaagaaaagaagaaaaaaagttagaatgaagaaagtcctagtgtaacgaaggcctcatacagcaaagcccattccaaagtcctagtgtagctctgtcgtaacattatccaccaattttaggtcaattttgtaaaactaaactacaagatcattccatgggaagcttctctccgatatgcaagacaagacgccaaagaatggcaagatgcagaagagtacacccaccgtttatcatcaaaacctgacagagtaacgtcacaagaaccaacagctaatctctggacaacaccccctattggttggacgaaatgcaactatgacggcacttaccacagcaacgctccgagtaaagcgggttggctcttacgggatgatcgaggaacctttctaggtgcagctcatgctataggctctattactaccaatccgatggaaagtgaactccaagctttagtcatggccatgcaacattgttggagtaggggctataggaaaatttactttgaaggtgacaataaagaagtctcagagattgtcaatggtcggtcttcaaattttgcagtttttaattggataagagatataagcgcttggagatcaaaatttgaagaatgcaagtttacttggacaaggcgattttcaaacatggctgcagatgctctggcaaaacaacaacttcctttgaacactcagttttattgctataactatatcccgtttgtaataactgattttttacatcgcgactttgctacagcaaattattaataaagctgatgtttgaggaaaaaaaaaaaaactacaagatcaaaccctagttcctccgatgaaattgcggttagaaaactaaatattgattgacctaattcaaagagaccttttttgtgcagaaactaaatattaaaaatccaaggttccaagagatcaaataggaatttaagcgagaagcaacatacctgagtctcgtgacaacggcgcgtggtttgcgtcaatacttgggactctcggtgagatccgccatgatttgctagagagatcgtgaaacgcaagaaaacagagagacaaacggtggcgagatcattgatggtgtgatcaccgagttacagttccgacggttctgacggtggtgaaaatggatggtgatcatcgagctttgacgttctcgtgatcggtgagttctttttgtaagagaggaacagaaacaaacagaggctaaaaagacaaaagaagaagaagaaggtggattttttgttttcttctcgtaatccatgctttggaccttgtatcagccacttatgatcatttgctatattgatgctttccaattttagagtattgaaatgggtttctttgacaatcattttgagttagtcatcattccttgttctgaatcaagaattggcttttgttatgttgtctaggttctgcttgtaactagagtaatgctattgtagtctctgttgtttatttgtagaatcatagagagtcgtggaagcatgttttagttgttactctcgatttcttgtcgatgttgtggtgttataaattgagcgttttaaccaatacaagttaggagatggttagtatgtgactatgtgttagtggccatgtatgtagttcgatcagataatctgaatgatgtgctaaagagcttgcataggaagactgcctttgtgttagcttgcatagagacttgttgcaatatatgagactgaaaactattatgtgaaaactttaatttgtgtacaaatatttttaactcttaaaattaaactaacattgtaccaattagcacatgaaagaaacacagaattctgtgaacatatgatgaataactatataaacacattatggattcagttaaggagacagaaacaagaagatgaatttcagatatatagcaatagagtcacttataatcatatcagagcttatactttatacaaattatcactttagtccttaaattaaaaccgatttaatcgacaatcttgttattctttaaaacaatttgttcttattttcaatctttaaattttgcaacaatcgacagaacttatcgttattccgtgtttttattttcatatctttcttaaaatgtttcaaaataatatatgtttaatattttctgatttacaatagttattaagttatatgaaatataattattttaaattttattttatttttcagaaaactcttataagagagcttaccattagaatatgaaaaaaaattaaaactctcttataactttttaaaaattttaataataaaaaaatggagaaagcccgtgaaagagctcttacgaaccaaaaccattcagtccggttaagaattggttatcaagtttggttcctaaaagatatccaagttcaaaagcaaaaaaatatcttcttttctctctctctactctcttctcttcttctcttcttctcttcttctctggctgggcaaccatg

SEQ ID NO: 22017 - DNA, 3003 bp, Unknown
  misc_feature (1)..( 3003): 2750-1469P.txt file - cDNA_ID_2042340; gDNA_ID_1621170; Annot_ID_57237
aagatatgtcgtaaactggaataatggtaacgacgattgatcgtttagctcatttaatattttcgcgtaatcgtccaattcatcaaagaaagacacactcttttactgaacttgtaatttttggctgattaaacaaacactatatggctagactttcccggtttaatggttaatgacaaaaattagtcacagagtcgaataatgggttcttgctgtttttcacttaggagaggtcgtgaggaaaatgagaaaaaaacgatgagtaaaaaagaagtgattgggaccaatttgacccgcgagttttggcgtaaccaaacatttcgcaccaacaagatcttctctttattatagctttttgcacttttacaaaagtaaatttgagcaataaaagtgtaacaaaaaaagtttcaattattactagttacccgccaatccaacctcccccataatgcacacacatggtacacatcatatatgtaatatataggacaatattttcttacgcgtatatatatatatatatatatatatatattcagaaattaactaattactgggaaacataataattaaaaaaatatttaaataatagaagatgataatgaagagtgcattttgacaatagtgtatttaaatctaattatatatgttaagcgaaacctatacaaacttcggagtgatctaaatttttagctaatagatcattcgattttacaaaaaaaaaaaaaaaaaatattattttctatttactatagctttacaacattcttttaattacgacagtgatgtttctccaattgataataatgttccataataatcaaacggaaacgagtatgttaatgtcaccgtagttaaactaagacaaaaggttctgacttctgaaccgtttgatcgtatcatcaattgtagcatgacgttggatcatcattatgtacccaacaaaaacatatataacgttgtactcaatatgatcattcacttcaagtcttcgaaagtaagttagaaattgtcaactatttaacaattttttttaacaaaatccaaccactcttcagaagcttaaaaaggtaaaaacctaccagattattctttcacaaattacagtcgttagattacttttcaaataatattgtgtagaaattctttatagtcacattttgaatgatagtaaccgtctactctaaactattatgtttaatctcaataatccatattttatagttggagtgggttgagacttgggagacggtcaaaacgttacaataatattcttagtttaaagctcgatttggtagaaagtttgactttacatatttgtgtattttttggataggataggtccgataggatttgggatatgatatcatgggttcgtccaagttatagtaatgttgggattgggggtaaattggtaaaactataattaggcaaagcgtgaagaaaaaaaaaattgacattatgatgagaggagttcgggttgttgcatgggaacattatttgtgctcccataaaggtaaataaaaaccaaattataatcatgggatatttaactaagaaaacttgatatcacgaggaaaatcattataagttcagatttaaagccttttcaaatatagcgtacataactatattctatatgtagtcgatgtctcgatgaaatgcttgtttattaaggagacgaatccactagcaatttttatatccaactaatttatttattttagtttctttctcaaaatataaatttcgattgtagtttaattgataagaccaaattcattgagcatgcagtaccctagcaaccaactaatcgtgagaacagtttgaaaattctaattgggatagtcaagtcaacgacctcaacgcgtattctttaagttcttccgttttctttttttctttctaagccgtgattaccgcctcggaaaatcatggagttttcacggaaaataatttttagactatagttatatactctaataaatacaattgcaatacccgctaattcagcaggaaactatgacaactggtttccgtgtacggaatgactctcttgcccgcatcattcttgatgatgtgtcatacactacaaggcaagaaaaaatcaataaataaatcaaagttaatagtagtatagtatatagtataatctgttttgctcagtcatattcactcaccgtaaatgccaaagtgaaagcatcagtttgaagccagttagcttctgtttttttattatgtcatattcaaaatcattcaattattcatatgtcaataattactcggttacagggtgaaattttataatctgattcgtatgaaccaacgactcaaaagtttagctagctagtagctactcaaaaaaaaaaaaaaactacttgttaaaactacaagtttagatttagacatatgttcactagattttgacagctacgcattccttaaaatgtctgatgtttaattagcatgatttactaaaatagacttgtatttattatgttaaaacaaaatacgcagtttttgttcgctgaaaatgttccaaaacaataatattctttaagcgaaaaatagaaattcatataattatattacagttaagggaaacaaaaagaggaagaattcgttggcaacaattgacaaatacctaaagcgtgcgaggtcagtaaatcacacgcttgagcagttagtggcggttagaacggtaaataaaggagacggaattaacaagtaatcacgttaaaaaaagctaaacgaagaatcaaattgtgtaggagacgacgtcgtatagatacataacggccgtctgtcttaacggctctttttggtgtcgtcttcttttatttttattttggtctcccaccagattctataagaggaccaatatatctccaaactcgtacattcactgtctttaactctcactactctctctctctctctcctctgttctaattctctaggaacagagtaaaagactttggctcagcttctgcctctccaatg

SEQ ID NO: 22018 - DNA, 3003 bp, Unknown; identical to SEQ ID NO: 22017
  misc_feature (1)..( 3003): 2750-1469P.txt file - cDNA_ID_2042340; gDNA_ID_1621170; Annot_ID_173936

SEQ ID NO: 22019 - DNA, 3003 bp, Unknown; identical to SEQ ID NO: 17294
  misc_feature (1)..( 3003): 2750-1469P.txt file - cDNA_ID_2042410; gDNA_ID_1621201; Annot_ID_174924

SEQ ID NO: 22020 - DNA, 3000 bp, Unknown; identical to SEQ ID NO: 8235
  misc_feature (1)..( 3000): 2750-1469P.txt file - cDNA_ID_2042417; gDNA_ID_1621201; Annot_ID_174922

SEQ ID NO: 22021 - DNA, 3000 bp, Unknown; identical to SEQ ID NO: 6466
  misc_feature (1)..( 3000): 2750-1469P.txt file - cDNA_ID_2043719; gDNA_ID_1621094; Annot_ID_170883

SEQ ID NO: 22022 - DNA, 3000 bp, Unknown; identical to SEQ ID NO: 6457
  misc_feature (1)..( 3000): 2750-1469P.txt file - cDNA_ID_2043733; gDNA_ID_1621094; Annot_ID_55610

SEQ ID NO: 22023 - DNA, 3000 bp, Unknown; identical to SEQ ID NO: 6457
  misc_feature (1)..( 3000): 2750-1469P.txt file - cDNA_ID_2043733; gDNA_ID_1621094; Annot_ID_170876

SEQ ID NO: 22024 - DNA, 3000 bp, Unknown; identical to SEQ ID NO: 6457
  misc_feature (1)..( 3000): 2750-1469P.txt file - cDNA_ID_2043733; gDNA_ID_2926162; Annot_ID_139757

SEQ ID NO: 22025 - DNA, 3000 bp, Unknown; identical to SEQ ID NO: 6457
  misc_feature (1)..( 3000): 2750-1469P.txt file - cDNA_ID_2043733; gDNA_ID_2926162; Annot_ID_198830

SEQ ID NO: 22026 - DNA, 3003 bp, Unknown; identical to SEQ ID NO: 18255
  misc_feature (1)..( 3003): 2750-1469P.txt file - cDNA_ID_2044033; gDNA_ID_1621119; Annot_ID_172014

SEQ ID NO: 22027 - DNA, 3000 bp, Unknown; identical to SEQ ID NO: 6970
  misc_feature (1)..( 3000): 2750-1469P.txt file - cDNA_ID_2044045; gDNA_ID_1621119; Annot_ID_56268

SEQ ID NO: 22028 - DNA, 3000 bp, Unknown; identical to SEQ ID NO: 6970
  misc_feature (1)..( 3000): 2750-1469P.txt file - cDNA_ID_2044045; gDNA_ID_1621119; Annot_ID_172008

SEQ ID NO: 22029 - DNA, 3000 bp, Unknown; identical to SEQ ID NO: 6974
  misc_feature (1)..( 3000): 2750-1469P.txt file - cDNA_ID_2044057; gDNA_ID_1621119; Annot_ID_172003

SEQ ID NO: 22030 - DNA, 3003 bp, Unknown; identical to SEQ ID NO: 18261
  misc_feature (1)..( 3003): 2750-1469P.txt file - cDNA_ID_2044091; gDNA_ID_1621119; Annot_ID_171991

SEQ ID NO: 22031 - DNA, 3000 bp, Unknown; identical to SEQ ID NO: 6982
  misc_feature (1)..( 3000): 2750-1469P.txt file - cDNA_ID_2044102; gDNA_ID_1621119; Annot_ID_171983

SEQ ID NO: 22032 - DNA, 3003 bp, Unknown; identical to SEQ ID NO: 18337
  misc_feature (1)..( 3003): 2750-1469P.txt file - cDNA_ID_2044232; gDNA_ID_1621130; Annot_ID_172454

SEQ ID NO: 22033 - DNA, 3000 bp, Unknown; identical to SEQ ID NO: 7281
  misc_feature (1)..( 3000): 2750-1469P.txt file - cDNA_ID_2044319; gDNA_ID_1621137; Annot_ID_172700

SEQ ID NO: 22034 - DNA, 3003 bp, Unknown
  misc_feature (1)..( 3003): 2750-1469P.txt file - cDNA_ID_2044338; gDNA_ID_1621147; Annot_ID_173110
gagatgtgtggctccgattttacccggagaggttcttatcaatcgctaagattaggaaacgtgaaacatttgatcctctgtgtatgattttgtatacttgcgttgatggaagctcagagattgcttcagagctttgtagctgtcaagggctcaccatcatcgctgaaactctacggacttcctcttccggtaacactcttattcctgaagccaaaaatgccattttgatcttaaagtcgtgatttttatctgatttgagccaatcttgttataattgtttgtagttgggtctgtggaggattattggctcaagttactggtttcgagaatctgtgttgaagatggttacttcctcaagctcttctctaaattatacgaagatgctgaaaatgagatattttcatcagagcaagcctttcttgtgaggatggtgtctgatattgctaatgagcggataggaaaagtgtcaatccccaaggatacagcttgttcgattctcggattgtttaggcaatcagttgatgtttttgattttgtttcgggtgaaagatcggagcttccaacgggttcaactatagtagatgtgatgggctactctctggtgataataagggatgcttgtgctggaggacgtcttgaagaactcaaggaggacaacaaggattcaggtgatactgttgaattgctcttgtcctctggactaatagaacttctccttgatctgcttagtaaacttgatcctccaacaacaataaagaaggctttaaaccagagtcctagttcttcttcttcttcattaaagccgtgtccttacagaggattcaggagagatattgtgtcggtgattgggaactgcgcgtacagaagaaaagaggtacaagatgagatcagggagagagatgggctctttttaatgctgcagcagtgtgtgaccgatgatgagaacccgttcttgagagaatggggcttgtggtgtataagaaatttactggaagggaaccctgaaaaccaggaagtagtggctgagttggagattaaaggctctgtggatgtgcctcaactccgtgaaattggtctcagggttgaaattgatcctaaaacagccaggccaaagcttgtcaatgacacctgaagcttcatttgtctcagggaaaagaggagctatacaatacacaacaagaggtccttcttgaggcggtgaagatcataaagaagcacggtgtgtcgctaggtaccacctgggacaattctacattgtgagtgatcattttgtagagacaaggaatactgatccggaagctatctagctagatggatccaaaactctgtgtttttgggaaattacagaaaatcgtgatgacttcttaggtttcaagagaaaaatgtttcatattggccttgcttttatttgtttccttcttggtatttatagggttctaacaattcctatatacatgaaatgatcaattcaatatgttaagcagaaaatggctctcgtttgatgtggtttgcagtgcatgatcaattagttcagctcaacttttgtgaagcctttcatgtctgttggtttgtatttaagttccttgttgtaaaccttctaagcagttgttgtgtttcactttctctataatagaaaggcaagttcttctctatattgttctgttgacgatcaaaccaattgtgatacaaagtctgattctctttctctggtgttctgtttctagaaggagattcagtttctaacaaggttcactgcagtcacaatttaccgatatgcagtcttttctctgtttttagattgttatgtttgtttgagcagaatcatgttgaaggttttctcgagatgtcagcaaaaacttactttaccacggcttgcagacttgtacatgaaagttgatgatcaaaccaggactgattgattgattgattatacaaatgaaaccaaaagttccggaaaatactctgtgataagaatcttattgctccctgttaacatatggttcaatataactccagaaaaaaccagagtcgttggcattgagcattgttgtgtgtattcaggaattgtttgatagtctgatttgcgtaatttttcagtcaacattgagagatctaactagtttgtttgatgttgcagtaccaaacatgtctgattcagaatggcaaacacatgttctggaatagaaacagattccatttaataaaagataaaaccattatcttaacatagaggtatcataagataaaccagaaacatagatagaacaaaagataaccaaagttgcaagaacaaactgaaatgagacgttaatttagcatctaactggatgatgatgcttcaaagctttataatccgcttactcttccttggtttctcaagggcagattccacatcataaccccaaatcattttcaaccactcggaacttttctggtatagaggttccgaagaagacggatctttatcgtaaatcctctgttttttctttaatttcttcttcaaactcttcatcttctctatgaagtcttcgtcaataacagtgcttatgtattcatggacgacgaattcgtatgctccgtttatatcatcaacaggattcttacctgttacagatttgaaatccaacataccttgtagcacaaggacctcatctttcgaactccactttaacatttgagaattctccttttttgcatctttctttgattgtttggcactcacgttcttccgcttcttcccagttagcttagcttcaccggaaccaccacaaaccttggaccggttggtattggctttgtccattatcagacggttctctgagagaaaaagagttcgtttttagggagaaaaagagttcgtttttaggtttcggctgtttttagggttcggctatagttactatatatcattagtacgtttaacctaacgttttagtaaactctcatgccagggcctttacttgcggaaaccttcttgatggaccaaaagcttctccttcgatg

SEQ ID NO: 22035 - DNA, 3003 bp, Unknown
  misc_feature (1)..( 3003): 2750-1469P.txt file - cDNA_ID_2044344; gDNA_ID_2926128; Annot_ID_196745
tttgggcaaagttatgtctttatattaaatgtcgtgtctatgagtctatatttatgtgatatagaacaagcttatcttttgatttacacttttagtaatagtagtttgttaagaaaacatgcataaagcataattctatgtgtgtgtatttcacttcacatatagcatatatatgaaaacttctctctatttcctagttaaaatctctacagtcgtagttaattggctaggattaaggaagttaagcgatcatttagcacatatgtattgtgaagttttgttgaatgtttacaaggtttgtttccaagtgattgagatgacaaatcttcctctgttcgcaacaaccacgttgttttacacttattcccaagcatcatttttttttttggtttatcttttaattgcaatatacatatatagtacacacatacacgagatatatacaaacgtatgcaattgcattctataaattgatgttagtgaaggatatttccaatattacaagcaagcatttatttatatgttatgtacaatgtcttttgtgttataattagattgttttattcagcatatatttttctaaatcggtggtcttgattgatcaattactcctgtcgtgtttttttggcattattgaatcaacaacatttgctcgaattcggaaactcttccaattattaaagattgctgaaaatatcattttatctagattcttatcactctttcatatttgttggcattattatccatttcaatttcgttataaaaaaaacaggtggtaagtttgcaaactgagctttcatatctacaagcacacttagcaactctagagctgccacaacctcaaccaccacaggttccggtgtcatcttcaggatctctacaggctctttccataacggacctcccaacaatatcaccgtcggtgtacgacctctcctccatcttcgagccggtcatgtcctccacttgggccatgcagcaacaaccacgaccgtctgatcatctcttcggcgtcccgtcatcgtccaatatgggcggaggcggtgagctccaagcactggcgcgtgagtttattcacggtgggcaaatgccagctcagccatcgccgggaaccagtggttctgcctcgtcagtgataaaacgagaatgaagttatttttatcgtatgtttgtttatttggaccgtaagagatctatagttagccatatgtttctccttgtaatatatatacttggtcgaattcgtatttaaattgttgtctagaatgttaatataagaactatatgatttacattgattaaatggagtatcttataggccaatatgttgaagttgctttggtctcttggaccatcgaatatgttgttttaatcagcctagagtacaccggttctccacaacttgggtggaatcttgagcgtgaaggaggcttgattctggcgcgagacacgaaccaatgagtctcatttctcattttccctatcacttatattgggccttaaatgggttcaataaagtttttttttcttatatcaagcagcccaaaatattatttaaacccgactcaattgagtttgatactctggtttgctttgtagtccacactattttaacaacatcttcgaagcatgcatttgatttaacaatcttcctaatttactagagaatttgagccaattttgtcttttttttcaccatttttataaaagctggttttcaacttgtgttctcttagcatttcccgcctctacatcaactagaaggccctacacggaccttgaacatgatcttagcgatgtctaaggactaagctacataaaccaatgagtaaaatacatatggattggacaataatcaccaatcaaaaccccaacgtcgattgcatagccgataagtagtaccacaatggtgagaggaggatagtgccagcggctatgaagggtcgacgtaaaccaaaccttgatgagacactgtaaaacacgactattggttgaacaatcagttccaatcgaggctcacaaagtcaaagcatgcttgtaagatatttggagtaattgaaggtacggtgtaatcagagcgtttcttgaattgccgaaatgaagtttagccctatggctatagaagcaataagccatttttatattcataactttagaggtattaataagaaacatatataaatttttttataaatgtattgacaaaaaatcaagtaaaaataagcaagatgcaaaacataagcaacatttctaattaatattatataattttttataatgattttatacatgaaaaaatctctaattaatagatatgacacatgtgtgatcatgtgagttatcaattttgaataattttttaatactaaattgacatattgtttgatcagaaaatgtcattttttgaaactaagtgaatgaataaagggttgagctaagcaatatataattgttgatgatgaaataataacatgaatacaaattatatttatatgtgtgtatcaattagtgtaatatttaagagagaaccattggagtagagccttacaagacaatatatgatcaccattggaaaactttaaagctattactatggtaaaaactcaattgcttgaattcgaattcaagtaatcaaaatcttattattagctcaaatctcaagttcctattactactctatacatatacatgtgtattaatctatgttatcaccaaaatagaaacaattagatatagcaagtgaccactattttccttctaagacaccatacgaactaatttttatcaaaaacaaattatcaagctctattacaattccgcatgtgtgctatacattagattaattaaaagaaattaaatctgttttcactccatttatcaaaagtaacatctttaacgaatcaaacccataaggtactcttactctctattaatagaggagaatgtgtcatcttctcattactcaataagcatacttatcatatacacaataccacaatg

SEQ ID NO: 22036 - DNA, 3003 bp, Unknown; identical to SEQ ID NO: 22035
  misc_feature (1)..( 3003): 2750-1469P.txt file - cDNA_ID_2044344; gDNA_ID_1621147; Annot_ID_173108

SEQ ID NO: 22037 - DNA, 3000 bp, Unknown; identical to SEQ ID NO: 7473
  misc_feature (1)..( 3000): 2750-1469P.txt file - cDNA_ID_2044354; gDNA_ID_2926128; Annot_ID_196742

SEQ ID NO: 22038 - DNA, 3000 bp, Unknown; identical to SEQ ID NO: 7473
  misc_feature (1)..( 3000): 2750-1469P.txt file - cDNA_ID_2044354; gDNA_ID_1621147; Annot_ID_173105

SEQ ID NO: 22039 - DNA, 3000 bp, Unknown; identical to SEQ ID NO: 7500
  misc_feature (1)..( 3000): 2750-1469P.txt file - cDNA_ID_2044488; gDNA_ID_1621148; Annot_ID_173137

SEQ ID NO: 22040 - DNA, 3003 bp, Unknown; identical to SEQ ID NO: 18501
  misc_feature (1)..( 3003): 2750-1469P.txt file - cDNA_ID_2044504; gDNA_ID_1621148; Annot_ID_173134

SEQ ID NO: 22041 - DNA, 3003 bp, Unknown; identical to SEQ ID NO: 18503
  misc_feature (1)..( 3003): 2750-1469P.txt file - cDNA_ID_2044522; gDNA_ID_1621148; Annot_ID_173126

SEQ ID NO: 22042 - DNA, 973 bp, Unknown; identical to SEQ ID NO: 7483
  misc_feature (1)..( 973): 2750-1469P.txt file - cDNA_ID_2044534; gDNA_ID_1621148; Annot_ID_173120

SEQ ID NO: 22043 - DNA, 3003 bp, Unknown
  misc_feature (1)..( 3003): 2750-1469P.txt file - cDNA_ID_2044619; gDNA_ID_1620302; Annot_ID_152681
gtaaaacaacggtggctaaagtaatcaaacggtggtatgaaataggcggctaataagatatttttagccgcagatatttatgtgtctctgagattgacacgtgtccttatatagttggatattggagaacaagttagaaagttcacgttgagaatagttgtgagtccgcagagaataattgctctcatgcgcagcccacaagggcatcataggacccgattggatataggatccgacccggttcgtgtcaataccacgtgactcaaaaagaaactcccgctcttggcgacttttcgaaaccctaaagagactcgtatttcccccctaacgccgattttcccgccgctctcactcaattacaaaaatccgtagatccccaatctccaatcacatatctcccacaatctctttctcgctctctcgatcatcagattcttcaatctctttcaccaagcttaaccaaatcgttaccatgaaggatatctctaaatctccggcgagaagaagcgacggattccaccgctacttaaaaccaggagcgcttgctcagatccgaaactcgagaatcaacgctagatctactacatctctcgtatctcgctcctccctctcgcagctagtagatccgatttcaccatctgagaactcggttgatgaagcagcagcggcttcgcggaatctgacgatagatcaggtaccacatcttctaagaaagatctatggtccttacagttatcagaggaagaaattagccgctgctagatctgtctcgtcgatgatgatgatgaatatcaatcctcctataaactcagttcttgttgaacccagtagtgatgttattgctcattgagttaaactagtttctaccaaatctgtaatctgatgatacaattcgggtaaaatgtttaatactatcataagactcactatatgaatcattaaattatcaataaattgtgtgttttcaattgatgagtttatctttgttaatttaatgtttgtgttgatttgatatcttacgatttggatttgactatagattccttcactacatattaatgaacacttacatgagtatcattttgggattcttaatgatgtatatgtaactcttaagtgttgtaactgttttgaaagattagccaaacacttaaagattcgaagagtaatgatataagactacatatatttttctcaaatttgttatcatcttgttagattgtaattgacataggctatgttacctcagtcaattctctgctttgcttaatctaaacatctcaaatctataggttttgattatctctctgtttgttgtgatgggtaaaaatgtttgccttctgctattatcagacgctattgtctcagaccaaatggttacctatgtttgtcgatgggtgttaacagatttcatttgcttggtggtattaccgcatatggaacattggtcttggtttatttagtctcatcattcgatgttaataagttttatctatatgctttctttcatttgttctaatgggtaatgatggttatctatatgttgcctttagcaaacgtcgctgcccatatggttgaacttgaatcctgatccaactgaacctctttaccctctgattatgcaatcggttattaattgatgttgatatccccaagtacatatgtatgttatatgtaagagaccattcataactttcactttctacccttcaaagttttatttaactctcttcattgtcaaatccttcatctttactactttttcaatatctccccattatgtataaatttaatgcatcaagtactacaactattccacatgtgcattgataaatcaacctcaaaatagaggtaaaagagagagagaaccacttttttgaaaggagtggaattgttctcgtatcacgagattacataaacgtgagtcgtccaaactactagattcgaataaaccaaccaaatcacaaattgtttcttttaaaataatgaaacatgatgtgaaaacacaactcgtagcctatttgatattgttttcgttcatgttttgtcgacgtagacccatatatcttagtaggttttgaaataaaccaaactgagccccaactaaagctactaaaccacggtcgatagaaccaaaccgacgtaaattcaaagctataaactcaaaccgaattataaaatatgaagttatgtttgattttgatatttttctcactgaatcaaacctaaacttaaaccaaaatggcgaaatctgaaaacccaatgtaaatgcagactccctatggtcgattaattttgttgttgcagaattctttagaagtatgatgtgacatcaccttgactaatgctaatgtcatcacttaatgtaaagaacgtactaatatttagcaacgattttaaaaataataagcatctcaatacttaagattatctcaagtaaaactaataatccaaagccatgatgattcatatgaagcccactgcccaccaaggcaagccaaatgtcgatctctctcgctaccagcaaccaccgcacttgcctcgtccatgtcacttccacaaccataaatttttttggtgccactcgaaataaaataaaaatataaaatttatcaaaatcattaacgatttaaagcaaaattctaactttaataagataaagctacaatccggagatggtgaaaaaactttaatccatattcacattgtaagtttttctatggaaaatcacttcttctttttttccacgcggtttcaaaggttaatcataaaaagagtagaagttaaaggaacttttttgtatctattatagtttgtttttatatgtattgtgaccacaaacacatatatctacatatttattttatatataaagagatagataatctaactgagaaatccacttgaagctattcaacaatttttatagctttcttcctctccaaaaccacaccaaaaaaaaaaaaaaaaaatttgattttcagatccaatcaaccagagatg

SEQ ID NO: 22044 - DNA, 3000 bp, Unknown; identical to SEQ ID NO: 633
  misc_feature (1)..( 3000): 2750-1469P.txt file - cDNA_ID_2044638; gDNA_ID_1620302; Annot_ID_152673

SEQ ID NO: 22045 - DNA, 3000 bp, Unknown; identical to SEQ ID NO: 638
  misc_feature (1)..( 3000): 2750-1469P.txt file - cDNA_ID_2044667; gDNA_ID_1620302; Annot_ID_152663

SEQ ID NO: 22046 - DNA, 3003 bp, Unknown
  misc_feature (1)..( 3003): 2750-1469P.txt file - cDNA_ID_2044755; gDNA_ID_1620303; Annot_ID_152716
actcatttaataattcttatggatcctttataatatttactaatgaagttttctttgtcatcaatcaataaaactacaaaagaaattaagttattgataaaccataaaagagttttgctgactcagaagcaaatactaacgatgtttattttttgaaatttaagaaatggttatattgcttctatagaacgagcagaaaactgtacttctttgcatgtgttggggatagttttcactttcaagtgtttgtaaagaaatagatgaaattttttgagtgtttcgtacaaaccaaaaattagtcttgaatatactaaacgtctttttcactacaacaaggtttacttttcatgctcacatgttcatgaatatatatctagattcggatccctcttgctcttataaaacatatacggttggcatttatgtaaacttactagtattaaggaaacgaaacacatatatcccacttgagtattttttttatatatagataatttttgccgcttacaattttggagagttataaaaaatatacttaactgttgttaagatatcaatgacttttttttttctgaaaaaaacacattcatagattttttaatcttcgtattcttatagtagggattttaaatatctaaacgttttattactgaaaacatatttttatgtaaagtaagatttgattgaagagaatgcattttggttttaaaatgcgttgtttgggtttaaatgattgagaagacagtttattgccgaagtctctccgatctacaacggttcacactaagtggaggggcttcttcggcgatggtttgccacccacggccaccaccattcttaaatgctccgttttctattagaatcatcgtgtgagaattgagaagaatttgaaagaaatggttttattgcttctatagaacaagcagacagctgaaaattatacaatgcatgtaattaatgagcagatgataataccataagacgacaatttttgtttttgtgtgtgtaaattatatgtgatttatgtttatatatacatgttatactgtttggattatggctttgattcatatatcgtatcatccataagtcatgttcgaagctattatattgttatttttttgaagccgttagatgtcattataattgtattattcaaatataatcttaatgtcaatcaaccaatgcaaaatctatgaacaagtgatgttacatatatttaaatataaaagtataacaattccatgataattaattaatggttgtgaagtgtatgactatgtttgcgctggagaatattgtgcgacggtcatggattgatcattataggatgaatctacactttacacacgcaatgtgaattgaatcttcgaatattctggttgaaagattatttttcatgatatcatggtagataattcttccgataaaatgcagaacattgaagttaagccaaagtcagagtaaagtttaatctaaattatatggaaaattgtatgaagtatcttctctttttttattgaacgactttgtatgaaagatctatggatctaataatttatgaatggggggctttgtctccgactctccaaccaattaatacactgaacttgggatattctaataggcatttaataatataactaagaacatttgtattcttataatattgaagttttggatgataatgcaaaaagtcttgtgattaacacatctcactattatagtggtttagtaaaattgatgtatggtattgtttaagcactaaggttatgcaacagttcgtaaacaattaagcaatactacttcttcttgacacaattaattatgcaacattaaggttcgttattctcattaatgaacctggactgattacagactttgctaataatgtaaagctaattactggttaactccggtttacacaataccatatatcaattttactaaactactcttatactcactgctcagtctttcatgacttatttttgcactattctcttcctcttgtatatgtcccacttctcttacaatactttctttcattcgactacttatcttctttcgtagagttaacgtcggtagcctgcctataccaacttttgttaatgaaattcattttctcgacctttttcgtcccttctatatgtatgtgctacacaagctttgtcaaaagacatttttcattcaactaaattctgtgaaattatgacactttttcactaattaattactcataaactacaatttctaaactagaatatcatattaactcatccaaaattaccccaaaacaaaaataaaaaactcttgttttttttgtttgggttaattttggaccaattaagtagataataccgatttctcaattcaatattcctaattactttccaagtgttagaaataatattgaatggcaatgcctactattatgtggccgacactacaaagattaagaatgggctctctaagcccattagttgggtaataaagcctgtaatgggtttttggttcgttacttagatctaaccctctaatttatttagtgtctttgacacattaaaaagaaacaacacctcttcgctttggaacttgaatggatgaggcttattgacaaatacaaagaacgaggaaaatgccacaccacaatacaaacacacaaagccaaaaagtaccaagttacggtactgtcggaatattacagcatcccaaaatcccagatttccacgtgttaaaacaatagtacttttttatcaatctcatgctggtgacataattaatagtgatagtgatgtgactcaaacaaactgattgtagccattgaagaagaaaaaatcctttagacggaaacaaaaaagaaaccccacatgaaaagtagccaacgttcaaattacaggtgaaacaaattcaccagaaaatctgagaaattgttaagatttctgtattgaattaaagagaaaaaaggtggaaactttattgctttttggccataaaaagatg

SEQ ID NO: 22047 - DNA, 3000 bp, Unknown; identical to SEQ ID NO: 649
  misc_feature (1)..( 3000): 2750-1469P.txt file - cDNA_ID_2044774; gDNA_ID_1620303; Annot_ID_152710

SEQ ID NO: 22048 - DNA, 3000 bp, Unknown; identical to SEQ ID NO: 644
  misc_feature (1)..( 3000): 2750-1469P.txt file - cDNA_ID_2044782; gDNA_ID_1620303; Annot_ID_152708

SEQ ID NO: 22049 - DNA, 3003 bp, Unknown
  misc_feature (1)..( 3003): 2750-1469P.txt file - cDNA_ID_2044866; gDNA_ID_1620304; Annot_ID_152750
atgctgaaaacggcatgtcgttttgtttgtttgaaatgttggaggaaaataatcagcaaacgacgacgtatcccctcgtgttctgaagtatggaaacggcaggtcgttaactcttgcttcaaaaagaagtttccctctttcaatttttttttacttattcattgacttcgcttcttcctctttgtcgttaactcttagataattaacacggaaaaaccataagtaaaaagcaaaacaaatagataaagaaaaagagcatatacttcaaaacaatggaagagatgatgatggggtcaatacgatgtgaggaatcagaagaaagattccagcgactgcgtaccctaaaaggaaccagaaccaccgtccattaatggaagcgagaaacttgcttgcatcccaaagcactttcataaagtggcaaaagagaaggcaagggatcatagtttccatactcaccatcatccacatttactctaagaaatgttgcactcctgggggctgggacaggatgtccatattttgatgcttccgcactagtcttaggctccatcggttttggaaggaagttgaagaacatttagaacaatacactaaactgtaacgtcgtcattttgccaaagagaaaaaaaaatgggccactcgattattatttgtttagacccgttggtaatcgggcttaaacgggtgaaccctattaaattatttattttttaaatggattcgggtaaaaaaaacataacaaatagcccgtttagactcgcgggcttgaggcccattgtaacatcactagagagagaggtgtcttattttattttttttatgagtgtttaggaccaaaattagattatcgggctttcttcacaagccaattatcgtacaaccatgtttgagttccagtgaagaacctttttgacgacggcgtatactcgtatgcttaaatatgaaaacggcaggtcgttctttttcttcgaattgtttggagaaaagaaatttcgaagcgacgacgtatcgtcatgtcctggaatgtggaaacggcaggtctttgtttcataaaagcttagaattcttggaccatatttagttcatgaatttatcatacgtattaatatggttagtgattgttttaattagggtactagatgatttattatgacctaactgatatatccacctaaatagttttgatccgtagcttttcagttgattcacgagaccgaaaatttgaactaaaatggagaatttgtggattataaccaaattacaatatctatatgaaatataacagatactgaattagaatagaaaacatgttgttaaaaaatttaaaataaaaataaaaataaaaatgggcaaaacaacaaataccaaacgtaaacgaagatattagaaaaagaaattctaaaacagtggcgtttttctgtccaaatccaaaactattatgaagggacgtttctgatatatatataaaaaaacccgagattttatcggatgtgtcgtaatgaaaggggtaaaacacgtggcagtcaaccaggctgtcagttgttggtgaaagcagacaagcgcgtgattttaatataatctctctttacccgcgccaacaacactttaccaagacagatctctcatggcggtgctctgatgcttcagcctttgattttttccttttttgacctttttaatctctaattataataatcagtacaaaatcactgttgtttaccattaatttaaggaattaatcctaatctgattttaaggaattaatctctatttgccaaagaagaggcgcaaaggctccgtcttttttcttcttcttgtttctgtgttaccgatctggctctgtcttcttcttcttcttcttcttcttcttcttcttcttcttcttcttcgtttacgtctctgtgaaatgctcaagctgattagggtttatcaactttttctcaactttcttgttatctccttcgttatcctctctgtcttctcaggtgactaatcactcactctatcgttatccacttgattgttttgtttcctgtttgctttttgatttgagatctatttttgggttcagattgttgtcgacagctaaattctttgatgtatttggatcaaagtatccgtttttatttgatttgttccgtcttcttcgtgatcgtgtttgtgtctgtctctctcctagatttgggttttggggatttgggtatgcgttgttgtgatcagaagggacctttatcgtttagtgatctctttgatacagagagacactaaaaatggtgaaaaaatgacaaaacttcttattggatgagggaagaaacgttctaacgtgttccatcttctatcattttcttcttagatattttaagattgactgttttctgaacatttcatgctttaggaagtgttaagttgaaacctttttctcttagctctccaattgctaagtgttttttctgttgtctttcttaattatcttttgggattctcatgggatttgattgaggtagagggaagaagagagagagacaaaaagagctttaggctattgtctagacttgcttaatttggaatatatgtgtgctgagtctagtattttcctctgtgaaatccagctgatataatcatgatagtaacattcagtttcttttgtcctttcattgattgcagcttagcagctattgtgcatttgaagctgtactcggaagaaaagcccatagaagagtcaaatgtaagttctcttactgattcttgagctcccaatcaatgcatagaagctgcgataataacccattaattatgtagaaagtttatatgctcattggtcgaccatacactttattttggctgtttctgatgttctggcttaacatatctgttttctttgctgttcttgtgattagcatgaactaagtttctgactttgaaatcagcaaaaatgtgtcgtggttggtcatgctggaatctttagtgctaattatctctggctcatacagataacaaaaaatg

SEQ ID NO: 22050 - DNA, 3 bp, Unknown
  misc_feature (1)..( 3): 2750-1469P.txt file - cDNA_ID_2044895; gDNA_ID_1620304; Annot_ID_152738
gat

SEQ ID NO: 22051 - DNA, 3003 bp, Unknown
  misc_feature (1)..( 3003): 2750-1469P.txt file - cDNA_ID_2044906; gDNA_ID_1620320; Annot_ID_153306
gtgatgaagtaaagggtcaaccaaaagaaatgactgcactgcgtaatgcaagtgctaaatacatttgtcgtatgtgcaatgtggggtgccacagtccaattgtctttgaaactcatctaaggggtcagaagcacgctgccaatctgaatcaatcaaaggcatgtctcttacttttgcatatttgagagcatataaaaaactacagtgtggtagacatatgctttatgtaataccgtaggatcaggcactcattgattctaagaagcttcaagagaaaggtttcggagaaaaagaacaaccaagagaaacaattgtagagccacagttgcagtctcaaaacgctcaagagaatagcaagtgtttcgaaaagcatgttgtcatggtgaatcaatcagaggtcagtttcttaatattggtaatttggtattttaatttacaatttccagtgtagcaaaacatatgctgaatatgagagtcttaactgtggtaaaatatataaagaatgaagcttatatagttgcatcaggtactcatcaatgcgagtaagcttgaagagaaagatgcccaagaaaaagctcaaccaatagaatcaatagccgaacctcagtcgcagtctcaaaacactcaagagcataccaaattctttgagaagcaaaacgaagagttgagaaagatttgtggcactttagaaagcagtgtaaaagaacctcttccaagtactaaggactgggtggagactcttaacaaacagattccaaatggagaatttttctttggtgacctaagatctgattttgaagtacccagggaagcaaggtaatttttgctaacttggatttgcttgcttagtatgtcaaagatgcaattatctaaatgtattctccaacttttgtcatagtgaatgttttgatggcattgtcaagcctgtaaacctttccaaaggagaaactaagcattcatgggaggtaaagaagaagaaaatcgaggtgaccgtacgccatgcaagaccagctgcatctaaactttgtcatctttgcgtagtgatttgtgatagccggggtttgtcaacagttgtttgtgataacaaagctcattggccgaaccaaaaacatactactgtagtgacacttacttcatgttctacctctttatccttgatcaatatcaaacccttctgacttcttatttttgatgtaggccgcctttgtagccagcaatggttctcagtccagcgtttcaaccaatcctttgaaggaaccagagggtttgcagcccgtgtggtgccaagtctgccagatcagctgcaacagcaaggttgcatttgcaagtcacacatatgggaaaaaacaccgacagaacttggaatcacaatcagccaagaacgaaactatgtctactggaccaggcaagctttctaaagattatggagaaaaaacgaagaaagtatcatgcaaaaaccaaaccacatttgattctcaactgaagagtcagaaccattataccatggcgaaggagcttgtagaggtaaatcttactatttaggttttctttcgtgaacttggaatctgcttttagtaatgaatattacaaatcttagtaaaaataatatccttaggtttgattcctatcgaaagtgatgaagtatatattagaccttaactaaaatatcgatgtagaaggcatttgtctccgcatttgagcatgtctccgcattggagcagttcagtattgttgactcaaggacaatccgagaagacaccgaccaagaaaaagaagcaacaaaggagcagacacttgtaaagatggatggtaatgggtttcgaggggcaccagaagataaagtggaattgaaccaagaaaaacatagagaagcactggagcagttcagtattgactcaaggataatccgagaagaaaccgatcaagaaaaagaagcaacagaggagcagacacttgtaaagatggatgatcttgggtttcgaggggcaccagaagataaagtggaactgaaggagagacacaccgtatctgagaacttggtgcaccgtgtcttcactgaacagaatcgagagtctagaatacccaatgaaccgaggtaagagccaacattcatgggagtgtataatatggtctctctctctctctctttctcttgaatctcgatcaatatgtgtgtgtctaactggttgcttggattttgggttacagaggatgtttagatgtgattcctgagagagtaaaactgccaccaaacgtgaatgtggccaagaatttggaagatgagcagaagcataaacccgaaccaaaagcacaggaagccgaaaacaagtctggaggacgcaaggatcttcctggagaggctgccaaaagggaagagattaagggccaagctgataacttttggactcgcctttgggggaaaaaatattaaaataatgtgaattgttaattcatgtttaagttgtcaacaatggatgttttcttttgaatggcagattaacgttttattttggattggcttttgcttatttcttactgttgtttcttatatataaactttacctcttaaaaaagattcaagaacaatagaatttaggcattgtagtatataggttctctcaataaattgggaaataacgaccggtttttccaacagaattttcggcttagtctgtaatgtaatcatcaaaaattgcattatttgctttacgactacagctcaactgggccaccctgattacttatccgacccggcccgacccatccggatcttccttctcttgtttaaattaaagcagataaaaaggaaactggaaaattcagttcaagtattgtcgtcggaatattactcttcaccggccaggtaaagctttcctacgactatgcttgtgttcgtcggaatgtgtttttctttctttttcttatagtctctggtcgctaatgactcgtattcttggtccagttttcagctcttgtgtgtaaatttgttagtcttttttaatg

SEQ ID NO: 22052 - DNA, 3000 bp, Unknown; identical to SEQ ID NO: 779
  misc_feature (1)..( 3000): 2750-1469P.txt file - cDNA_ID_2044917; gDNA_ID_1620320; Annot_ID_153301

SEQ ID NO: 22053 - DNA, 3000 bp, Unknown; identical to SEQ ID NO: 786
  misc_feature (1)..( 3000): 2750-1469P.txt file - cDNA_ID_2044940; gDNA_ID_1620320; Annot_ID_153295

SEQ ID NO: 22054 - DNA, 3000 bp, Unknown; identical to SEQ ID NO: 787
  misc_feature (1)..( 3000): 2750-1469P.txt file - cDNA_ID_2044958; gDNA_ID_1620320; Annot_ID_153291

SEQ ID NO: 22055 - DNA, 3000 bp, Unknown; identical to SEQ ID NO: 798
  misc_feature (1)..( 3000): 2750-1469P.txt file - cDNA_ID_2044985; gDNA_ID_1620322; Annot_ID_153382

SEQ ID NO: 22056 - DNA, 3003 bp, Unknown
  misc_feature (1)..( 3003): 2750-1469P.txt file - cDNA_ID_2045020; gDNA_ID_1620322; Annot_ID_153371
ttgtcttaacatggatgttccaggttaaacgatttggagtaattcctccaagaatcatctcgtcaaggaaattggcagcttcacgaaacttactaatagcacagaacccactgattactttcccatataatccagcatcaggtttcaaaccctgaagattcattctatcaagaagttcaacggcttcttgaatcttctgctccttacagagaccagtgatcaaagtggtatacgttaccatgtttggcctgcagcctctagccatcatcatctcaaatagttccatggcttgcaaagaacgcccatctttgcaaagaccgtccatcaaagaactgtacgtgaaaacattcggctcaatgcctttacttttcatctcttctagatatctcatagcttcatcaacatttttcgatccacacaaaccgttaatcagagaagtataggtaacaacagttggtgcacagtctttctcaaccatctctgtaaacaacttcttcgcctcatctatccttccgaacctacacaaaccactaatcaaggttccatatgtgtaagaatccggatcacaccctctcttaggcatttcaagaaaaatcttaagaccagcatccacagttccgtcatttctgcaaagagctttaatcaaaacattgagagatgccacagtaggaggcaaaccaatctctctcatattcttgtaaaacttaaatgccaaatttaactgattctcttccacgagaatggcaagaacagtgacataagccttctggctaggatcacaatcaaaatccttcattttgtgaaaaacccttaaagaatcaaacggcctatgaacccgaccataccctcgacatatcgaaagcaatatatcttcactaacaacacaattctcaatcttcattctaacaatcagatcttcagctgctttgaacttattagcagagaccaacctcaagaccatataaccaaaagaactctgatcatgtacgtacccatttgcgtattccgccgttgcggaatcaaaaactgccatagacttctccacatctttttcagctcgcatcagtttgataacctgtgaaggcgtgatgttctttgaccacttgaacatcatcactttgctacccattactaaacaatgataccttccaacaatagcaaagaatacacctttttatagagaagaatctcagctacgcattacgtcgaacaggttgtgtgcataaacgatttcgataggctcaaaccaaatgaaagaaacacagaccagaaaaatcatttgatcttcaaaacatacgagttccaaaagtgaaggaagcaacaatgaaactcgttacgaactagaaggttaatcaaattgccggagaagaatcgctcaccagttttggctagggtttatgaaatgggagactttagctgcaaagagaagagtctctggacgatttagagggtgtctctctaacaggcaacaaagtacatattattacagtattaaccaaatttaaacgaattaagtgtcaacaaaagcttatataaaaaatttaaagtttaaaaattataaaatatgtcaacaatattttagtacttaaaattattatgcgaaatatttagatcaatggactactcatctaatatatttgcacctaattttaaagtataaattcaaccaataattagaaaatgatagcttatactcaaattcaacaaattatatataaatgtatagatactacaatatcattaacaaaagtcaccttaaataaatacacatatcttttatgttctctattgttttgcgtacgctaacacaatttctcatatgcaaaaggatgaatgagtaacaaattacctcataagaacaatcatctttgcttacatactaatacaataatcactcaatcaaccaataacatcaatcacataggtttacatacaataatcactcaatcaacttcataagaagaatcatgtttacttaattcatcaattatccccaaaaacactactattaagtataaactataacatatttgtagtgatgggtcaacatttttatcatatttaaactcgggtttcctcaaatcgagaaatagtgaacatgtaatattaattttaaatcgcaattacagaaattaattgaatttggtcaaatggacagaattttataaattgggtggaactagaaaaaaaaaaaaaaagagtatagggtgaattgagtacatgaaagtacatggtaatcctagttaaacgcataatacatgtgggttcatttgtatttttttgtaacttacgagtaaactggctacaacaaaaaaaaattagaagatttttttgttttgtagaaaaccctaattttagttatagttgtataactttgataaaattataaaattgtattacgaaaaaagtaataagatattcaaaaaagcctagaataacgtatatgactatgagcatgaaactgcaagtcaaatgctgacagacaaccataaacaaaagaaattaaatagagatacctttaaaataagtaaaatttcatttataaaaaatctactttcttgtgaatctgtcacgttcaataatttgaagaccactcaacatacaaggtaaataatgaaaaataaaatctaccaaaatttcaattattattatcttccaaaaaaacaaaattatacagatgatgatggtgatatggaacttcgattggctaatattcactgtgtctctaaaaaccatccacttatcaagataagatggaccctacactcatccaatctaaaccagtatctcaagattcttatctaattacatcattctctaccgttagatgaaattgaccattaaccctaccataactccatacaccgcgagatactggattaaccaaatcgagatcatcgtagccgtccgatcaacaagtaccatctcttgaaatactcgaaatcctcataagtccgtccctctttgctctcactatcaaaactctgaatttcgatttcaatg

SEQ ID NO: 22057 - DNA, 3003 bp, Unknown
  misc_feature (1)..( 3003): 2750-1469P.txt file - cDNA_ID_2045038; gDNA_ID_1620322; Annot_ID_153366
ataaaaatagttttgattctgctcctattaaatctttatgaaattgtaaatgttttatggattttgattattggaccaaaaatcttttgtctatgcaagaagtgttactcacttactcataaatcgagatgcaaccaaatttatcttgtcattcgtgttgatcacgacaaaatcattttcctaccttttaaatcgcatattttggtctctctcacaaaaataaacactaaatttgatttctccaaaaataatttctgtgtagtctccattgtagtctcatatgggtttattatgaaaaagtcagcgactcggcgctaattttaatttataattcattattagatattagggatttttaaatggaaatcatataaatttatatgatcaagaaaaaggatgtgtttcaaattttgatatagtttaagatatttatttgtaaaatttgtatttgaataaaaaggataaactttttggtagaccggttcgaaataaaaatttgtgtagaattaagggattaatgattcttctttaatgttttaaataggccaagcccgtttctattagcctcgttgtcttggcccatatccaaatctctccacacttcactcttttggtcacaaactcataattggcaacttttataacgttttttttttttttttttttttttgcttctacaatgtttctttgtggcatacgcaacgttactactgaagaacatcctatttcatgcagtttattttaataaagtgttagcgtgtatatataattctcattactattttctattcaaaacagttacatccaaaggcatatctaattatatattaatataagtgaaattaatatataaaagtcgactcagattaaatgaagcaaagtggattattctatacgtctaagattcctctaaatctttatatccatctcagttccttactctttattttatacgcaaaaaaataaaaacgtatccatatatataacatttatgtgtgtgtaagaatatatattataaatcaagacagacattttagcacagaagtagagaaacaaaggaagaagatggagatatttgtgaagaaagagtacttagatttggttcttgtcccatttggattaatcatagttttatcttaccatctatttcttctctatagaatcctttactttccttaccataccattatcggtttcatgaacatcgataaatccatttgggtcgaccgtatcatgcaggcaagttatcatctctctttacgacaatcttttcaaaattatcgatatcgatttctatttaatgttttgtccaacttattacaagataaaaaaaatgatgatttggtaatgccaacatttttctaattattacttttgctatatggatttagatataacggttagctcgaatgattacaggcaagaaaagacgaattgggtggtgctttaactgttctttcgagcagcatatcagcttcaacatttatggcatccattgctttaacattgagttcacttatcggcgcgtggatcggaagctcgccggttagtatgactgtttttaccggacattttatctatggagacacgagttcaatcacaatggtcatcaaatacacatcgctcctcatatgtttcctagttgcattctgctgttttattcaatccacgagatgttttctacatgcgaactatcttatcaccactccgggcgaagatattcccccggacatggtgaagagatttgtcttgagaggcgggaactattggtcgctaggtcttagggctctttatttggctcttgatctattgttgtggcttttcggaccggttccgatgtttattaactcggttttgatggtcatttgtttgtattttctcgactcaaactcggtggctcagcctctttatcaccggacttttgaggcggagcaaattgtcaagaagatgagaggagttttgcctgaacagttgacttttagatgtaattgaaaagaaaattatttgattcttaatcactttgccaacttgggattttccaacgaattatatttgattataataatctttggaaaattcgtaagaagttttagtttatcaattattgcatgagatttgtgaaagccgtacggagcatgttccgggagcgtctcgtcttatgttttataatcatccacacgataaagcattaacggatagagaaaaaaagatgagctgtttaattcatttcttggaagcaactacttagacatattctctaactttgaaaataatgattataaattgggttcactaatatagtattgtaaatctgtaatttaatttccacttgtgctacgaaaacagcatggtcacatcacattttttctcagcaagtatataaatgcatgtctgaatattgatcatgcattttcacgtaagttgacataatttgtttttagataatatgcaatgcaaatatttaaaagagaaggtgaattcaatggtatttttttttgtgtgtctattttcaaaaatagcacaaatacagatttttaaatcatagagcatttaatgtaaaatatttgcaaagttatataaggtttttataagattgtatatataaggttttataaagttcataaattttgataaaacagattataaaatggtattgctacttgctagcacactttgttagcatgacctttaactcaatgcaaactcatgctaccaatcaaagcctttcattagagaaaactggataacaaaataaataaatagaaaccacacatttaggcccataaaggcccataataccttttcttgggcctattattaaaaacttaacccctttaatcgctgttttctctctctcgcgacggatcttcttaggtctctctcttctcctccttttccccactttttcaaaatcagcaaattttggattttcagaatttgagtgaacttaaagtagaagacgaattgtctgaattcgaattttaagaaaaatttgcagagatg

SEQ ID NO: 22058 - DNA, 3003 bp, Unknown
  misc_feature (1)..( 3003): 2750-1469P.txt file - cDNA_ID_2045084; gDNA_ID_1620322; Annot_ID_153354
caaatctccagcttaattaatttgtacaaccatttatgaaaataagagaaattaagaattagaaaaattcatctaaaagtagataaatttcctgataataatttaagagtaggaattcaagtaaatggttgtacaatagttgaaaaattcatctaaaagtagaaaaattcatctaaaagtagatgtaaaaattcatctaaaagtaggagtatatgaatcgtagtatatatttttaaaaatttaaacactttgtacgtaattggttaaaatttcatgacttcagatacatttcctgataataatttaagagtaggaatttaagtaatccgaattaaaaggatacaaaacgaatgtaatgaatgattatgttcacatgataaaatgaaaattttgtgtctcttgaaaaatgcatacgatatgcaatttccctttctttcttttgttcttttctctctaattttacgttttataatttctattagttattaaatgtagtaaaacaaaaaaaaccaaagggtaggtaaagaggctaatatataacgtgagagtagatttgctattctctcattaccctatcaaccctaagtaatctctttagctctcgattatcatcattacaccatcatcatgtcctcctcaaacaaaaattggccaagcatgttcaaatccaaaccttgcaacaataatcatcatcatcaacatgaaatcgatactccatcttacatgcactactctaattgcaacctatcatcttccttttcctcaggtactcacaaaatttacattttcttctgttaaatttataaaaagtatattgttaattttacttgattatagaaacaagctatatgaacgatgttatgtatatatgttaagacatgcatgcatgatgatataaaccgctctatgaaacagatcggataccagatcctaaaccgagatggaatcctaaaccggagcagattaggatactcgaatcaatcttcaattccggtactattaacccacctagagaggagattcaaagaatccggatccggcttcaagaatatggtcaaatcggtgacgcaaacgtgttttactggtttcaaaaccggaaatctcgagcaaaacacaagcttcgtgttcatcacaaaagccctaaaatgtcaaagaaggacaagacggttattcctagtactgacgctgatcattgttttggttttgttaaccaagaaaccggattatatccggttcaaaacaatgagttggtggtaaccgaaccggccggttttctatttccggttcataatgatccgagcgctgctcaatcagcgtttggttttggcgattttgttgtaccggtggtaacggaagaagggatggcattctctaccgttaataacggcgttaatttggagactaacgaaaattttgataaaattccggcgatcaatttatacggcggagatggaaatggcggtggaaattgttttcctcctttgactgttccattaaccatcaatcaatctcaaggtaaattaatcatttcgaaatagtaatactgttcatatttttttcttttcgaaatagttttattacctcatttgctcaacatacatgaaaataaatattataattaatgcttaatttggtatatttcgtagatgtataattagtatactaaatttagtatatagcatatatatatcgaatctaatatcatatagttcttaccatatgcatgctggtgttatccaatgtcacatatacatagatatgtacgtacactcatttctcatatttcatatattagtgtgtatatatatatatatatatatgtatatgtatcttggtcataaaaaaaaaaaaggaatcttggtcatatatatatgaattataatacttagataggtcatagattatggtaaataaattattaaattattccatattttggaatgagtaacgcatgcatacgatattttgggaaaaagacgttttggtctttagatttgaccatttactgtgtatttttttgggtaaattagtattatttaattactttgactaacattaattaccaaaatgtgctctattgatcacaagaaaaacgagatgtaggattatccggtggtgaagacgtcggagataatgtttatccggtgagaatgacggtgtttattaacgagatgcctatcgaagtagtgtctggattattcaacgttaaggcagctttcggaaacgatgccgttttgatcaactcgtttggccagcctattcttacagatgaatttggtgttacttatcaacctctccaaaatggcgcaatctattatcttgtgagttttgtgtaatggtcttaaggtttttgtttttcttgtatgaattgctgaaagcttttgtgtttggttttgcagatttagaagatattgaaaagcaaatgttatggtgctatggataaatattaatataataataaaagatttctgcgatttatttagttattaattatataagaatttcatttcttatcttttaaatttatgaacaatttacaggacatttacattttcgagactttgaaaaataaagaatgaaattaagttacagctttatttaagtttgtttccaatgtaatatgttcatttgtgcatttctattttctttcttttctgaatatatagcttatctagtatgtcattaaaaaatgttaattcttttatatatgtattcataatatttttcattataaaaaaaaggaagatattcattcatgtgagaaaataaatgggccattgctcctagttttgggcttttgggctttttcttagtttcttaatgtgtttgggccattgctcctggttttgggccaatattgagatatcctgagcctaacttatttaggcccattaagaacccattctattttgtgcgtgtatgttacgctgtgttctctcgttcaatcattttcttctctcatttccaaaatctagaaaccctagagcaaaaagtgatctcatg

SEQ ID NO: 22059 - DNA, 3003 bp, Unknown
  misc_feature (1)..( 3003): 2750-1469P.txt file - cDNA_ID_2045174; gDNA_ID_1620343; Annot_ID_154047
gtgctgaagttacaaaggaattatcccctatgtgggtggttggccccttgatcatcgccctttatataaaaatgttccaaggactatgttccctttacgccttctgcttcaaccaaaccatcaaaatgataagaaacctaccatcgtattatcttgtagcataccaatacattgccgatggaaagctcaaagacgacgttaaagctctagtgtttaaaccagtggtggccatcaagaacacagactacaaagagctcacacgcacgaagctgaaacagttccaagaatggatcattgagaaatacctggattttgttgaatctgtatggccttattactgcagaactatcagattcctgaagagggctaacctgatttgaagatcttcaacatggaaccctcaaattctgacttctcagggcttctctatgatttctctctgtgctttgtttacctttttttttttttttcttaattttaggaaggcttttcatgttgtttgttcttatctctatgtatactgataccttttttgaggttttacaatgagttcttttaatattaagggttatcccttttctccatacttaaaaattatctatacacatataaatcgacaacaacagaagaaataagtgcttaaaggtctcttataaacctctttagctccggaaatttgatggtaatgtttcttcagtaaagtactcctttctgacggtctctgctgagcaaaacttgaccttcacataaagcaaagtataaaaatccatctagtccagtcctctgaataaccacactatgtagtatatagcaattagaatcgatgcataaaaacatagcaatatggtatggaagttaccagagaagcgtattgcttcaccaacggtttagtgaattgccaaattggctgaaatatgaatggagcatctacaaaaaggacttcatccaatcggcttggatagtaatagtaaaatacgtcaaactgcagaaacaaaacaatggaaaagacaacaataagatcaaagaccattcacctgtaagaagatacaaaaaccattcacctgtaaggagaaagaaataccaggaaagtcaagaacttaagatctgcgttctgagatccgaatccacggagatcaaatatcccaagtatcttgtgttgtcctgctggtaacttacttaaagccttttcaagtaagaacacacaaagcttttcatcttctattggatcaagcagctgcaaaacgtcagacatttcacaaatcctcagctatagtaaatctgcattgctgaaatttaacaagaaaactggtgtctaacttgccccggggatgtgctttgcaggagctacaataaccactggccgacctttaacatctagaaaaccatgtacataggcttttccagtgtcagtagctgctttaatagaatcttcagaaagctcatctaccttgaactcatgacgccatttctaagcttttaagtaaaggataacatggaaaccaaaccttatcaatattaccaaaacaaaaaacaacatgtgatttgattctacaggttctacataaaagtgaagtctctggcaactttctagattcattatagtgaagaattgatagaagataaagaaaacacaaggaagaggatacaatagctttagttagctttccaatggcttcatcaacagaaaatctgcgatctttcaaaaaccagaggatcatatcctcatcatctcttccatatttgccaagtgggagactagtacaatctttcgcaagccgttcttttacttccaaaactagctgcaccacatgttcacaaacccaaactttcattacacaatcccctcagaactcagaagacacattccatagtctaaacatccaattcaatgggtattgtggaactcaagaacccaattctgagaccacataagcaaaagactaagtttttattttatttcttaaacagagcttccaatgccaacaatggaagaaagaaacagaggaaaacttgctgcagatatcatcagaaaaaagcataaaaggcatatgcgaagaagaaagccattgcgtaagaaattaaaaaaagtaacgtcatcgtaacattcatccaatttccatgattctcgctttttggctaaaagagaaaaaacaaaaccttgtgcgcatgttgggattcagacacgcaacttcggacagagaatctgcagttccgagatcgattaatgttcaaattcttcgagcttttgaaattgactgaagcagcaacgatggttgagctgaaacgaatcgacattgactacaaggagtaaaaatttactctttagagtttgattctcagaaattagattgatgagaggaattcggaagtttcaaaagctgggctttgttcaccacagagcaagaagaattcagaatttggaattttgcgatttatagatacagaagcgaaacagaggcatatgtttttgtttcccctttttatagactcttgcttcttatacacacgggtacgggtctttttatctgggtttagatccggttcagggtctcggatccacgttcggatccggtttggtatttctacattattaccaaaatttatttgcttagccagaagtttgtattttgtaaagacatcatcatagtactacatatataactacacactcgcagtaaatctttttttctctctgtataattgaagttaaaaataacaacaaaaatggcagtttatatggaggatcacataaaaatagttaaaaataatttagtcctagtaattataggtcttctctaattttatttggaactaaatttcagaaaacaaaatatcgtatcaaattttgatgtaaattataaaataatagaaattagtgagatagcattctaaatgaggattgcatattttggtattagatatgtcggattttatctgatatggtagttttcagtgtatatatatatctctaaagctttttcaagccaaataagaagaaaaatg

SEQ ID NO: 22060 - DNA, 3003 bp, Unknown
  misc_feature (1)..( 3003): 2750-1469P.txt file - cDNA_ID_2045216; gDNA_ID_1620345; Annot_ID_154146
cccgaataaatcgttgttaagtgtttttaaaaaacactaaatgattgttcttttgtgttgtaggacttttgaggttagaacatgacgtgagttcttgcgagtatgaagacatacacataatgtggaatttgttacacaagaatgaagatcttacacgcgtaccaatccaacaacaacaacaacagaggaagaaaccttgttggaatcttcttggttcgtatctttgccaaagattctgatccgttttatgatataaaccaaaccattgttgtatttgagagagccttgacgggtcccttgcagtgtggtgtggttttattgacaaatttcgcaaataatgaatccgaggttgcagagttttaaattagctgttatatattccattgcatacctctatgtacttatcatcacatgagtgttgtatatatattacaaaatgctttacatagtttgatactacctatgttcatctacttggtttcattgatcttgccttttcacataagaaaacagaacaaatcttaacttaaaactcccaagttgctaaaaaatggattttgtaatagaaggaaaaactttcttgagaatccaatgataaatttatcaaattttaaaatcaaagcctttttccaaggaaaaggaataatatagtggtatctttatttaataggtctctttagaaagaaaaaagacatccctattccataaaaaagattagacttccaagttccaaattagtggccattattaaaagaaattaaattagcaaccaatgagaaagatgaaacgtcagaatcaattggttagatactgatgtccaaacaagtgtgtgtgtgtttgcttcatatatgtgtgtcggctgcttctaggcttattaaaaggccggtctttaaaagagtattcaacaagtattgtgtgatgatgtgattgctttttctcttttttggttagacatttcacctaacgactctttgatttcattatatgtaactaacgcatgttgatatctatatactctttgcctcttttttttttcccaatgtcaaacttacatattcttttcgtgtgaatcttttatctttatacttgtctcaatcttttttgtcaatcacatcatcacacaataatttgagttttttttttgttaatgaaaatttcacatgccttcatcttctttccaccaagttcttcatttgtcatgacatctaagttcttgtcatttgtcatgccttcatattcaacagctccaaaggtggggatcgcgtcgttgaacactttaatcgcatgtatctcgctggaatgcaaaacggcatcatactgatcggttatggagttataccgatcggttctctatttggtctcatacttatcggttgttgtaagtaaaccgatcagtatcaatctccgtttccagcttcttctcattctcgaatgtgatggtattgacatgctacttagactttgagtaagaaacgatatcagagactcgcttcaaacttcacatatctcttcatcttctgttggatttaataattcacatatgacttatcatatgaagaaaagaaactttgattatgtctctcgtttcgattattttcctactaaaaataattctcattttacaaaagtttctttcactcaaaccaacataaataggtatactcctattttccccaccaatacatgtaacaactctcaacgtgatattgaacatgttaagcatgccttagaccatccttattacatgtctcatactataaatcttaggtataatataatcaaaataacatgtgaatagtttagaagtgtttcttagctaagagataaaagaaggtttaagagcttcaaaccattacaaaaattcttagctataatgtttttcaataaaacaattcatcataatagttaagagacaaaattaagagtctaccattaaagttgctcttagactcgtccaacagtttgaatcctatatttcatcgtccaaattcttttaacgcaaagtgcaaaatcttgaaccctacacctcttaatatcgtgtttccacaccaagattctattgatcgtcaacatttagacatgaattccttgttatcaaagcacaatctgtgttttccaaggtggtcgatctttgatgaaagtgtccaaaccagccaatctttttgaataatctatttattatattgattctgaagaagatgagaaaaatgataaggatcaatatgatgttcgtacgcatagtctaccatatgaaaaatacggtccatatacatgttctaaatgtaaaggtgtgtttaatacttctcaaagttttgctgcacatatgttatctcattacaatcatgagacgaccaaagaaagagaacatagacttactgcaagaaacaagaaaagatatcgtaattacatggaaaatctcaaaagatcacaacagaaggtgggatccatattagtgacataagtgacaatgaaacttttcaaaatcttgtatcataaaagaagagtttgtttatgatttatttatttcatatctcttattcaacttattttatttaaataaataatgcaaacttgtcttctatttatagtatttcataatatttgttattaccaggaatggatatgcatatttgcacagaaaattgtaatctttatttgctctttatattttaaggtttggttttgagttttttttataaaataatttcttaaatttcaataaataatacgcatacacaattacgcatgttaagccatattaattaataaaggaaagagacgacagttataccctcacaaaacttaaacgtaattatctccccaccttccccactctattctcaagttcgccggagatttatactaacactgcaaaattcactcacatttctactaaaatcaaaaccctagtctcgccgggaatctctcaaatccgtaaaaatcttctctattcaatctctccttgctcacattcaataacgaggcaatgttgatttctcaatg

SEQ ID NO: 22061 - DNA, 3000 bp, Unknown; identical to SEQ ID NO: 996
  misc_feature (1)..( 3000): 2750-1469P.txt file - cDNA_ID_2045228; gDNA_ID_1620345; Annot_ID_154142

SEQ ID NO: 22062 - DNA, 3000 bp, Unknown; identical to SEQ ID NO: 991
  misc_feature (1)..( 3000): 2750-1469P.txt file - cDNA_ID_2045289; gDNA_ID_1620345; Annot_ID_154123

SEQ ID NO: 22063 - DNA, 3003 bp, Unknown
  misc_feature (1)..( 3003): 2750-1469P.txt file - cDNA_ID_2045296; gDNA_ID_1620348; Annot_ID_154235
ctccttcaactaaaccgaaacctacacctgcaaaggatatagaggtggataagccaagtgttgtcttagaggcaagcaaagagaagaaagaagaaaagaactatggtagattctttttctgtttcagaaatcaacgtcttttcatttgtattctcaattttgactttcttcctttctcattttccaagcttctaacttggaagctgatttacttttggatgcagcctttgaagacatttcacccgaggaaaccacaaaagaaagcccatttagcaactatgcagaagtctctgaaactaattcccccaaagaaactcgcttgtttgaggatgtaagtttcgttttcttttgtatttccacagcacaccaagtggtgatttaaaaacgtgacatagttttgctaaccttctatgctctcttattgatctctgggtgaaggtcttgcaaaatggagctggtccggcaaatggtgccactgcttcagaggtttttcaatctttgggtgagttattgaatttcagttttcatcactatcagcgcactgtgcatgattcatgattaaggctacggatttcaattttattttatagcatatgccaacaattataaacaaaggaagatatgaaattggtgataaagaggaatgagttggcttcaaaaggatctactccgttacttttgtccttctgctagtcgttgatctgtattggtataaccatataagacttgcaggatattaccttggcaatctgtttcatatctcatgtgttatgattcttttttcttatatgctcacgttattgtctctcttttccttattctaaatttaaaactgaatcctgagtctgtctattgtttacacaggtggtgggaaaggagggccgggtttatctgtagaagctttagagaaaatgatggaagatccaacagtccagaagatggtttacccgtaactcatcttccctagcacattgtctttaaatgcatccattaagtttatctttaaaactggttgcttagtggacatttggtaacattgcatgtataaatgcagatacttgcctgaggagatgaggaacccagaaactttcaaatgtaagtcttttaatatttaatcctgctatcattcttttattagtcctcatttttacatatttctaaagactaaaggttacatgactagcttttgaatgatgtaattcgtttataggttgatccaatggttatctaaatttaaaatacagtttggtacttattgtctccgcttggaattttgtagggatgcttaaaaatcctcagtaccgtcaacaactacaggacatgttgtaagagctccattttacgaacaatttagttgtttccattgcttttaagaatgtctaaactatgtaattaagaaatactcttgtttgtttcttttcatgaatttaggaataatatgagtgggagtggtgaatgggacaagcgaatgacagatacattgaagaattttgacctgaatagtcctgaagtgaagcaacaattcagtaagacaaatctcagtttgtaccaagttaatagtacgttaaataggtctgatactcaatgattgaatctgtatttgtcagatcaaataggactaactccagaagaagtcatatctaagatcatggagaaccctgatgttgccatggcattccagaatcctagagtccaagcagcgttaatggaagtacgttttcttttaacctgaataagagaattgcttaattttaccccacttctttcttcatacaaaacagaaaccaattacattcttgttgttgttgcagtgctcagagaacccaatgaacatcatgaagtaccaaaacgacaaagaggtaataatactgccacttctccattgcccaaaaaggcgattacttttttaagaaatttgaggttattatacattgattgcaggtaatggatgtgttcaacaagatatcgcagctcttcccaggaatgacgggttgaaaaagctcacgtctttggttctatcaaaaatgtcacattgtctttagctttttgtagggagaaaaaaatgtttttttttttgcaaagagtcttcagttttggtcagatcagagaattgtgtaccatgttaatcttaaacgcggtcgggaattggagtcgtgtgaaaacgccgctgctgttgtttggtatgaatattatacaatagaatttgttgtcttaccaaaaaaagtctatgaagacactgaagagcaaattattatttttaagggaaaatttccaaaataaacttcatgtattcaaaatttgcttgaaaaaacctcaattttttttgtttgagattgtgtgaataaatctgccaatattttgttttagcaatttaaaaaattgaagtttttttctcgcaaattttaaatagttgtgatttattttggaattttaccttatttttaatatccaaaaggagaagtgacgtggcgatatcgaagcggtttaatgaagtgatggccccatcttaaagaaatcaatgacccttatcgttccacttctatcggagtcggagtttttttttgttgttgttgtattccgtacgtcggtcgttgtcgggagaattggcgcgtgaaatccttggctccgtcgaatacgtctgcctccgacggctgtgagtcgcatgattgagtcgtgggtaagtatccttgtgacttcaaatttgtatttccgttctttataatcccctgactcttgagaaaatcgaggagaaaaaaccatccttgcttggtattcatttgaagagtgttttagttataaaatcgtaatgtttgacggtatgtgatattctgtgagcatgattattcagaaagcttttgtctttttagtaaatattgtctctttcttagtcttaggtaatgtaacctcaagaactctatgcgagaacattacacattatctttggaattggatattatattgttaaagtttaatcattgatgaaagttgcaaagagttatgatg

SEQ ID NO: 22064 - DNA, 3000 bp, Unknown; identical to SEQ ID NO: 1018
  misc_feature (1)..( 3000): 2750-1469P.txt file - cDNA_ID_2045304; gDNA_ID_1620348; Annot_ID_154233

SEQ ID NO: 22065 - DNA, 3003 bp, Unknown
  misc_feature (1)..( 3003): 2750-1469P.txt file - cDNA_ID_2045313; gDNA_ID_1620348; Annot_ID_154230
ttaaaaacgtgcttaaactagtaagccttgtgatggtgaataatccgttgaatattgaacttttgccatcaaaaatataatgaagaattaagtcatggtatattgttgacaagtcttctgaaactttgtagattagctaagtgatagtgatgaccttgtacgagaatgactgaatgagattcatatgcctataattagacctagagagataaccgacaaaatcagtcaaagcatcatattttcatattgaattaattaacatccaaaacattttataactttaggcttcacataactctatgtttctcgttgttgtagcatttattttggaatttaatgaagcaccatattataattgtagctatttgtatttttgtcagcagaaaacttagtatttgaaattacaattgctactaaatgctaaaaaagaaagaaaaacaactctgtattttttgtgtgtaaatttcgaattttttgtttctaaagctgtgagttcttttttaaatgcataaaatatcatatatttattaaaaatgacgttatttaatattaaatatgaatgtgttacgttttgatcagttgttaatcaggtggcataaatcattttacaccgagtcatggacacagcattttttctcttgttctatctagctcatatccatgtgggttcacatgcacttgtatatgttaagagtatttattttattttattgttatcaaatgtgcccaagacaatgccacatagcttatctaccctgtcaaatccatataaaactattgaagcctttacaacttgtgattcattttcctaaagtcttaaattttaacctttgccagctcataatttattccttatattgtttagtgcaaagtttgtttgaagatggttgccgaatatcataataatcttttaattttatcgtatgtgacaatcataactataatttattaaaaaataaaagcttatataaataacatattctaaaaattatgcatgctaattagacatgagctggaaaatgaattaattgaggtaccatcaaatgttcggtcacgaaaaaaagataaacacataatccaaatagaaatttagttctatcagaatatgataaaactaattatattagtttattgcatcaacatataaataagatgcatacttatgtggacataaatagttatacatactcgtgatgtttgagattcataaattatactccagaagtttgtttgggaccgatagggatatagaacatggccaccgcatcaaggcagtattggacgcggtttctcctccagtgccaatgattatgccaacaatacaaagtgaataaatatttttgacaaccacaaaaaggagtagaagaaacaatatggcaaagtaaattgcctaattggtatttttttcatatgtctaagaaattactgatcaaaacacatacatcttttcgggccacgaatcaaattagagtccatttgcaacgttttaacttttaactcaaaatctggcctgactcttacgaaatctgcttatgttcgatcgattgagctaccaactcatgaatttatatttaacgatctctactaatttagttccttaatttaccttaaatttccatgttacattaattggtttacgttgtacaagttgaaattttcttgacattgttgttgttgttgttgtcagaattatttatctctttccatatcgtttttgtcttaccttgagttggacctttgttgtattcgtttataccgatccatttaaaagaaaaacaaagcaacataatcatcttggagtttacccaagaaaacaaaattcttggagtttgaaataggttaagattcaggcgtgtccaactacatattaaatttatttatgggccattttgtaatgttggccttttgttcttaaactgggccattttactgataatagaccaaagttggtgcaatggctcgagcttacccatttgtttttcgtatgaggacatcctattggattagattttttcccactgaccaaataataaatttatagtattttgttgtatataaatccaaattaatagagaatatttagtctcccagcgaatatcgaagtgataaaaatacacaaaatatcaaattattaaataaactttaccatatcgaaataatgacaaaggtgggattatatattgggaacacgtaccactatggtgacgtcatgggtaccgtaggtttgtgttggcaccaccaacaataacaacaaacaaacaatacaaaacccaccacttagtgctaactaaaacccgccaatcacattatacttaattacaaaagtaaaatacgatttgtttcttctggtttgataaaaactaaacagaactctctttttttttttaaattatgagattcgagttttgagacataagcgaagaagacaacattggctgatgaggtgtttttgtctaaggaaaaagaactttaggcgtgatcacactcgcttacacgtatttgtttttaactccaataatttgactaaaatgttgcaagattttttttgttttacatcaaattaaatgtgatatagaaattggacgatttattaaaagaattatatatatacacatttcatacacagtttcatcatctgctttttttcttcagtttaatggtttttttaattagtatgttatgtagaattgtagatattccgatggtccgtaaaacgacatacatgatctaaatgtcgataaatatcacttatgaccatatgtaaaaatatggattaaaaggttggatagatttataattaatagaaggaagatacgagaagaaatgtaggtccaaccacaaacatggttttgacatctctctcactctctatatataggttgttgtgtagcctctttagtcttggaaatacaacatattataagtatattaggtaacatatatgatcatatctctatatataaagtaggtatatatatatttagcgagagagggagagagatg

SEQ ID NO: 22066 - DNA, 3000 bp, Unknown; identical to SEQ ID NO: 1017
  misc_feature (1)..( 3000): 2750-1469P.txt file - cDNA_ID_2045322; gDNA_ID_1620348; Annot_ID_154227

SEQ ID NO: 22067 - DNA, 3003 bp, Unknown
  misc_feature (1)..( 3003): 2750-1469P.txt file - cDNA_ID_2045332; gDNA_ID_1620351; Annot_ID_154334
taggtgaaaattagatacgttactttttatatataaaaaatatttgatctctttttggttaaaagatatttttccgtattttgaagacttagattaaatgtttacagtaagtcaaatctcatattttttatagagatcaagtcagtaagacagtaactatgtgatgtaatgacattccctacatgcccccaataatactgcaatgttttctatccacataagttgtcctctgaaatttcatttaatatattgttttttttttggggtcaaacaatttgatttaatttcttcttcgttatttggtaaaattacaggtcgctattaatatccttctaataaaagccatatggatcacatgatgttatgatatattgaaacttatcataaatacatagatgagtgaatgaatgcttcaaacattgtcaattattttcttgtaaagttacaaaatgtccttttggctaagtttgatcttttgctttttcacatttgcttcctcatctccaccggatgatcctgtcaactgtgaattcggaaacacaatgtgcacggtgacgaactcgtacggcgcctttcctgaccgctctatatgcaaagcagcaaaggtggagtacccaaggacggaggctgagctggtctctatagtggctgcagccactagagccggccaaaaaatgcgggtcgtgactaggtactctcacagcttccccaagctggtttgtactgatggtaaagacgggactctcataagcaccaagtttctaaaccatgtggtgaccaccaacccggaggccaagactttgacggttgagagcggcgtgactctaaggcaactgatcgaagaagcagctaagtttgatctggctttgccatacgcaccgtattggtggggacttacggttggaggaatgatggggacaggtgctcacggaagttctttatggggtaaaggaagtgcggttcatgattacgtgaccgagataagattggtgagtcccggtttggcttctgatgggtatgtaaaggttcaggttcttagcgagactatagatccggaggaatttcgcgcagccaaagtttctctaggtgttcttggtgttatctctcaagtaactttcgaattgcaaccaatgttcaaaagatcgttaaattatgttatgagaaacgattcggatttcggagatcaagcagtgagttttggcgaaagacacgagtttgcggatttcttatggttaccgagccaaggaaaagtggtgtatcgcatggatggccgagttccgcttaatacttcgggagatggcttgttcgaatttttcccattccgttcacaactctctttagtgttagccatagatagatccttaggtaaatctttatttctcaagataattaataccaatatttttgatttgcatagctataatgtttcttatatatatacttttgcttcatgtcatgcagaggagagtgaagagtcacttgaagatgcaaacatgaagtgtgtgagggcaaagctagtatcgtcgtctatgtttttaatgtcatacggtgtgactaataacggtatttcttttacttgcttatacatttgttgattgtttcgatataagattatacaaaactttcactagtaatttccatggacaggcctaatattcacaggctatccggtcatcggaatgcaaaaccatatgatgtcgtcaggttcatgtctagacagtcgtcaagacggactaatcacggcttgtccatgggatccacggataaaaggccaattctttcaccaaacaacattcagtgtttctctcacaaatgtcaaaagtttcatcaacgacatcaaagcacttgtgaagatcgaaccgaaatctttatgcgtacttgaaggcagcaacggtattctcatccgctatgtcacatcctctctagcatttctcggaaaagaagaaaaagctttagattttgacctaacttactacagaagcaaaaatgatccattggcaccgcgtctatacgaggattacattgaagaaatcgagcaaatggcgatattcaaatacaatgcgttaccacattgggggaagaataggaacctagcgtttgatggtgccattagaaaatacaagaacgcaaacgcgtttttaaaagtaaaagagaaatttgattctttaggattgttttccactgaatggactgatcagattctaggtttaaaaggaaacgtgacgattgtgaaacaaggatgtgcattggagggactatgtatttgttcagaggattctcattgtgctcctaccaaaggttatttatgtagaccaggtaaagtttatagagaagctagagtttgtactcgtgtaagttcctaaatcctaatcaaagttttggtcctcagttctgttatatatcaaaaacctcattcctctctctgctttaagagaacagagcagtctctgttcataattgacaagcgaaaacgacgttgtattgaattcgtgacacgtgtcaaacaatgagtagttaatcaaagtgtcactcgcacgtgaagagagtagagtaggtgggtttagggtttaagtgttccagattcttccaaattcagttgatccaacggctcagacttaacctgaaacctttgaagacgcgatcctcgaacttcaccagtccgtttgcactatgcaaccaaacacactttgtatcgaataaattaaacaaaaatcataactttacaatcgcataaatcgactttcatcttcttcacaagaaaacctctctcagtcgctaaaacccttgaaccatctcttgatcgctagcttctaagtaagtgtatagttgaatcatttcgatcaaagtttaggtaaaaagttgtttgctttcagatacccttgttttgatttgtgtcgatgattacaaagttttactttgatttgtgtctttagggtttattagattcattcaagctataaagttttgattttgatctgtttttgcagagagtgaaaaaccatg

SEQ ID NO: 22068 - DNA, 3003 bp, Unknown
  misc_feature (1)..( 3003): 2750-1469P.txt file - cDNA_ID_2045336; gDNA_ID_1620351; Annot_ID_154333
ctatggatcaacataccgtccttaactgatttatttttcatttgctaatgtgaactggtgatgagctgagaaatttatggtacaaatgtttaaatcagttttagaatattttaggctttgtagccaaaggagaatgcagaacccttcttatttgttgtagccataaaaccccacataattggatagaggtctacaaaaggctctaatcgagttagatgaggtatcagaatatgttattatgtattaaccaatagaaaccagaataattaatagaggtctacaaaaggatcaaaattatcaaaaaaaaaaaaaaaaaaaatgttgtttaaggcttagatgaaatatttatggtaagtcaaattcatatcattttctaaagagaaaaccttaataatgtagctagctaggtccagtgtacacataagttgttccctgaattccttttaatgatttgatctcttttgtatttgtaaaattattttgagaatgtgatgttatataacatataccacataagatcaaattatttactttttcaacatgtacatataaaatgaagaggagcatgaggagtcatctggcgaagcaaacaagaagtgtgtgagagcaaagcgatcgactagcatcttttttgtttggaatctcatacggtgtgaccaataatggtatttcttgaatgtttccatgtaacatttttttcagttatatcactgtaacagtgtaattcctactgcaggcgttatattcacaggctatccggtaatcggaagccaagaccgtataatgtcgtctggtgcgtgtctagacagtcatcagaacggattgattacatcttgtccttgggatccacgcattaaaggcgagttcttttaccaaacagcattaagtgttcctctcacacatgtcaaagatttcatcaacgacattaaagcacttgtgaagattgaaccaaaatctctctgtggccttgaactcaactatggtgttctagtccgttatgtcacatcctctccggcttatctaaggaaagaagaaaaagctttagactttgacctaacttactacagaagcaaagatgatccttggacaccacgtctctacgaggattacatggaagagattgagcaaatggcgatattaaagtacaacgcgttgcctcattggggaaaaaataggaacctagcttttgatggtgccattaaaaagtacaagaacgcaaacacgtttttgaaagtcaaggagagattagatccgtgggggttgttttctacagaatggaccgatcagattctagggttaaaaggaaacgtgacgattgtgaagcaaggatgtgcaccggaagggctgtgtatttgttcggatgattctcattgtgctccgaacaaaggttatatgtgtcgaccaggtaaagtttacaaagaagctagggtttgtactcttgtaaccgcttaagatttatgagtgattctaaactgatgaaataaaaatcctacgaaattaattggtgccaatagcttcacgatgctactgcatcaaatacgattgatctaatttgaagtatatatacctaataataatttgtaacatgcagatatttttctccattaatattttaaaatctaatttaattggccaaatacgtgtttttgaaaacttatcgtagcaatattgaatttgaattattgatactactataagccatacaaactaggcaaagtaccaatcaacaataagatagaaaatagggggcggtcttcaatttttttttgttttaggcgtaattcaaattacttcatgtagacaacttagtcatgatgtctcaatgtctaatcatgccaccgggaactaggtaacctgcgaaaaaatcacaaacatatgaaatgtataatctataagataccacaacctaataactttaaacttatatactaatgaaatgaatgtattaaatttgcaaaccaaattacattgaccgaaaaaaaaaacaagagaattgggacttacttccgcattgtgagccaggagcaagtggacggccacaagcagccgcgacattgactagcttttgcatatcaatggcggcttcgatttccttattgatgacttcgcatacacattccatcccgatgattcggacaagagtgcaacaaccttgggatggtcttggcggagttggcagctccttgtcgatagaatctggacatcccctcagaacttcgatgcctgaatcattacatctctccccctgaatttgagatgatgacaacaacatcattacgactaaaaactgacaaaatatctgttctttcatttttctttatttttattcttctattgtcttctttcttttacgcattatatgtataaaagattgtacggtatattaagtacagaattgagaacacgatcacattttgcttattatggcagtagatcaatctagaatcctttgatataacatagtaagtagtaacaatattgactatatatatactgtatcagtatgagtgaaaattagataacgttattctttttttggtcaacaacaatataggtgaaaattagatacgttactttttatatataaaaaatatttgatctctttttggttaaaagatatttttccgtattttgaagacttagattaaatgtttacagtaagtcaaatctcatattttttatagagatcaagtcagtaagacagtaactatgtgatgtaatgacattccctacatgcccccaataatactgcaatgttttctatccacataagttgtcctctgaaatttcatttaatatattgttttttttttggggtcaaacaatttgatttaatttcttcttcgttatttggtaaaattacaggtcgctattaatatccttctaataaaagccatatggatcacatgatgttatgatatattgaaacttatcataaatacatagatgagtgaatgaatgcttcaaacattgtcaattattttcttgtaaagttacaaaatg

SEQ ID NO: 22069 - DNA, 3003 bp, Unknown
  misc_feature (1)..( 3003): 2750-1469P.txt file - cDNA_ID_2045344; gDNA_ID_1620351; Annot_ID_154331
gatcaaagactttaaatttggatgtttctctcaaattcaaaatgtccattaatttaattgttttttttaggttgatatttggactaatctgatcaattcttgcttgccgccctgaaacgaaacattctatgcactcaacaagtcaacatgacgtcaattggttgaaacataatattatctttatctaggaaattctaagcttttgttcattattttcagtattattactattataacattgaccgttgacaatgcaagctgtaattctttctaaaagactcaatgttttatcataactcataatattataactttgttctcatagctaagtttagtagagttcaccgcctcaccggctaaggaaggggtcgaacaaatgagattgacagattgttaataattgaaaatatttgaaatgttttcttgatacatattctttggctggtattatgcaaaatccacggaaaatcttcatctttttaatccttaatatacgagaaaataaaccgtaagatgcaagttaagtttttcttcttacccggcaagaatgtcctttcttggtctacaattaacaaatctaaaatgatataattttttaaaagtaattggatatatacatcttttgtttattttctaattctagttttttttatatatcatggtatttttaaaataaacttatagctgaatttctttttatgctcaatcagtttatacatatatggatgggtatttggtcctctctttttttttggacaaagatttttagtcctaagtggcgttccgtgattcaaatgtaaagacatagtttcttttaccaaaagagtgtaagacagatattgtttagcaatatcttaaggagacttcttagtgagggaaaaaaatagaaaggataaaagaacaagtgggtgtggaatgatctatagcaacaactttacatcaacgaatcagagaaccttttttacttctctaacgtctaacctaaagaatttagaaatttgctattagtcgggaagaaaacaaacaacaaattttaagcttatttaacccaaaaactgagaaaagaaaaaggagaagaaatttcaagcctaacacctggagaatgagataaaaagggatccaagaaacaaactagtgggtgttgaattatatctcttgttgaagcaactttctaccacttattattacccgcacacgtttgatttattgtattcacacacattttaatttcgtgcatttgaatgagtaaacttaaatacaataatattactatatctgaataaaaaagaacctcctaacttcagcttcacttgttcaaaatattcaatcatattgtcttctttttttgacagcacatacaatcatactaacaataacatacaaaaattaagaaatactaaagagtaaatgtgcgtgatgactgatgacataaggaatacataaataagtcggactttaagtggaacattaatcttgaagattcttctgcgttttgtaatgttaggtatggtttttataggatatttacatataattatatccaagttgatgctcattgatccactaattttccgattctacggggtaatatatttttttttttgatgaacattgtttgtataaatcattataaccatacatacatgactaagatgaataaacattcataaatacgacaaataattataaaatttattatgacaaaaaatttcttataaaattttcaaaatatatatttttcctcacgtataagatttatacaataactaggtttccaaacttacatatttacaaaaataataattaatatacctctacttagagaaagaggaataattaaaaaaaaatttggaaagcctaatgcataaaaagtcttgctttaataatggattggatcctttttattctttgtttaaggaaaaataggttcgtcgacagctctacttgtgagtaatgactaatgagcacatccgtttttggagaaattagccgatataaaatattgagccactttctgagattatgcactaacatagtatcgattaaaatgaaatgtgaatgacgccaataatgagagaaatgtgaacacacaattttatcgataacaaaaaacaaacagaaaaagagcaataagaaagaattgagaaaggcaaaggcgcacgcttagacaaaaagaaagcaatcgagaaaaaggaaaaataaaaatagaaataacaagaaaaataaagagacttgtggtctgaaaatgcgtttcatacatgcgcactattaagcagaaaacaccaaaaaaacaaatcccaaaaatgaaaataaaaacaactttttttgggtagagagaatggttcttggtttaatttggatttgaattttgcatggttcaatatttcaattattaagttaatcaaattatattaaattttttttttatatacaataaccattcgactaccaaaatgaattgaccaatcgaaagggattagaattcggtttaaagcaatcggaaactaaaccagagagaattgtaacaagaccggaccggaccaaaacaaaacagaccagagtggactgatgtcttaatcgtttttgttctttattttctctgagaaagagtctctgttctgatttgtcagtggaaaaagagaaagagaagtgggacccatctccgccatagccaaagacctctttctctcccacctcatacctctctactctctgcccatcattgcccccgacgaaactctctctctctcgctctctctctaaaaagagaaacaaacatttctttagtgtctctctctttcatcatctctttaccttttgcttcttcgaaaaaaaaagagaaataaattctaagaagagaaattgagagcttggtttttctttattggcatgaatttgtaacttaccagagataataaagttagggttcttttttttcgttcttataaatatagtaatctttctatttttaagtgtgtgtgtgagtgttgtttgggaataatg

SEQ ID NO: 22070 - DNA, 3000 bp, Unknown
  misc_feature (1)..( 3000): 2750-1469P.txt file - cDNA_ID_2045366; gDNA_ID_1620351; Annot_ID_154326
caatgattacgagcagagtaaatcgggtagctacagagaaaaaaaatcatataaatgtttgaatccccttctttgaaatcattaaagattttctatccaaaattctaataaaatcatcacagaaaaattatctttaaaaaaagatgtttgcaaattatccaaaaaatcttgatatattaattagagagattttacaaaacttgatgggaaatgtttcttaaatatttactaatacagtatttgtaggtgcatgatttttccctatttattataatggtaaacttattattacttctagcttaattagttcttatttcttaacaaatgtgcataaagtacattaaaatgcaaatatataaaatctatatataattatataaaagatctaaataaaaatattgcttgagttttgtcccttttttacaagatttacccgatcacacatagagttttcattaatactgttttaccaataaagatgtgaaactagctatataacaaaactagggtttcgacccattcagaggagcgttcttggcagtaacagatactgtatataacaaaaaggttagtacgaactttctctttgcactttattttttctaggtcatcgtaatatcaaggcgaaacctgatatatatgattacggttctttgctttttcttcttctgatatcaatgtctatgtcattttgaggttctcctaggttttctatgtcttccaaattccaatagaagaaccaaaggttgtttcaacatgagaaatatcagtgatttgcctaacgatttgctggtgaagattttgtcattaattccgataaaagttgctgcgtctacaagtcttttgtccaaacgatggggttctgtttggaaattgattccgacgcttgactatgacggtacatatagtgctgcagctttagagtttttcggaaagtttcacacccttgtggctttacgctttatgaaattgaccattgaggatgttcattcgacaacttgtttccggtccgtcaagaatttatctcttctagatgtaaagttctcaagcgataaaaccgttgagaggcttttgtcttgtttccctattcttgaaacattggttgtgcaccgatggggcgctgacaatgtgaagactttcgcaatttgtgtgccatcgttgcagagcttaaacatccgctacacagtagggggttatcacaatccaaaaactgatcatggatttgtgatcaatgctccttctttaaagcatttagatattgttgatcattttagtgggttttgctcattagtgaatatgcccgagcaattggatgcagaaatccaccttagacatattgattctgagaagcttctggaaagtcttacctcgtctaaaaaactttccttgtgtttaaaaccacaaacggtaaagtctctatgtttctcgtgtttaagattcttttgcgtttattatatttagtttcggctgatgatgctgtcacttttgcagggttcatatccgggaggagactttgaccagctcgtgtgtctagagctatgtgttatgtgctccttagattggttgaatcttatcctcagacgttcacctaaactccgatctctcaaactctaccaatcagtaagttttgatccaaaactagatgatgttgttgcatcttcagtatattaaattgcaactctttgtcatgaactgtttgatctcagagagagagaaactggagctgcaggaattccaaacatgtccgtactaaatgggagcaacccaattctgttcctgaatgcttacttgtgagtctcgaaactgttaagtggattttgtacaaagggacacaagaagagaaggatgtggtgaagtatttgttaaagaatggaaacttcataaagactatgagtattcgattctcatcagtagtcacgttggaagagagaatccacataccaatggagtttgagttcatgggaaggattaattccagcagatgtcagctttcattctcaaagctataagattgtaatgttttgattttatttgaacatgttttttccctcttttaagtttccagtcttgtttcttctgttttgtctcaaagcttatagttttacccaaattattgacattgagagccaagatttgagtagcataagtagttactgtttgataaaaaaattatattcgtttcttctcatattaaattgccaatcttatgataacttctcttctctcttaaagttttttttacattggatgtgatctaagggtaaatagtggtgtttttgttattaaataagggtaaatgtgaatcaatctatttcataacaaaaatcaaactgatttattatttcaataaccaaattaaaccaaaaataccaaaattttaattacaatgtataataaatgatttattcctaaattctaacaactctacatttttaaaatctagtaatcttgctctctctctctctctttttttgttggataaattttggtttgatttcttgcttcaaaaatattgttccaaaatcaaaccggcttttagttgaaccgaaaccaaacataattaaacacctctgcataaccgaattctctttacttcttcgctcacaacttcacagagagagagatatagcgaaaacctacaaatttcgtcacggaagcaacaatttggctataaaaatcgtaagtttcttctaatttcttcatgggtttttcaatcaatctttttattcgccaaaaatttcccctattctatgaattcttaacgtctagctaggtaaattgattaaaacccaaaagcgaacggaaccagtttctttgtgattctaagtctaatctgttctaaaatcgttcctttctctgttcttgaacttgtatacgctgtatcacatggctaatttttgtgggtttcttcttcctgcagatccaatgtttgcttatggttattttcatttattttgcaggaatcagaaccatttgtgaaagaattgtgtaacctaaatg

SEQ ID NO: 22071 - DNA, 3000 bp, Unknown; identical to SEQ ID NO: 1063
  misc_feature (1)..( 3000): 2750-1469P.txt file - cDNA_ID_2045428; gDNA_ID_1620354; Annot_ID_154430

SEQ ID NO: 22072 - DNA, 3000 bp, Unknown; identical to SEQ ID NO: 1062
  misc_feature (1)..( 3000): 2750-1469P.txt file - cDNA_ID_2045461; gDNA_ID_1620354; Annot_ID_154422

SEQ ID NO: 22073 - DNA, 3003 bp, Unknown
  misc_feature (1)..( 3003): 2750-1469P.txt file - cDNA_ID_2045517; gDNA_ID_1620354; Annot_ID_154406
ctatcgagacgacaccgaagaatcaaaacgagaaaaagaatcaaagagataccaaaaaccaacaacatggaggttcttcagctccatcgaaacgacctaaaccttccaatttcctcgatgcggttcgttcgttatctctctctttctatcgagtacatttgattgaagtttatggagattttgatcaattcatacgaaaaatcgcagcttagagagagattatctggtgggcaatttaggatgctcaatgagaaactctacacttgctcgtaagttctaatttcattctttccgatgatcttccttcagttttcacagtgcttaattcaaaaatctctgctttctcagtggaaaagaagctttagactactttaaagaagatccacaaatgtttgatatggtaaacatacattaactcgagaacaagaacttatgttgttgattcttttagttgaattgtaaaattgattctgttttgttattagtatcatacagggtatcaacaacaaatgtcaaattggcctgagcttcctgttaactccattattaattggctattgtctaatagctcttctttagttgtggctgattttggctgtggtgagaatttcttatcctgtattgctatatcttactttttgcctgctgaaattgtatcactctatcgacactaatattgtctcaggtgatgcaaggattgctaaaagtgtgaagaacaaagttttctcctttgatcttgtctcaaagaacccctctgttattgcctgcgatatgtcaaatgtacgttgaatctttactccattcatgttaatttcatgatttctttgttccctcagacttaactggtatttttggggtttactttgtagacttcacttgagtcttcatcagtggatgttgcagttttctgtctttcattaatgggaacaaactattctagttatatcaaagaagcacatcgagttcttcgtccaaggtacagctttgtttacttgccaatctcttcttgttcatgggattttgtcatgattctgaataatacttcctatggttttattgtattccacagtggtatgcttcttatagcggaagtaaagagcaggtttgatccaaacaatggaggagcagacccaaaagactttgtgaaagccgtttgtgatcttggatttacttcggttttaaaggtgcaatcttttcttcttctttttttcatttccactataagaaagaaactcatttggttctttgagcaggacttctccaataagatgttcatcttattccatttcaagaaaaaggttagtgaaacatacttcctttcaggtttgttattagtctcgtagcttagatctacactttgtttagcaataatccttcttttaatcgtgtggttatataggagcagatgaattcaaatcagaagataataaagtggcctgagttaaaagcttgtttatacaaacgtcgatgatgagtttacaatggaagattactcagaatactatttttgttctccactgttgtatcatttaggcacattgattgtcctcaaaatctcataaatttgcaccctataaacttttgtaagagaaaagcaatcacaaagatttttcaagtgtttagatacagattttcagatttttgtcaacatagtgttcaggtaaagtgagatttaggccgtgaatcatgaatggtgtggtgacgcattcccctaccctctgcaactgcattttttaagttttaactagtcattcaagtttctaccaaaatttaagttcaaagtgtaaagtaattataacaagtatagcctaattcgaattacaaagatcacaacacaccctcatttgtaaccatgaatcccttacggctttacctttcactattctaaaagatcgctcgtaatcatcttgttgttacacaatacaacattcagtctctcactttctattctggcctctgggaaaccaaaaccacattgattgaaaatctctaaacttttgcaaaacacttctttcatttatggagagatgcataagcaaaaaaatcccttacctctacaaagttagaccaaatgttaagttagaccaaatgtttttcttgttttgttacagatgatatgatctcacttcacttataaaagtacaaaaaggactgatcttgtagtaaaaaggttcacctttctcaccccaccgacattattaatttcttttgtttttgttttctggtccacgatctttaaattcatgcacatttttttgtccttttgtcaattaataaaaacagtgttgttcgttaaagattgataaaagattttgtttccttcttcctactatcgtcttgtttattaaaaaaaaaaagacaaatatttttgtttcactgctcctatcttcacattccaggagacttcctttcaaaattttcttaattataattattcacaagtttgactttttctgttcaaatttggtttaagtcggaattgtaaatcgatttacagttctataaattttgccgaccaaaaaaggcaaaacaaaacagagaaagagaaggataaagagacatgagatttcctgtcactttacttacgcggacatagcaaacatctttttgatcattcagagttttttttgtcctattaccacttcaaatccaaaaacaaaagtttataaatttatttccctcaaagtaccacttaatcatcgactttttgaccatttctccatctgggttttattatcttcagttctttgtgtcacaactccagtttctttttgtattttgttgtttttttcacaaattgagattgttgtttcctataaggttttgttttattctatttatggaagtctcttgatttcgcttttataacctcaaaaagcatctttcttgatagcaccaagtatgatttgatcatcaaaagggtttggatttgacaggtctctattttaggtttgtttttggttagaagttaaaaccaaaataaaatcttaacttttggaaatg

SEQ ID NO: 22074 - DNA, 3003 bp, Unknown
  misc_feature (1)..( 3003): 2750-1469P.txt file - cDNA_ID_2045549; gDNA_ID_1620356; Annot_ID_154513
aattaatttttaaaatccttgtaaatatttatttgcggcaaatagatttacaagggattttaaaagggttttaaaagatttacaagagattttaaaaaggtttaaaaagatttataaaagcttttaaaagagttaacttaaaatctattttggcgggaaatatttttttgaaattttttgccgggaaatttttggcgggaaatttattttggaatattttatgcaaaaaaatattaatatttcattttgttaacttaaaacaatttccaaataagggtaaaatggtcattaaaaatttaaagagcgtaaaaataaaaatggataaaacaaaagggtagagttgaaaaggggcatcatgaaaagggcattagaaagaatttttcttattggttaaaacatatactctaaaccgtttattatactttttatcattcaaacatttgtactgtaccacttatttttcattgactacacatatttctcatactgcgttttttcttaacaaatcgcactatactactaaatccatttgatctgcattgccaaatccattcctcccattggaagtctatatttacaataaagatacacgataaatgagaccaccattaatggttctacatccatacgtgctcactaatcactttgtgtgtgctctatttcctgaatttgttacgtgtgattagactaccggaaggaacagaagattgcattagtcgaaagaattttgctcttcttattttatcgcttagtagcatgtttcactttgtggatatcaaacttctgacttttattgaagctagctaccactactttcaataaactggttaatctcaattaaacaattattggtgacggttgcagtttcttggaagctgccactctcaataaactaatagaaattgttgtcttgacttttaattttttgatacagtaccattaaaacttaagaaacttaaaaaagactcacatataccaagaatccgaatccaacccgaacccaaaaatattttgggtatttttggttattttttcatttttactaaaataaccgaaccgacccgaacccgaaccgaaaccgaaccgaatttttagaatacccgaatggttctcaacctcctacccgaatagacccgatacccgaaaaaaaagaaccgaacccgaatgggtacccgaatgcccacgcctaactcaaactaacaaaagcaccaatcgctcatttccaaaacccattaaaacaagtgtagtatcacaagtcaatgaaatgtctaagttgaataagcaaagagaccaaaactcatttataactcagttagtctaaacttgaaaccagtaattgttaccttaatatcacaaaacctgtttctagtccagtatttgaagcttgcaacttctcagaaagcaaccatgtcaatccctgcaacaaaagaaagatggaaccgattcaagtcttagtgttttgcaaagggtttcatttcttaaacccaataaataaacacttctttcgtcaagaacaagctaaccaaactataaatcagaaagtacaaaaaccttctagcaacaattcaaaattcaaagacctcaattcaaaattcgaagagaagagcacaaagtaaaccaaattcttagaaccacttcaattttagctaagctaacggaaacccagaaacataaggatcgaaatacaagagaagagtccagagaagataacagaaacccagaaacataaggatcgaaatagaagagaaagtccagagaagaaaacaaacctaaagacgtcgataaacagtgaagcttgatgaacagaggagcttgacgaacagaggaagctagatgaacagaggaaggtgttgaacagaggaagctcgtcgggcaaatcgccgagagatcggagaaggagaacaaagtcgagagaagaagctgcgtcaaacgcaagtgttttagggttatgtttttttgtgattttcaaaaatattcaggacattctgatcattttctatgtcgatcgcaatttaacgctgaattaaaatagcgtcaacaccctaagtatatttcttttttttctgaccaacaaagtcttctgatctattttactgatttcaacatcaaaaaattatttgaaaacactccgcccccacccacccaattctacctttaccggagtatttttaacgtacggttgaaaaagaaaagaaacaaaaaaacccggcccatctgtatacactcaatagacccatgattcttacaaccttcaacaaaatctaagcccaattcacggcccatctcaaagcttccgctttcatctttcacaacttcgatcatctctctcagagaacacatccgatgcttctccgatcgccattcacagagccaattgcagagaacaaggatccacgtttgatgtgtttcttctgattcacgacaacaaagatctgattctcaattgagttttgaaatcaagctctcatcactctaccacatcggctcgagccttcaccattgtctcttacactaagagcttattcttcgttcaccatttctctattactgttgtctctcatagtagaagctgagcaaaatttggatctctttcgatcccgatctcttctacaaaactccgccatttttgtagtacctctctcgtgatctgcagcaaggtacactgaacttgtctcgatccacttcctcttacgctttccgttttcaaaatctccctctagaactgtgattagctcttaagttttcgtggtttttgctattcctctaatgaacttagttagatctgaatttgtgttacttaagtttagttttagtcactgaaaattctgaaccatggatgttacatagatcgtataagttactgtatatatccgaatttggtgaaatgaaaaagtaagaggaatctctaatctgaatcctgttattgaaaaagctttgactatttgcagcttgcatgcttggagtgtgttcttgtgattgagccaagaagttggggcgagtatg

SEQ ID NO: 22075 - DNA, 3000 bp, Unknown; identical to SEQ ID NO: 1085
  misc_feature (1)..( 3000): 2750-1469P.txt file - cDNA_ID_2045603; gDNA_ID_1620356; Annot_ID_154497

SEQ ID NO: 22076 - DNA, 3003 bp, Unknown
  misc_feature (1)..( 3003): 2750-1469P.txt file - cDNA_ID_2045650; gDNA_ID_1620366; Annot_ID_154851
ttgtctttggtagcaaatcccagtcacttggaagcagtagatcctgttgtgataggtaaaaccagagcgaaacaatattacacgaaagacgagaacagaacaaagaacatgggtattttgatccatggggatggtagctttgccggacaaggagtggtgtatgaaactctccatcttagtgcacttcctaactactgtaccggtggaacagtgcacattgtggtgaataatcaagtggctttcacaaccgatcccagggaaggaaggtcttcacagtattgcactgatgttgcaaaggctttgagcgccccaattttccatgtcaatgcagatgacattgaagcagtagtgcatgcttgtgagcttgctgctgagtggcgccagacgttccattctgatgttgttgttgatttagtatgctaccgtcgctttgggcataacgagatagacgaaccgtcattcacacaaccaaaaatgtacaaggtctggctattatatcatccatctctgtgaaataatctaataaccaattcaagtttccatttcatacttttcttgtactttttttttgtttaaaaacggatgttacttgttggtgataggtgatacgcagtcatccctcgtcacttcaaatctaccaggagaagctcttgcaatctggacaggtaacccaagaagatattgataagattcaaaagaaagtaagctctatcctcaatgaagaatatgaggcaagtaaagattatattccacaaaaacgtgactggctggcaagtcactggactggattcaagtctccggagcagatttctaggattcgaaacaccgggtaaaaaacatttttatttcatttagtttgtcaatgccttttggccttttttcttttctttttcaatgtaacattttgctggaaaactattcccttgttcttttgcagagtgaagccagagattttgaagaatgtgggaaaggcaatctcaaccttccctgagaactttaagccacacagaggagttaaaagagtttatgaacaacgtgctcaaatgattgaatcgggagaaggcattgactggggacttggagaagcacttgcttttgctacactggttgtggaagggaaccatgttcggctaagtggtcaagatgttgaaagaggaactttcagtcatagacactcagtgcttcatgatcaagaaaccggggaggaatattgtcccctcgatcacctaatcaaaaaccaagaccctgaaatgttcactgtcagcaacaggtatgcatttttttttaatctctagagatgataaccactcttcaattgtttttacatgatctttacgttgtttgtgtatgcagctccctttcagaatttggtgttctcggtttcgaactgggttattcgatggaaaatcccaattctctggtgatatgggaagctcagtttggagactttgctaatggcgcacaagttatgtttgatcagttcataagcagtggggaagccaaatggctccgtcaaactggtctagtagttttacttcctcatggatatgatggtcagggtcctgaacattccagtggaagattggaacgtttccttcaggtatattatatgaccgatacttaccgttaagattctctccactttttgtatttgtttccctctcatttgaaaattttaactgcagatgagtgatgacaatccttacgttatccctgagatggacccaactcttcgaaagcagattcaagaatgtaattggcaagttgttaatgttactacacctgccaactatttccatgttctgcgtcggcaggtaaaatatctatttatcccaagttcgtaaaatgttgttacttaattttcgtattcttcacactcacatgcttgatatcatccatttgcagatacacagggactttcgcaagcctcttatagtgatggcccccaaaaacttgcttcgtcacaaacagtgtgtatctaatctctcggaattcgatgatgttaaaggacatcctggatttgacaagcaaggaactcgatttaaacggttgatcaaagatcaaagtggccactctgatcttgaagaaggtatcagacgtctagtcctctgctctgggaaggtataaaaaaaaagatccactttttccgtcattaactaacaaagttcccacattctgaaatttaatactttaaatgtcaatgaatcaggtctactatgagcttgacgaagagcgaaagaagtctgaaacaaaggatgtagccatttgcagagtagagcagctttgcccatttccatatgatctcatccaaagagaactaaagcgatatccaagtaggcgtcgaaaactcaagtttgtgttcaatagttttggttgattatggaattctttgaaacttttgttcttgtgtttaacagatgcagagatcgtgtggtgtcaagaagagccgatgaacatgggaggataccaatacatagccctaaggctttgcaccgcgatgaaagcactgcaaagaggaaacttcaacgacatcaaatacgttggtcgtcttccctcagctgctacagccacaggattttaccagcttcatgttaaggagcagactgatcttgtgaagaaagctcttcaacctgaccccatcacccccgtcatcccttaaaaaaacacagcttgagaggcttgagcctgtataaaaaagacacaacacaaaaataaaagattcatgagagaatctttggttaccaaagagtgtcactggaaaataaacagatgtttgctagacttacaaatttaagtttattcgatttgtttggtttgttataggatttaatcgagataaaaggaaaaaagatttaaaccgtttggtttagtatgataattcattaatttggttcaactttggattgattttggttcggtttggttttatcagtgactgtatcagcttgaggcagttgcaatcttgtaactggagagaaaaagctatcaaagttaaaagttatg

SEQ ID NO: 22077 - DNA, 3003 bp, Unknown
  misc_feature (1)..( 3003): 2750-1469P.txt file - cDNA_ID_2045654; gDNA_ID_1620366; Annot_ID_154850
ctaaaatttgcaaccccaaaaaaattcaccttagttagttttttgcttagtaaatttgtttaaattatagcattcaaatacttttgaggtcttaaacatagagtcatagattggttaagccaccgacagtactattacagctggagagaaaggatgtatccatggagaaaaaggcaaacaatagcattcaaatactctttttcaaaattactaagtaaaagagttattgcttgaaactccacattgattgtgattgatagatcagctttggggaattgagtggccacaaaagaaaaaaacaaggtacattcacatctcttatttgaaagctacatgagtcttatcttaaacgtacagaagaaaaatagtaaaaaggaacttttgtcctcacttactactactactcattactgtactaactcttctctttgtatcacgtttcattacaacattcagatatcagctaattaggatgatggtttgtctaactctatttgttgctggttttgactgcaactgggtctgaacaataagggcagttcccaaacagaacatcaaatgacctgcaagaaattggatcataattgagctttagagcacaaggattgtgtgtgtttggatatgagagcgtgagagattaaggtttccacttactgtcttgttgttgtgatagaccttaaccagtctgtgaggcagaggctatggaaagacttgttgcaactgatgttttcacatgtgtaatctgttcgtgtcccacttctagctccgagctcctcatcttagattaaagtaaatgagaagttagcgaaccatcaaagcaaattactattctgaagcattgctttttcggtttaagaaatcaccggtgggtagaaactgcgcatagcaaatcccacattcaacttgttgttgatcgtcttccacttggagacctagaggctttggaagctcagtacctagaatacattcaaggttctcaggaaatgatctttcatttgacctgtatgattatcattaacccgtcattcctgctttcaacaatccatataactccatgctatataaccaacctctcgaaagagatttaaaatgggagagtagagacaaaataattttaccatcttttgcaatttcttctccataacatatgcaagttgttcatatgcgtagctgaaggcacaggaccaataaaccgggacctgtctaagcacttataactattaaaaaatgtcgacaagtaggttattgagagtgtgtgtttgtctagaaacatactctggtagggatttagggtctttgaagtcgatatgaacaatgatgatacaatcattccctgagaaaaaaatgaaccaagtagagatagataaaagtgaatttcgtcaagacagaaataaaagagtatggagacaaatggaattgaggtaaaggtattaaaccagcatcaatccggcgaatagcagaggcacgagctggttgcttgacatcaacaacacatagagatttatcgatattgtccaagacagaccaaaattcttgaagatagtccaaatgctgttaacaacaaaaacaagctgattagtgattacaaagagagaatgtagcaaagtcttagatctaccttttggaattggtgcattacatccttcaatcttgaacttgttgaccattctagtgtaaacatatatggcacatcctacatcgaagcaaaagttaattcgctacggagaatgaaaaaagcttaaggatttgacattaacaaaccgcagaaacagaaggtggtgaattaggatagtctctgttcagttgaatttctaagttgtgagctcttcccttcttatctctgtacataatcatgatgatggcacaaagctaacatgtcacatgaagatggagctacataggttgcaaagtactaatcacattaagtaagattttgaagacaaccctaaaattatggaacttacagaatgtgaaagctaaaaaacgttaaatctccacctaatctccttattggttcccatccaatttcttctatctaagaaaccaatacaacaatggttcgttgaatatgtgagagcactcgatttcagaagaagggaagggatcgatggttaaccaaacctccgagtaaactttccggtaaaacgaagaagacttggctaattcctcgcatctttcacggcctacacattctccagaaacattcatcatctacgcagatcatcttcaacctctgaaactttctgcatctcgagtaatccgagtgctatgttttgggccgataagcccaatatttgatgaatcttattatggcgcagttaataattaggaacaagtatttgagtgaggacttcgagtgttacgttgggcctaaaagcccaatatttaatgaatcttattgaggcccagtttatataagtattaaaataacaggtatatagttatccttgtagccaaacatggatttttcaaggcggtgcactttcttacttttctttccttctttctctgtctcctagaagccacttcactgggatcgtctccatctttgatccaggttcgtcttcttcgtgaatcttcctgcttaattttttttttcagttactacttttttttggttattgttaattttctctgatggaaattctccgaaattgaaagttgttaaagccaaaatatttgggaattcaaaaacatttcgatgatctgaatgaggtcagatcgctgagaaaatatgggattataggttattttcgttttaaattttctatgttttgtatgtttgcatgatatatatatatatatatatatatatatatatatatataactaagtcgttacttgattagccatttttgacttatctactttctttttatgttgttgagtattttattgtgttgtttaatggatcattttcaggttcagagattaaacaatttgaaaaatcggagactctgggattgtatggttcgttgttactgatagattacttaagctatg

SEQ ID NO: 22078 - DNA, 3000 bp, Unknown; identical to SEQ ID NO: 4036
  misc_feature (1)..( 3000): 2750-1469P.txt file - cDNA_ID_2045654; gDNA_ID_1620680; Annot_ID_164404

SEQ ID NO: 22079 - DNA, 3000 bp, Unknown; identical to SEQ ID NO: 1164
  misc_feature (1)..( 3000): 2750-1469P.txt file - cDNA_ID_2045658; gDNA_ID_1620366; Annot_ID_154848

SEQ ID NO: 22080 - DNA, 3003 bp, Unknown
  misc_feature (1)..( 3003): 2750-1469P.txt file - cDNA_ID_2045658; gDNA_ID_1620680; Annot_ID_164405
ttagccgaacatggttcccttccacaaccagtgtagcaaaagcaagtgcttctccaagtccccagtcaatgccttctcccgattcaatcatttgagcacgttgttcataaactcttttaactcctctgtgtggcttaaagttctcagggaaggttgagattgcctttcccacattcttcaaaatctctggcttcactctgcaaaagaacaagggaatagttttccagcaaaatgttacattgaaaaagaaaagaaaaaaggccaaaaggcattgacaaactaaatgaaataaaaatgttttttacccggtgtttcgaatcctagaaatctgctccggagacttgaatccagtccagtgacttgccagccagtcacgtttttgtggaatataatctttacttgcctcatattcttcattgaggatagagcttactttcttttgaatcttatcaatatcttcttgggttacctgtccagattgcaagagcttctcctggtagatttgaagtgacgagggatgactgcgtatcacctatcaccaacaagtaacatccgtttttaaacaaaaaaaaagtacaagaaaagtatgaaatggaaacttgaattggttattagattatttcacagagatggatgatataatagccagaccttgtacatttttggttgtgtgaatgacggttcgtctatctcgttatgcccaaagcgacggtagcatactaaatcaacaacaacatcagaatggaacgtctggcgccactcagcagcaagctcacaagcatgcactactgcttcaatgtcatctgcattgacatggaaaattggggcgctcaaagcctttgcaacatcagtgcaatactgtgaagaccttccttccctgggatcggttgtgaaagccacttgattattcaccacaatgtgcactgttccaccggtacagtagttaggaagtgcactaagatggagagtttcatacaccactccttgtccggcaaagctaccatccccatggatcaaaatacccatgttctttgttctgttctcgtctttcgtgtaatattgtttcgctctggttttacctatcacaacaggatctactgcttccaagtgactgggatttgctaccaaagacaagtggagatgtttgcctcctctagttggacgatcataagatgtacccaagtggtatttcacatcacctgttccggtgtaaagcccaacttcatctactggcctagtaccaccgctaaactcgctgaatatttggcgtagaggttttctaacaacattacccaaaacattaagtcgacccctatggggcataccgataactatgttctctaccccgagatctgcagacctatcgaacatctccttcatgccaggaatcaaagattcagcaccttccagtccaaaccttttagccgtggtccacttagtagccaagaaattctcaaactgtgtgctccaggtaagcctatcataaataaccatccgacgctcactattgtactgtcgaggagttggggtctcgatcttgtctctcaaccagttacatttatccctatcagcaatgtgcatgtactcataccctatagtcccacagtaagcttgctcaagcctcgacagtatcgacctcagtgtttgaaccgggcggttctcagagagaaaacccgacatcctccatacacccagaaagaattcccgatcaagatcagcctcagtaaacccataaagacctggcgtgagatcctctggaatctctctcttctctagacctaaaggatcaagcttggccttcatgtggccattaacctggtaagctctaactagcaacaacaaacgcatgctttcttgaatggtttgccccgagataccaggcgatgtagaagcctgacccacaaaattcctaaaaaagttatcccacgactcatcaacactgttgggatcagcctcccaagctctttgtaactcctctagatacacactgcttgttccatctaagaagctatcagttagcttagaaagtgggacaggacgtggaacaggtgcagcagactctgcctttgatttgagtattgtagagtgaaaacatctggtttgacaaggcaaaacccttgttctagtggcatatgaaccacaacgagactgagacagtgtccttcttatggcaagctttgccacagaagaaccgattctaaaccaaaccatagcttaagtaatctatcagtaacaacgaaccatacaatcccagagtctccgatttttcaaattgtttaatctctgaacctgaaaatgatccattaaacaacacaataaaatactcaacaacataaaaagaaagtagataagtcaaaaatggctaatcaagtaacgacttagttatatatatatatatatatatatatatatatatatatatcatgcaaacatacaaaacatagaaaatttaaaacgaaaataacctataatcccatattttctcagcgatctgacctcattcagatcatcgaaatgtttttgaattcccaaatattttggctttaacaactttcaatttcggagaatttccatcagagaaaattaacaataaccaaaaaaaagtagtaactgaaaaaaaaaattaagcaggaagattcacgaagaagacgaacctggatcaaagatggagacgatcccagtgaagtggcttctaggagacagagaaagaaggaaagaaaagtaagaaagtgcaccgccttgaaaaatccatgtttggctacaaggataactatatacctgttattttaatacttatataaactgggcctcaataagattcattaaatattgggcttttaggcccaacgtaacactcgaagtcctcactcaaatacttgttcctaattattaactgcgccataataagattcatcaaatattgggcttatcggcccaaaacatagcactcggattactcgagatgcagaaagtttcagaggttgaagatgatctgcgtagatg

SEQ ID NO: 22081 - DNA, 3003 bp, Unknown
  misc_feature (1)..( 3003): 2750-1469P.txt file - cDNA_ID_2045662; gDNA_ID_1620366; Annot_ID_154845
tctcatgttcaaagtgggtttcttctaatccaatttgaattttagttcttatattattcccctctaaccctaatcatatgtttctcaaacttttgatttttattcaagattcctcctaatcagttatttcttctttgtatgtagatgtagttgcaacttcagagcttttctcatctgtggtgtcgtagcgtgagagagacggatttgcagtcattgaaactctttggacattacaaagcccaataaagatggacaaatgacaagcccatttttaaattttgtctgactctcgcctatcctacatgaattctacagagacaatgcatcatcccattcggctaggtcaattttcatccctatcttgtttataatctataatcttatagataggttacttacaaaaaaggtctttaatactacttttgatttttcaaaacataatatatttctcaaagtttttgatttttaaaggtttttaactctctttatttttctatttttttcttctataaatattaaattaatatgacgttgtgaaatctaaccggattttggatcctgccatgtaaccatggtcattagcgattccacaaatccaacatgttttttcacatcttcatgtatatttagcattttttttttttttttttttttttaaaaagttttcaactcttttgttttttttaaaggttctataaatactaaattcatatgagattcaatatttagaatataaatactaaactaatacatgtggatacccaatacaaatataaacctaacagtattagttatatactaaactaatatatatatatatatttgtaatacctcaagaacctaaaattaaaataataaatccgaatatacagcggcggatccacgttatgggtgatgggggcaactgccaccagtaaaatataaataatttacgttttttaataatacagagtaagtaaagtaacagaatggtatgaaatgctcccactaaaagcaagaagtatcgggttcaaacccatttaaagacattttgcccccattaaatatttctgctgagtccgcccctgcgaatatactagattttgttttttagtaattcatataaattggatatatttgggataaaagtagccaatgttatagttttcttttaggtaatttgagtattttggttatatttgggtaaagagtagtaaccaatgtatttttgggtaatcggatatttcgattagatttagtatatatggtactctttccgtttcacaatataagttgttttagctaaaagcacgcagattaagaatatttatttttaaaaagtttaaccaatcataaaagacactgcataatagaaataattataaaacattaaaataatatataatagaaatttgaaaacaacttatattgtgaaacaaaaaatttggtccaaaataacttatattatgaaacggaagaagtatattatattctctcatccattttaaaaataaaatttgaggattttaaacaaacttgttccccctttttatggagtacttcttataatagtggctaattataagagtctaaaaacgaatttttatatgaatttagaaaaattaggatggggtttttgggaaagataaaatgttgcctataacagtacatatttaatcagacagaagtgtcttcacggcgacgaagagtgtcttccggcaattgcatactccaacgcaaacaaaaaatgaaaataaagcaaatgtcattcccgttaaataatacgtgaatgtcattcccgttgaatgctaattaaagtagagaagcctcaaaatccgatgagtcatacgtgaatgtggttctagtgtctccccaaatggcttccttccatttaattccgaagttaacttttacacttgccatcaaactttagtaatgaagaaaacattgatacaacaaaactgcgagtgtaaaaagtctcatttcactgttaaattattaattttaagagtagacattaactgcgcctaactgatgactaaagaagagttgatcaaacaaagtctacacattacctaacattctctgttctaactaaatacatccatttaagagacacttaccaacctcctactcaaagctactctaactgttgttcaattaaccatcaacataactgcaggagtaattgattaaacaacaatgaactctgacttcatcaaaaacatcgaaagactctgaagtcaagcatgttgtttttatatgtcaaccgcaaacctatgcattaaacaaccaatagaagccaaaaaaacgtacagaatctaggagaatgcaactatgattatgaaaattcacgcacactaataccactagcttacaattagagagtgaaacgttacaatacgtccacgcaaaatacgtcttattattatgataacgtacattaatattcatgttttctgtttgtgctctgcattttgcttatctgtgctaggtgaaaacaaaaaaaagaagagatttggacattttaacacacgctttgctcgcacttcacttttttcacaatcatactgttattttccttcctcttataatgaaaacttaccgataagcaaatttgtaccaaacgtatgaacgaatgatctttctagattagtcgattttaccatacattaattaaattattaggttcatctacccaactacaaaaaaagggagataacgttggcgttttcaaaaaagagtgaacactaataaaagttttctagattccttttctcaacttttctttaagctaaaagactccaaacaaacacttaagaaagaaactgtcactcaaacttaaacctacttcccatgtgaatcaaaagaaagcaaaaaaaaccagcaaatccgtccatctttaaataacaatctcaaactctttaaacgttactcaacttttttcttcttttcaaaaacccattctatgaacacaatctcacctccttcatcgtgtttcatacctctcttcccaacacgatg

SEQ ID NO: 22082 - DNA, 3000 bp, Unknown; identical to SEQ ID NO: 1230
  misc_feature (1)..( 3000): 2750-1469P.txt file - cDNA_ID_2045731; gDNA_ID_1620374; Annot_ID_155107

SEQ ID NO: 22083 - DNA, 3003 bp, Unknown
  misc_feature (1)..( 3003): 2750-1469P.txt file - cDNA_ID_2045741; gDNA_ID_1620374; Annot_ID_155104
aacatctgtggaggggttgatcaagacaccagcatcgatactacatagcctcgcaagtgtatcagtcttcctgaaatgcctaaccatttttttgttagagagatttttgttgtttttgttgttatggttagtacttttactccgttttatagatggatcgggttaaatttgttcaatacataatgaaatgtctatctatgttggtaatttctttccactaaaatatttgaatttctttttacatgtatttattttcaactattaccattaatttctttattagaaaagtcatattcaacatgttttatcaaaactttctgtcaaaagatgatattagaactaaattcggacaatattttagataattcctcgtttgcgacgtaatacatgatgtcaaaactatgttacatttagtagtacttatcttgaattaaataaaattaagaaaaaaatatgaatggggtgttactatggcatatatctattacctctggatttcattctatatacaaaaatattattttaaaatgataatttacacgcgccaaatatgcgtaccagccacgaggcaaaaattactatataactttttttgaaaataaaaactaattttttgttttttcaaaataagatacaaattatacgtaattccttagtaaagcctgaaaaacatcaaactttattttggctaaaggacatcataaaacctactatgtaattgtcattaacgtttgtttaactaaccaaaataaattactgaatcttgaactataaattcgaatatagagaaaatatgaaattttgtaagtgttattagacatccaaattttaaaaccgcgtaaactacactacaatttaaaatcggagtatgtaacctacatagagcctaaccacctcctaagccgtatttaataacattgttatattatgtaaagatatgatatatatcgttaagtaatattatgtagtgaaaatccgtcacaaatcataataacttgtagtgatcaaacttcttgtatataatctactttgttctcgcgagcaccttaatcaatcatcccatttaaaaaatttctttttgctattaacatcttaaatgttaaatctatcattgagcaatgtaacagttctgtgtgaagaaacaaggaatcacttacttctacattgtctctttacaaaggaaatttggcacatgataatgcttcggtttgggcaatctccttatatctttgcagacttgtctattaccataggtaatcatataaaagttattatatatgaacaatgttcctatggtaatagaaattcacattttattaaaaaaactgatacgaataattcaaagaaataaaataacttttatatgattgtccataagatatagtcaaaacgcaaaagactttgctctaagaaatattaaaaagaaaaacaacaagacgaggattatttcttttcaataattaaaacattagtataaatacaatcacatgcttaatgtaataatgtgacagtttggccgagtggtctaaggcgccagatttaggctctggtccgaaagggcgtgggttcaaatcccacagctgtcaatttgtttttttctttgactcctttgttcatctttattttaaaatcaatataaacccttttcggacattctaaatattttgacccaacctaatgatattcattatttgtctaacgggtcaactttcaagtcttcaagtaaacatgatatggaattatatgggtcaactccaagtaagaacagtgcatgcatcttgaagacaaaattgatttttttttttgtttttaattaatggaaattttgaaatactaatgggtcaagatgaggttgtccaaatcaactgatatcatatatgaccagattcctcaatagtcattagtcaatacaaaatccataatcttttttaaaaatataatctttttattttaaatcgcctatttttttccattcatttgtccaatgtgaaaagccataaatcatatattaagaagttgtgaattgtgatcataggagtaatatttctatctgaacaaaaattgaattttgttttgctttttgttgaaagataaataaaatgtttggcagattgtttgtacagaacacaacttgttgataaaacaaattccatcaagacagctaatgagcttttgatagtcagagctttgaagacgtgttaatgaattaaactgattagacctaaaaccaaatatttagaaagaaaaaaatatgataattgttatgttatttaatcaatagtcaaatactatgttgagtaccaatcatttcagtttcaacgattgctactcttttgaccaataacaaaaaggtttttatttttcatttctcaaactccatttttgtttgtttttagcataaaaacagctagaatgtgagtttcatatgtattatatactataagaaatcatataaattaacgactagaacatattgttttcattctagtggtatatctgagtttgactagaacgtttggaggcagattaaagtgatttcgccttgtcaaaactactttgtatatgttatcaatcaatcgctcaaaactaaatcggaaaaaaactacataaataagatatggaaaatgatactaacacaaactagtaagtaagtagtcactacatattctggtcccatgaatatggcttacatagtacatacattgtgagattaaatgaatatgatatataatacaagcatataagcatgtgcatgactatgaagtgggaatacatttagtgcctttatatgcaacttgacagaattaccaattatgtgaatagtgaaacttatattgcgtcttggccttttcacatccgtgacatgatccctcaaatctatatcttcttgcggcatatgcttatatataaacatatgacttcgtctatagatttatatccagataattaattctctcataatatcttctccacaatttcaactcttctaaagtctaaaccatg

SEQ ID NO: 22084 - DNA, 3000 bp, Unknown; identical to SEQ ID NO: 1233
  misc_feature (1)..( 3000): 2750-1469P.txt file - cDNA_ID_2045772; gDNA_ID_1620374; Annot_ID_155094

SEQ ID NO: 22085 - DNA, 3003 bp, Unknown
  misc_feature (1)..( 3003): 2750-1469P.txt file - cDNA_ID_2045798; gDNA_ID_1620383; Annot_ID_155377
tcgagtctcttgttttaggttttatccgattctgatttgtatacctgtcaacttcatttgttaatctgtgtgctgatttagcttcctaactctgttgatcgatttggggaattagctctttttcttttcgtggtgaatactaatgatgcaaagctttgaatctgatccatgtatttttttatatgctgcagaaacagatagctaatataattgagtttggatactcgcaagtgaaaatatgtcggtcacagcgggagtgagtgaatctgcaattgctgtaagggagaaactaaaaggtggtattggacagactaaagtgcgaaggtattggccaggaaaagctccggagtgggctgaggaagctgaagaagatgatgatgttaggatgcagaaggtttctgttttggatagagcttttccaaagaatgatgatttgggtgttgctaggaaggatgatccaaggctgcgccgtttagctaagactaaagttgaaaaccgtgacgaagttagagctgatcatcggcggataagacaggctgagattatttatacggaagaagaagaatcgaggaatcaagagaatagagacgaggacgatgatgaagatgccttggaagagagaagaagaagaattagagagaaaaatcttagaagagcgcaagaggaggctgctttacttcctttagaagaagaagatgagatacaagaggaagaagaggaggaggaggagtctgagtacgagactgattcggaagatgatatgcctggtattgccatgattaagcctgtttttgtaccgaaagctgagagagatacaattgcagagcgagagaggcttgaggctgaagaagaagctcttgaagaattagcaaagagaaaattggagcaaagaaaattagagacaaagcaaatagtggttgaggaagttaggaaagatgaagagatacggaagaacattctattggaggaagcaaatattggagatgtggaaactgatgatgaactcaatgaagctgaggagtatgaagtttggaagacaagagagattggtaggatcaagagagaaagagatgcaagggaagctatgctgagagagagggaagaaatagagaagttgaggaatatgacagagcaggagaggagagattgggagaggaagaatccgaaacctttgtcagctcaaccgaaaaagaaatggaactttatgcagaaatattaccacaagggtgccttcttccaggcagatcctgatgatgaggcaggttctgctggaaccgatggtatatttcagcgcgacttctctgctccaactggagaagataggttggacaaatcgattctccccaaagttatgcaagtcaagcactttggtcgtagtggaagaactaaatggactcaccttgtcaatgaggacacaacagattggagtaacccgtaagttttctgatttcagcgtttcttttcttgcgttttgttaggcacagactcgtttaggtctctgaaatatgattaatagcttatgagtagaaacattaagatgagaactgaaataaatcagtgcatgcaaatgtgaacccgggtagtgttgggagattcttgcatctgtttttctcgtttcatgagagctgcagattttgatatttttacttaacataaaatgaatgattgtgcaggtggacttccaatgatcctctacgtgaaaaatacaacaagaaaatggcaggcatggatgctcctatcgcaaaaccaaaagggagcaagaagatgaaagattgggagtcttaaaccgcaccaacatttagtttgctttttaaaaaaaatccaaaacgatacagaagtgttatgtggtagtaaaaaacatcgtaacatcttactcagttatgtcttgagtcctctaaatcgtagtaattaaaaatattgctttgtggaagacatctagtcttttgtatcgggatcaattatgcatcaatcaaagctgtctgcttgtattacgaaagcatagttagttacatatttccatggcaggaggtggttgatgggattttttttggcagaactgatttgagtttcaatagacaattctatggctagaatcgcttattatataacattctgaatacagtgatgcttgccaatctagattagtatttgtaagaatggaatctatattttataagactgcaaaagactgttaaactaacactatcttttacacttcgatatcattattaactggaatttaaatttaaattctggagaagtttgcaccaaaaaaaaaaaaaaaaatctggtgaagctaatttggttagataacaaatttcagaaaatacaaacaaaagtaaaagtggcaataatatgcaaaattagaatgaatttaaataattctgccgaaagtaaaatggtacaacagatacgaaagctgtaaagaagccgacaacaacatacacattagcccactctgcttcttcttcttcttcgctcgccatctttttttttgattagtcaaccattttcttctctctccaatttcaacctctgtaaggtacgtctccgactttccatggcttccccacgtctcgtcgtcccctctcttaattttgcgtttcatttcgttttggttgatcttttttttgaatttgattttatatctccgtgatctgattgctcctacctggttagtgacttcacaaaacatagatttttgtttattgttttggtttcattcgatttctggatttgatccttgatctgatttcaaaattattcactttctggcctcgttgagccttagatccaattctttctattatatcggagacaacatttaatccttgatatcttaatattgtgttgcgatcttaagtttttgattttgaattgaattagactcatcttgttgtttttctcaaatcttaaatacgataaaaactaacttcatcatttgattctgatttttcgtaattcttaatacagagacgacctggaaaaatataaaaagagatg

SEQ ID NO: 22086 - DNA, 3003 bp, Unknown
  misc_feature (1)..( 3003): 2750-1469P.txt file - cDNA_ID_2045805; gDNA_ID_1620383; Annot_ID_155375
actttgaaatccgtgaattctttgagggcttacacatgaagattgaggaagaatttcctgtttatttggtggagaaaaatgctctgaataaagctgagaaggaagagaagattgtgagtacatttcccaaactaaaacttcctgatttctctatctctctctctcactctcttcgtatgtctcaggacaaacagggggatcagtgtctgatggtagtcagaggtatttgcctatctgaagagcagattgtcacaagtgtaagacattaactaagatcaaaatgatacttaaaaagattgaaaatagaatggattttaactctattccacgtatacaggtctcacaaggagtaaggaggatgttgaataagcagatactagatacggttacagagtctcaaagggttgttcgcaagtgcgaggtcactgcaattctcatcttatatgggcttcctaggtactctacctcatcatcttctttctaaatactctcttgcgccaactggctcaatcaaatctatgttcacacaggttactcacaggatatatcttggcccatgagatgatgcatgcttatcttagactcaatggtatgtaagagtcaaatatgtaatactccatttgtacccccatttgaggagagttctcaaagtcctttggtttgatcacaggttacaggaatcttaacatggttcttgaagaaggattatgccaagtgttaggctacatgtggttggagtgtcagacatacgtttttgatactgccacaatagcttcttcttcttcttcttcccgcactcctctatctacaaccacatcaaagaaagttgacccatctgattttgagaagaggctggtaaatttctgcaagcatcagatagaaacagatgagtcaccattcttcggtgacgggttcaggaaagttaacaaaatgatggcctcaaataatcacagccttaaggataccctgaaagagatcatcagcatttccaagactccacaatattcaaagttatgatagccagccatatgttataccagtaatgcacgttttcattctttggtgtgaacacagtttcttcttgctctattgctcttgttctcatgttttaagagtttctccttcgttttgcagccatagaaactttaaacaatcttgcctgttgtacaaatgtatttttcgctggaatgaattcttgctgtgataaaactgaaggattccttagctcttgatccacttctagcgtcgtatcacaaaagcacattaggtattattgttatttgaatgtatcattgttggaggtatatagagtggctcaagtctcccaaatataacgaagctaaaatgtttgttatagtgcttttagtattggaatatctttatctctgttcaacatttacactatacagttatcaccgataataatatttgactgtttcaatcgcattgattctacacttcaaattcactgtttttcatagcttccacttccacccttccaccatttgtgctatatagaggcctgggggttcggttatatcggtttaatcgggttttcggttttttcggatttttaaaattttgccgaattggatcgaacaaaaattattcggttcggttctcggttttttcggttcggttatggactaaaaattgtgttccaaattgaactgaataattgttatttttcggtttattaggttaaccgaaaataattttcatattatagctatacataacaaacaatccaagacaatttacaagccaccatcattgtcggagctctaccatcatcgtcaacgcacaaccaccatcgcataatcttctcgtcgaaaaaaataaaataaaagaaataaataaatcgctgacataaaagaaaaataattcaaatgagaagatcaagtgatcgaggaagaagcattcacctaagacctggagtaaataaatcaagagtgtatacaatgatatagagagaagccactagatccaaaattcttaagaaaagaggtggaagaagaagaaaaaacaaatgggaacagatttaaatttagggtttttctttttatactgtataaaataattgtgggctgtaacatatattgggccaaacgaaaataattagtattatgggccaacaaacaaaagtttaaatgaaagcccatatataataaaatcaattagggtttttaatcttaaacatggcggccgaccttcttcttcttccttaagacaatacataatgacagaagcaaactggggaagatgaagatggagtggtgaagaacaaaaccgaataaccgttcggttcagaggtgccgaaccgaaccgacccgtaaaccgaaatcttcgaaagaaattgccgatcggtttgctactgttccaaacctcggtgccgaaaaccgaaacagtcggttttttcggttcggttttctcggtttattccgaatgatataccaatcctggtttaaattgaagggctgaataaaccaaatatttcataggcccatgaaagcccaatagaaattactgtgacatgtttatgagattttcgcgtggcttattgttgagttataacgtttcggcttcccgacctcaaccgtcttctgctcctccgccccgccacagtttcttagggttcttccgcattgtttctccgaattgcaatcccctcattctccacaatgtaagtttcgtttattttgtcttcaatttcttctggattttgtcaatttatgtttcctttgttctctctttcagaatcatcgagtctcttgttttaggttttatccgattctgatttgtatacctgtcaacttcatttgttaatctgtgtgctgatttagcttcctaactctgttgatcgatttggggaattagctctttttcttttcgtggtgaatactaatgatgcaaagctttgaatctgatccatgtatttttttatatgctgcagaaacagatagctaatataattgagtttggatactcgcaagtgaaaatatg

SEQ ID NO: 22087 - DNA, 3000 bp, Unknown; identical to SEQ ID NO: 1357
  misc_feature (1)..( 3000): 2750-1469P.txt file - cDNA_ID_2045869; gDNA_ID_1620391; Annot_ID_155622

SEQ ID NO: 22088 - DNA, 3000 bp, Unknown; identical to SEQ ID NO: 1359
  misc_feature (1)..( 3000): 2750-1469P.txt file - cDNA_ID_2045887; gDNA_ID_1620391; Annot_ID_155615

SEQ ID NO: 22089 - DNA, 3003 bp, Unknown
  misc_feature (1)..( 3003): 2750-1469P.txt file - cDNA_ID_2045893; gDNA_ID_1620391; Annot_ID_155612
gacgtaaatgactcttcgtacaaatgcatttagtcggctttgtgtgatgcggacaatggtttgtttgccataattacttaggatagcgagccgcgttttgcatagctagggaattaagccattggtgcctaggttttagcatttatccgcagaaccaaatatttttcaaaattttggttacaaattctaccgcaacatgtccacatgtagacaatcggataatcatctcccaacaacatatactccaattaaatagttgattccaatttcttatatttaaaatcaaatgatataaaaaatgatcattgaatattggtggctagtgccgggttgccgaaataaaatataaacgagtggactgaagaaagttttgacttggaagactacaaaatagacaatattttccgttaaagatagataataaaaagacaatgcttttgtttgtacctaaaagcactaatcaaaatcgaaaggtaataatggaggtgaagaagacatcattctcacataatcatctccgcatcctcagcttttgctattaatattatatttaatataatttgttacgtaaatcatataaattgttcaaaattatttactaatgtgcaattaaaaataaagaaaatagtggaacaaagaacgtgttcattggcaatcttaacaatcgacgagtatgaaaggatgaaagatccacctagtcctagaaaaacaaaagtgttcttaaaatgttatagatgtatctagtccttgattaataatttttttaaaaaaatactttcataatttttagaagatatatattttatcatgcttagtttaacttgtggaatcacacgaatttgttttgttaaatggcagtgagtagttggaactttagttagcataagagaaaaatatttaaataatttgcaatcctcgggagcggtgaggttaacgttaaggttaatgaaatacttagttatatatgaatgtgttaatatgcggtgcagcatagacgtgctccatattttagttttaatgcttattctattttaattaagattaattttgtggacattgggtttccataatttctttgatattttaattaagatttgataaatttgttttgagattttataaacgaggtttacagaactttttaagagtatactctagttctttgttcttagtagtatatagcctatcaatatattctcaaccagtttaaatagatttatttgactttttcaagaatttcaaaactaaaccaataattttgctatttatacttatttctttaatgggatcagttgcctatctttataagtattctatacgtcaatgcatgtatttgcaacgatttattaaggcatgtgaatgtgaatgaagtatgaagaacgtgtgattagggccctacttgattcaagcaataacactaatcgacatcacacaccaagacgtacaaccccaacccaacaaagaacaaactctaaaaattaaaaaataaaaactctgaaattgtctgatttagaataaatatatcgttactatagagggacgattggctttgatagtaatactttttttttgttttcaaaatattaaatttatgaatcaataatttacgatcattaatgagagattgatgactttaaaattatgtttaaaagatttaaataatggatgaatcattatggaaatctttagtcttgaagagtactaagtataggttttttttttttttcttttcggttttgtattccaatgttctttttcaacataagaggcaaatcaactagtttgtcttagaactgcgtttaattgaatttgacaataattgtatttttgattttttttatcatgatattcatattcaaatcaactagttatgcacccttgaaattcactaacatcatatgaggttggatatctcttggtaagttcagaaccgaaccaccacatgtccatatctcctcccgtaaaatcagctatgctatcaatcatattgttttcttcttgtttgagagatagggaggaatatttgggccggaggacagtttattcctcccggaagtcatttcgaatgttaatttgtttttgaaaaacgatgccatggcataatccgagggaaagagtctctcaccttgactaacaacaaacaatctaacttggtccgcgggcaagtggtcgaatcacctaacatatgctcaacagcaatacaacacaaccgatgttccccataacaattgtgaccctatgatggaaaccaaaaattagtcccaacatatataccataaaaatatgtaaattgataaagcagaacctagtgtttggaaaggggctctattctttctaccccaaagacaaaataataaagataataaaaaatgatgacaagagagacaaaagtaaacaaaaaaaaggattttagaaatgtaatagatttccaatatcaacgctcctttttgttcccgctttaacttttcccactcgcaaatcattttacctttggattcaagcctcatgatactttttctttttctcacactttttacactattctctgttttgttgttactcatctcttatcaaacattttaaacttgtcgactttcactcttcactagctaccattgttaacttttggttcttaattcatattttctgctccaactttgtagagaatcttttgttatcccaaagaaaaaggtgcctaaattcacgtttgacaatgttgcttgaaaaaggtttgatcttgaaatttcaaaagagggaaaaaagtaaaggagaaaaatttggagagacaagaagtgagtcaagggacccaacaacaaagacaaagacaaaaactttggattttgccaaatactatgattaatgctcattcaacactactattaccatttccatcatcatcatctctctctctctctctggttttggaaaactgcctgagaaaaaacctagccataaccatcttcttcttctttctcttgttcttgaacataattctgcttcatg

SEQ ID NO: 22090 - DNA, 3003 bp, Unknown
  misc_feature (1)..( 3003): 2750-1469P.txt file - cDNA_ID_2045924; gDNA_ID_1620391; Annot_ID_155601
tgtgttttatcgagtagttttgataacaaaggcgagttgctggattcttcttggaaattctaatctctggaaagctgacaagagcggatggtaaatcaaattcttgattagcatccagaggatattattattaatacaagataactacgatcagatatttactctttcatggtatatacatttcatttccatgatctcgaaaaccctttaattgaacataaactttattcgactttgcaagaacatcttttcatgataacatttctccctaaatgagaaccaatagattagctttgctaagtgcattggttaagttcttctgacaagtataaacttgaaacatatatgaccatcaaacgtagctcaaagctcgaccccaaaaggtcttgcgttcatacttgctaacgggtcaaatccgcccgccccattgttccgtgactccaacctccaacgacaccgagtaataagatagttccaactaattgacctgaatcttggaacatgttcatgaattctcgacaccaaaaatgttacaaaaagtatccattaaaaagaggaaacgtgttacttctattgaaacaaagaaccaacaaaacaaaaaaaaaactttatgcctactttttgaatctttataagtcaagctaaaataaaaggttgtgaggcacaagcaaagctgagatttgttgtattcgtataggaaacaccaatggaccaaattttataccttgagttttgataacaaaggtaagttgctggcttcttcttggaaatctaatcttgtatgacgattcgggaagctaatcagagcggactgatagaattctatatgactaaataacatagatataagcatatagaataatttccaaaaagcactacaaacttttgatttctaggaaagagtttgtccacatgaaccttgtttgagcttgctcatcttcttctccacctacctttgatgacaagattggcctagtatctgatggtttttggttgatatctaatctttgagctatatactgatgcagcttgatatgaaagatagagatgaaattaatgtattgttgggtcactgtagaggattgtattcgtaatagtattgttaccatgatctatgatgcttttacttctttcaacaactagtttgatgtgcatcttttgttaattaacttagaaaattgtggccatatatcgctagagttggcctgaagaccaaatgtgacgctaatctaaaatacatatattgctaagaaattcgctcaagttcttgggatgatatttgaccaaaacaaactgtgatagatttgggccacaattacaatttttagcctacactaattattggaccaatcataagattggtttggcatttgttaaacataatgtacaaatctaatcaaaatatcctaaaatatcacttaaatcactccaaatctaaatagtaaattccatcaaatctttcaaaatatcaactcccacagtttataaaagaactattaaaattttcatatattgtaattttagctacataactttatataatgagaaatacaatccaaagatatagaactgaaccaaaaaaaacataataaattttagctaaataactttttatttagtaaaagattttttttttttttgggttcagttctatacaataaattaaaataaagaaagaagagttatgttctaccaactatataataaatggtgaatgaagaatcattaaatagaataggtttggtgtccacataacataaaaaaaatccaatacaggatagtatattcttattttatggtttaaaaaataatatttcaaactctctaatatataaaaagaagttttacattgaaaaatccgcaaataagcttaaaacgtgagcctattgacttttacttttttaaaataggcgttatattttgttgtttttatttaaaacatcatgaaactttaacgttttcaattatcgttcaacgaaacgtatattttatttattgtgcgttaagtttttttttgtcaacatatgaatcatatacacaagtaaactaattttgtcactacttaataaagaaaaaaaagttacaaaactaatttgaataaaataagttcattcctttatcagttacaataaaatcaacaaaatttgaataaaattagtcttcacaaaataatactaaatttgatggatttaactatattagccaaaattcaaaaaactctcatagaattttaactactcatatgattaggttggaaatgaagtataatttataacaaatactcatttctaaatgtcttggaaagataagtcaaaatcattatgacattatcagtgactactgactatgaaaatttgatttatcttgctttatgaattcaacgatacagtagacagagtcaatttacacgaattaagtgatagttactgaaatgaaatctaaaagcgaataatgttatatccaaaaataaacagattacattaaaaagaaagtgatgattgattagtaatattaattgcaacaattaagtaaagaaaatcgcgagaaaagaggaacccacgacacattgaaacttgcaaaaaaaaaaaaaactagaaagcgtgcttcgcaatggtcttttctttttcttcttcttctcaatatacactaataaaataaaaataaaaagcttctcttgcaattctctcttccctcataaatagagatgcagtaagactataaatattgaccagtgtcctagagagagaaactcgccgcttttaacactttttttttttctggtttttttttttggttaagcagtaagcactaagcacatatctcgagcacacacacaaggtcagtcaaaaactgcttctttttctgattcatatatatatattgctttgtgggtctttggagcgtgcatgttttttgttcttattgttgatttgtgtgtgttttcattttctgggcaacggctagttattcccacaagttgtagacgacagaagaagatcgatg

SEQ ID NO: 22091 - DNA, 3000 bp, Unknown; identical to SEQ ID NO: 1445
  misc_feature (1)..( 3000): 2750-1469P.txt file - cDNA_ID_2045954; gDNA_ID_1620403; Annot_ID_156031

SEQ ID NO: 22092 - DNA, 3000 bp, Unknown; identical to SEQ ID NO: 1446
  misc_feature (1)..( 3000): 2750-1469P.txt file - cDNA_ID_2045968; gDNA_ID_1620403; Annot_ID_156027

SEQ ID NO: 22093 - DNA, 3003 bp, Unknown
  misc_feature (1)..( 3003): 2750-1469P.txt file - cDNA_ID_2045994; gDNA_ID_1620403; Annot_ID_156021
aattcacataattctcatcgattagagacatttaggtattttttgtatgaaacttgatcataggtttaattatacataggccaatacaaatgtctcttaggtaatgacgataatggaattaaggattagaacataatttgactgattctaaaattcaggaaggtgttgagtgggagcacaagagcaaaatcgctggtaaaatgcatgcttgcggacatgatggtcatgttactatgcttcttggggctgcaaagatacttcatgaacatcgccaccatttgcaggtctatgcatttttcccttttgaactactttcatcagtaacatttggcctaacacattttgttttgttttgtttagggaactgtggtgcttatctttcaaccagctgaggaaggtttgagtggagcaaagaagatgagagaagaaggagcgttgaagaacgtcgaagctattttcgggatacatctttctgcccggattccctttgggaaagccgcttcacgtgcaggttcatttttggctggagctggagtcttcgaggctgtaatcactgggaaaggaggtcatgctgccatccctcagcatactatagatcctgttgttgcagcctcaagcatcgtcctcagtcttcaacaattggtttcacgtgaaactgaccctttggattcaaaggtttcgttttttactctttgatgatcttcacacctggtctatacattatagaacagaactcattgaggtttcttctgcaggtggtcacagtttctaaggttaatggaggcaatgcttttaatgtcatccctgattcaatcaccataggaggaactcttcgagcctttaccggatttactcagcttcaacagagagtcaaagaggtgatgcgacccaagattgcgcctataatatttcccggtattgttgctttacccatagaaccaatctccggtttcaacttttgattctaggtgattaccaagcaagcagccgttcaccgatgcaatgcgtccgttaatctaacaccaaacggtagagaaccaatgccaccaacagtgaacaacaaggacttgtacaagcaattcaagaaggtggttagagatttgttgggtcaagaagcttttgtggaagcagcacctgtaatgggatccgaagacttctcatactttgcagaaacaatcccgggccatttctctctactgggaatgcaagatgagaccaacgggtatgcatcgtctcattcaccactctatagaatcaacgaggatgtgcttccgtacggtgctgcaatccatgcatcgatggcagtacagtacctcaaagagaaggcttctaaaggttctgtctcaggctttcatgaagaactctaaaccttggttgtagacaggttgttcatcggttattggttcagattcagaagcacaaacctaacactccattgaattaatcaagtgttatcgtacaagatccttgcaagtgttatagaatgatgaaaatgtatttaatagctaattttcaattggcaaattatcaacttttaatagtctgtgtaaaagtattgacagaaacttagaacacgaattatgatcattggtcttgttgtaatgtattggcaaaaatcatatcttatgtttaattgaccaaaatcataagtgaaaaaacagtatttcatagcatagaatcaaaacataatagttcggtgccaaagaaaacaaaaagttacaaatgaccttgagaagtttcacgacaacatctttctctctaacttcttctatttctcagaagagttgggtcctctcttctttccgaaaccaacaactgcacaaatcaatgaaccattactaaccaataatagatacgcaacgtaataagcatttgagtcaaaaccaaatgataaattcagaagctctagtctaaaacatcgaaccacaagtgttccaatataacacatttctcgagtattcacaattcttattcaaattcacaatattattaaccacattcaacaatgcagtagtatcgctttataaaaatcgaattcaacaatgaacactaacacactgtaaaggaatcaacaaagaaactagatcggaaaaattacctgcggtgacaaaacgacggttgtgctgcagacgcttgtgagcacgacctctgggcttctttttcttatcttgcttcgcaacctttggagtttgtcctctaaccttaccggcacgagccaaagatccgtgaacctttcctgaaatcgttaaaacacacttaacgtcaacagatccacatcagaagaaaaatcaaaagctaatctataaatttcaagaagtttccaaggattttacccatgattgattagcttctctgctttttgttcctccgttccgccggctgcaagaagctgaaatgagttcgtgcgaaatctcagaattagggttttcgagatgatgatacgtatttaaacccgataccgaaatatattgggctttatgggcccatactaactacttaattactattgggctttattagctcgaatatggacatctgtaaaactggacctataagcaacacaagtttgacaatataggaatacaaaataattcgaattcagagaaaaattatctctactttaataggtctataacgtttgcataatctaaaacccaagatattttggaaacatatttctattttaataccattttccactaatacttttcaataacagtagttgtttccataaataacgtctccactaattgaataaaatgaaatatttaacgaattattaattgcgataattagatacgaatcaaaaagattccaccggcttcgttggaaactttaagatatttccgattttaccccatataaagggaagatccaacggttattcttacatctctcaatacgcagccaaatacactctctctgaaacctctcctcttttagggtttaatatcaacgcctccaaaatttccgtgcttttgttttcgtagataacgaacaatg

SEQ ID NO: 22094 - DNA, 3003 bp, Unknown
  misc_feature (1)..( 3003): 2750-1469P.txt file - cDNA_ID_2046001; gDNA_ID_1620403; Annot_ID_156019
tatttacagtatattctccttcaaattttggagtattgtggattttgaacatgtgtaaattgtaataaattggttgtctttttacgttttttttctttttcttttgattatgttcgtaactaattgactaactaactttagagccaagtggagaagacaattcgtgtgagtttccacggcccatgctttcgacttttgagtgaaaacaaatatttttgcattgttaaaagacaactcaaaaatatctcgttgttattagtttgttacaaatactacaatggcataacagttttcgtaatataagttttccttcgacatcattttcttatttcctttaaattatgatggaagaagattacgacatcaaaagctagagaaaaacattatgagatgatgaagtttgttgcaacggctaaaaacagaacattacaacttaggcctttcataaaacatatgggcttttatggcccattaaaaatcgggcttagtggacttatttcagtctcatatatatattttgagtggcgcatcagtctcatcttcctccatggctctaaacaactttttgactttccaactactccttcttctacttcgtgtttcatcggaatctccatggatcgtcgccggagatgtgtctcgaatcccgatcaatttcctcgaattagcaaagagcccggaggttttcgattcaatggtgagaatcagaaggaaaatccacgagaatcctgagctgggatacgaggaattcgaaactagtaagttcattaggtcggagcttgaccttatcggagttaagtataggtttccggtagctatcaccggtattatcggatatatcggtaccggagaaccaccattcgtcgctctaagagcagatatggatgctttgcctattcaggtctagtaccaattcacagaactctcatcgattagttacatttaggtctatggttcagaaatttggattaaggattagaacataatttgatttgataattgaattcaggaagctgttgagtgggagcacaagagcaaaaatcctggaaaaatgcatgcttgtggacatgatggtcatgttgctatgcttcttggtgctgctaagatacttcaacaacatcgccaacatttgcaggtctatgcatatttcccttttatactactttcatcagtaacattggtctaacacatttttttgtttttgtttagggaactgtggtgcttatctttcagccagctgaggaaggtttgagtggagcaaagatgatgagagaagaaggagcgttgaagaacgttgaagctatttttggtatacatctttccccccggactccctttgggaaagctgcttcacttgcaggttcatttatggctggagctggagctttcgaggctgtaatcactgggaaaggaggtcatgctgccatccctcagcatacaatagatcctgttgttgcagcttcaagcattgtcctcagtcttcaacacttggtttcacgtgaaactgacccttcggattcaaaggtttcattttttactctttgatgatttctctcctggtctatgcttaatttgtagtataacttattaaggtttcttctgtaggtggtcacagttactaaggttaatggaggcaacgcgttcaatgtcatccctgattcaatcaccataggaggaactcttcgagcctttaccgggtttactcagcttcaggagagaatcaaagaggtgatctgatcctttttgatttttttctctgtatgttattttaccatagaatcaacaaaccctggtttcaacttttgattctagattattacaaagcaagcagccgttcaccgatgcaatgcgtccgtgaatctagcacccaatggtaaccaaccgatgccaccaactgtgaacaacatggacttatacaagaaattcaagaaggtggttagggatttgttgggtcaagaagcttttgtggaagcagtgcctgaaatgggatccgaggacttctcatactttgcagaaacaatcccgggccatttctccctcttgggaatgcaagatgagacccaaggttatgcgtcgtctcattcaccacactatagaatcaacgaggatgttcttccttacggagctgctatccatgcaacgatggcagtacagtacctcaaagataaggcttctaaaggttctgtctcaggctttcatgacgaactctaatccctgtcaaccttggtacagtttcctcatcggtcattggttcgaattcagaagtaccaaatttacactccattgttgatagaattccatttaaatgatgaaaagccttaattcgtagaacaatttcaattgggaaattctcaacttttatgatatgtttgtgtaactgtaacatactggcataatcttagaacatgaattataattaataggctagtcttgttgtaatgcattggcaaaaccacaccttttatgtttatattgatcagaatcggagattttaagcatcaatttacattctttggaaggaaagaaactcaagattgcataatgcttcatcaagaccagcctctgctttaatactttaaatcatgaacttcattcggtgtcgccttgacccgctatcgagagaccaacgaattgtgcctccaaacgtctcctatctagctacttagtttggagtgttccaaccttaatgtgttctagttgtattctccttttgttgttgttgttatagttgtcctttgacgtcgtcatttgcttgtttcctttaatcttgatggaagaagattacgacatcaaagctagagaaacaaaaaaaaactcaaaagaaaacaaaacattatgtgatgatgaagtttgttgcaacggctaaacagagcatatactgtttagacctttcatcaacaatatgggctttttggcccattaaaaatcgggctttgtggacttgtttcagtctcatatatatatatgagttaaatcagaaattggttgtcatcttcctccatg

SEQ ID NO: 22095 - DNA, 3003 bp, Unknown
  misc_feature (1)..( 3003): 2750-1469P.txt file - cDNA_ID_2046005; gDNA_ID_1620403; Annot_ID_156018
tttagagaaataaattacttaaaaacatgaagccatttgagattctccttgtcttcctcgttcataaggtgagtgtaagctccagccttgtgcaatgctacaatacattaatgttaattcatcaatcaaattatgttactaattaagtgtttagttagttaatagttttattgtgcttacgataaaaggaatggtatcggatgatgaatagtcccggggatggtaaggtgcttccattctccttggccacctatttaaccatataataatcgttttgtgaatcatgtaatcataattaatgattatagttgataaactatagaaaggaattaaagaatttaccagatacatgtagtcatcatgtccccatgacataagaacattttcaagtccacagccttcagaataaattccagctttggtattgtacttagggttgttaaaatcagggttttccataaaatactacaatcatggttgaaaaggaaaaaaatatattatagaaatcacttgtttggtaaatattaatcaactaggttctaactatcaatattttgaggatgtcaaaaaaagaactatcaatactttgagtaactagcaaaatatattgagttatatgtaccttgtggtgtacgttagattcatcaaatgcacacccaacaggaaatgtgtcacctaaacggatagagaattcataaatcacttacttaaaattgataagtttactacttagtaaatcaggattaattaatgaaagaaatcaaagattaaacttaccaacaacagcccattgaggaagccctccaaactgtggtagggtaagaaccttcccaagatctggaagttcagtcatttttagtatttttaggattcttataatatgataattttgattcttataagcatgagtttttgtcataaataacaattaattaccatggataagcgcagtgagatgaagccaatcttcgttaggataatctttacggattgcttccgcagattgaagcaaatgttgaatttgtggttcgtcgaggtcgggatcactctcgtccaccacttcttttgaaagttcacaacattcccaaatgttcatcaccatcttgtccaattttccatactcacttctcattttctgtacctgcaaacgtatcataagttagtaacaatatattttataacagatgagaaacaacaatatgtatcgtatgttcatttcggctaacatcgttaggaaagatttttattttcattagtaattcataaatcacgtccatgcaaaaataataggactcaactataatgttgatcacacaatctaataaaccctaaaccatataagatatataagagatcttacaaagtctaaagtttggttagtgtgttgtgttgcatagaaatgttcgacgctcttttgcctctcgctgtttgtatccgtgtagtctctgcaataatttacatcaataaaatcttaaatgttttggaaaacattttagaaatcgtctaaattatttcttgagaaaaaaggaacctgaattgacgaccaaatgcgttcatctcaggagccaaaaacacttcatcatcggatgatatcttcgacattggtatgtcgctgtccaatcgtaactctccggtcttctgcgttgtcgagtcctcatgtacttaaacaaaacaaaaaagaaacaaaaaaacttctatttttacgaaatctcaagataaaatttatagaagaaaaaaaactacaaagaaaagaataacaaaggaagatagatagatgttttaccaaaaacagggttttcgacggagatattcatcttccaaaaaaaaacaaagtaaaaaagaagatgagttatgaaaactaaagatcgagagagaatgtctacgaaaagatgtaatttgatggagacacaaaaagggtatttgtagtggtgatggtttaggagacgataggtactttcctctatatttagagagaaatccaaatcttttgaccacgaaaaataaactttgtccaagaaaataaaaactgtggcatgataaagatctcttaacatttatatacaagagttaatttttttgttttcgttttttttagtttatttactctactgcgtttgtttatgttttgaaatataccaaacatcctaaatccttaaatttactctcttcttgattggtcaactttttggcatattttcttccttttaagatttaggaagacatgtgtcatgttctaaaatagatatagtagactattaacatctatgtgatattcttatgaattatcatagacacatatgtccaagagagttaattatacttagattctccattttcttattcaaaaaaaaaaagattctccattttcttacctttttatcagtgtttttcactttccccccatttttcatatttataacattcacacttattagtttctcccccatttatgctatttacagtatattctccttcaaattttggagtattgtggattttgaacatgtgtaaattgtaataaattggttgtctttttacgttttttttctttttcttttgattatgttcgtaactaattgactaactaactttagagccaagtggagaagacaattcgtgtgagtttccacggcccatgctttcgacttttgagtgaaaacaaatatttttgcattgttaaaagacaactcaaaaatatctcgttgttattagtttgttacaaatactacaatggcataacagttttcgtaatataagttttccttcgacatcattttcttatttcctttaaattatgatggaagaagattacgacatcaaaagctagagaaaaacattatgagatgatgaagtttgttgcaacggctaaaaacagaacattacaacttaggcctttcataaaacatatgggcttttatggcccattaaaaatcgggcttagtggacttatttcagtctcatatatatattttgagtggcgcatcagtctcatcttcctccatg

SEQ ID NO: 22096 - DNA, 3003 bp, Unknown
  misc_feature (1)..( 3003): 2750-1469P.txt file - cDNA_ID_2046013; gDNA_ID_1620403; Annot_ID_156016
gacaatacgagatctaccaaaattaataaaaggtaaaagaatgaaattgataagatgagttgatgtcattaatatgcatatatgcgtgataaaagaacacatagacaatttcaaaacatgacaataataaagaagaagtacaaacaaatatcaagattaccagatctgcgtgagatcgattggatagggaaaatgtaagaggaagaagaatttgataaagacgggagtgatctcaatatatatagtagagaaaaataataacttgtgatttatgctttttaagtattataattattgttattaatatctctctttgtttccagaagagacacagaaacacatgtagatacgactttaagtactgaaaaatctatgtcaagtagataaagaaatgaagaagaaatgaggaagacgaagagtaaaggaaataaaaggagttgagactgaaaaggttaaaaaccctaattttactctctcttgtcttgtgcgactcatcttcagtctatcgaccaaaccttttatttatttcctttttgttttatctatctattttatttattattattagtgtattcgtattctaaggtggtatgtattaatattataataggctttgtacatacaaaattagtattactcagctaaatgagacatatcagaccatgtcaactttttttgagcaatataaggaaattacgaattgtgagatatttataagttttagttggagtcaagctgtaaaaaatgtaaggctttctttttatcaaaaagataaaaatctaattttaaagattttatttaataatcttgtgctttaattaactgttgaatctcgctcttttgtttgaaataaatatttgtttgtacatccattttaatagtataaaacctggtaccttctctgaccttctgaatgtttttgaacataattacggattaatttaggagaagattatcaatatttttaaaataaagaacgcaggaaaagaacataggaaacaaagcatttaaggataatctctttggattatagggcaaacacatgtttttaagaatctttttcttttttgctttctttcacattatttgaaatatgtaacatattcttgtgggatttgaacccaatggtcctacactggtgtgggtccaatgatgatgtcgggagatggggcctagccgcagatttgtttgaacaacagatcaaacggtcatcatttatttgatctaaatgattatattaggttttgcattttttcttctcctttgaaaagatgaaaaacgaaaaaaggtcagaaatctactggagataagagtaccgtctgagactagaataaacatagatatcagctgaaaaaattgataagagtatgataatgtgcttattcagttttattattaaaaaaataaaaaaattagtctgctacgaaaacacaagtatacatactatagttgataagagcattatccatggtgtgtagtaagtaagtaaacaaaccattatatttggattaatcgagtattcagcaaatattcatattgtcttgttaatgattaagagcctagaagtctttaaaatatccatcaagattcaaacattatgactcaaactagtgtggtgttgtccattatactcgaaacgaaatggtattttttcaacttttgcttgtaaaacttagccagtgcatggcctttattaaatcaactattgggtcactgcatgacccatttatcaacctgtaactgaatattgggctttggcaaagatccaattagcttcattcgtatttcagaaatttgattttatatccgactgagtaggtacgtatatgcaatacgttatgtcctattagccttatgggactcacgggtacttatgcaggagatggattaatttcatatccatctgcaaactaaatacatttattttcttatggcaaaaagccaaaaactatgtaacgtttaatttacgaaaaaaaaaatatttaatatttgggttatatggatttttttttattttttttttttttttcgggacattagcgagagtcatagtattaaagaaacagtaaaaacaacgaccagatttaatgcaactttattactactttaattcagattcgagaattgacaggcaaatacgcattattttagtacattatgaagaatcatacagttacatatttcacatatatattgttttaaagatgtaaaacgactaagcaagtatgtcatctgatagcattatgaactaataactttttgtcaactctgattttcatttttaaaattattatatcttgttacctctttgtaaccagcaatagtttcttgacaacaaaagaatcggcaaatcaatgaaaacttattaaactaacacacaaaacataaaaaatagtgattagccgacacaacaaaattggatttgtctttctctctttaaaagattttcacccgaatattcctaaagatctgaaatactgaaaatatcacacaaaaaaatccaaaaagaaaaaaaatcattttaaaatttagaacttgtttttcaaggcccaaaattaatcgttgtcaataattggaaacttaaaaataaagtcttgttctagaagaatgtgaatcatcttctccaagtttcaaacgttggtttttttccccactgtgatcgtcagctttatatattatatacacgagaatcttgtacccaattaacatatacatacatgtaaatgtgtgtatgtatataatataaaattattctccttttcactaatttttcttcaaatactttaatgcccaccacctgttcgatcaaattccccatctcgaaaagctagaactttcttcgtctctattggtctctcactctctctcttacctcttctcatttgttctttctccttctaaattgggttatcaagtatattggatcaacgggtttgattcacgatttgtcatttcatcttcgtggagagagtttgatctgatttgttgatcgtcagcgttatg

SEQ ID NO: 22097 - DNA, 3003 bp, Unknown
  misc_feature (1)..( 3003): 2750-1469P.txt file - cDNA_ID_2046032; gDNA_ID_1620403; Annot_ID_156011
tggattttgaaactctgtctcatgatctcgttgttcttcagtttgcaaactatgaattcacaggcactgtaaccgaaatctgaaagaaatgtagcaatagcaagaaaaagcaaaatttgttcctgaatagtttggtctagaaattgtgacaccgtctaacgattttgtctttcttcctgcagtggaatcgttgtacagacattctatctgaaaacttgtctgatatcaattgtgtaaccacagtcttgtgatcttaatcatcctcactataatacacaaaaatctcaatctgcataaccaataatgaactctaaagctatggtaccacactgccattcattaaatatttcaactcgacacaaatgtagacaatactatattgttttagaaataatcatacaaccccaagatccatcacaaggtaggtaatacacagtcggattatcgaatagtttttctctcacgacacaactagaagattacataaagcaatatgaatatagtagcagcttaagtttcagagccccgattcaatcaggtactcaccgagattctccacaaccatattgcattgtccaggagtcattggttcatcatagataccaaataccaaagctaaggtggtcttcttgatggtaacaccaccagctccctacaatggaagcaaaatcaacaacagttcatcaaaaatcaaacaatattcaaacagtctagttaccttctttcctcgaatgacggcattaggctctccttggattaccatgtacttgttaccaccaaggaacaatcctgttggggcaagtgttccaggtgtagtaaaatcgtctttgatgccctgaatttcctcaggcttcacctaaaacaacaacaatacaaaaactataagagaaacaaattcagtctctcttaaacatctcatgaaagcaacttaataacttatgaacaacataaccagtacaaagaacttgtctatttccaaaggtcaaaactttcttcttaaaagagctttaaacttgtgattcgaacttcttctaatgcatcttttgcactctataacctcaagaacatatgaatcagaaaatcaaaaccaaacattgaaaattgctgaattttggtggtttagtagctaaacaaaaccaaaggttgcagatttcaacatagaaccaaaccagaaacagcaagatgataagaattgagtagtcggtatagaaataaaccctaacctgaggaaaattgttgctctgagcccagacgctaccgtcttggccgagaattgcggcggcggtgaggcggttgcctgcaacatcgcacattaagtgatcgtcgacgtaagtctgccacgacatgtttgttttcttcttcttctttacttttgctctgcttcttctttgtggtttatcggaatgttctagagatagcgtcgaaactacgagtgagtgagtgtgtggcaatggcatttacgcaaatatattgttttatacatgattgacacgtgccagacacagctctttttaatagtttctaaagaggaaaattgtattagaaaatcaaccagttataatgaaaagggaggaaataaataaaaaaatagaaaacttatttaaggaaaaccaaaacatttaattaaatatggtcttttcctaaaaaaaaacaaatgtttcgattttcattataattgatttttgttatgaataaagatggatgtccattataaggccctcatctaaacccatcatctagatgtttttagggttttatcttttttttgtactcctatataaagaaccatttatctcaatggaataacacactcatttcttttatctctttctctggttataacacgttatcagcacgttctaaaaggtagatatagagattcttacattttttttaagaaccatgtttacttatcgactcatggttcatagtacttattttctattattgaaacaaaacaatatgagccgatcgatgattatagtatagatcggtaaaagcatgttttcaatgattcaataaagaagagaataatgcttatcatttgtttctataattactatcgcatgattcaatgattctacaaagaaaatcgttaaagaagagaatcatgcttgttaattgttaatttttgtgatttactattacaatattgaatatataaattaccaattttataattatataactaactttgtaactattcataacccggtggtgggtgatgcaagcatgtattaatgttttagcattccagttttgaatagttgcatctatattcaatatcattttataaatattatattgtctaaaatccatttatgattgatatgatatcccttatttaactcctttgattaaaacgttatacatatcttatcacttttagatattgacttttccatattaaatatttgattttcatatatttgattgtgttattattatttttactaaaaacatttcaagataatttttctttttataagattccatatatctaaatctttgtgttattattatctaaatctttttataagatttccatatatttgattgtgttattattatttttactaaaaacgttgcaagataatttttctttttataagattcttttctctaaatctttgtggtatctaaaaaaaaattgttcatggttttgtcgtaattttgcacgaaatcattttacccaaatcttgcacgaattcatattaccctaaataaaagttttgtcaagatatatgtaaaatccagattttgcacaaagtagttttattctgattggttttacaatattgcattaaaattatattaatatataatatttgattattttatgaaataaattgattgataaataacttaatttaaaggtataatcacttatagaaatttttatgaatgactattttaatgtatcttaaaaagatatcatatttttgatggtcaaagttttttcaagaacttaaattatcaccagaaattgagaaaataaatatg

SEQ ID NO: 22098 - DNA, 3003 bp, Unknown
  misc_feature (1)..( 3003): 2750-1469P.txt file - cDNA_ID_2046035; gDNA_ID_1620403; Annot_ID_156009
gtttttgagtttaattcatgaaaacagagctgttcatgtttgagtttaattcatgaaaaaaattactctcatatgttattctccttatcttttgatttggccttaatgaaatgtcatagtttgggagaaataagttttttaacttgactaagtctatttaatcacataaaccaaaaccttgtacattacataaaaaaggaagaacacaatgaaaaataaaatctcattcaacttttatagtcaagtaatagtctttagagacacattacacaatatcatgtatcttatcatatcatataccaaatgcaaatgcagaagaagagggcttacttatctaaggtagttaacaggtggttccagagtgccaacaagtatcccgagatcgatatccttgtcctcaaacttttttatgaatggatgactctgagaacatgaacaaacaaatcttagaatgtttcatcagagatactaataaccaagactgaaagagggtggtgagtaggaattacttaccaagaggtccaaagatgatgctcttgctggaggatctttttgtatgctgttatgaatgtaaagaagaatcatttaaccattagttttaattctttgtgtgccaatgccaagtatatgaagatgaaaataatgagttgccacttaccaggctgatacaaaggagcagaattcaggtgagaattgatcagaaggagcagttggtggtggattctctactattgctgccaagagttcataaaagcttggcgggttttgctgatcttcagattctaaataaggaaatcttcctattgcacattctaacactgacatccccaaactccaaatgtcactgctgtagtcatatgtgcttccactaatcctctcaggctgtgaagtgaaaaaagagacaagtcatgattatgtatgtatacaatacagaaacatcaagaaatttgtaatgtagatgatttttggaatgctttcgtaccgacatatagttgtaggttccaacaaatgtgtccctctgtcccatggagctagcaagacttgcacttacaccaaaatctgagattttcacttcccctttatggtttacaagaaggtttgatggcttaatgtctctgtgtatgacatgtctttcgttgtgtaggtacacaagacctagcaaaacctgttcacaaggaataatataagtaagagtgaccgataaatcataagaatgctttgaataagctggtggtgtatttgacctgtttacagacaacagcaaggtaaggttcaagaatagtcttgacttgtctaatcacatccgcaagagatccacggtccatgtattcaagcacaagcgaaaaggctccattgtgatagaaagaatggtagcaaactactacatgtggacattgtgatgatgcttggtttattttaagctcctgaacaatttgcttacggatttcttcttgtatattcatctgtatgacctgtgattcataacataagcaaactcaaaccccaagtctactcaaaggccttagtcactagcataaaatcaaaagaaagaaaaacaagtagtttaccttcatagcaaagaatttgccaacccatttatgacgaactaattgaacaacaccaccactgccttttccgatgactttgacagtctctaagtcttcagcagtaatttcgaaatcaagctccttgctatcagattgctataaatggaagataaaacacatacacaagaaatctcctttaattctctggaacattgaggtctctcataaaacaagatttagggttgaaaaatttacccttgattgcttctcatctgacgtcaaccttagccccttttgattcagaagaaaatctccatcgtgaaatgttccactcgcagtcctgttttcaaattcaatgaaatttcacagaatcaattcaaacccagaaacaatggatcaaatctaatcgattcttgtttacaatctcgccaaacaaaacagatccaagtaaagaaaggagaaatcgcgaaacttacaggaaggaagagattggggattcttgagctggaacggagagcttaagctgcttcaagttcgatttgatcttcaccattttttttctttggtttcttccttgggattatcgctctctttctagggtttctatctaaataagcaatttcaagaaagtgttaggaagtggagagaagacgacgaagcaatcaataacggactaatttattttgaacgcgtaagaccgggaaaagaaaaaattatacattaagaaaaacaagaattaaatcatttgggctgtaagatttaaatgggcttgaattgataaatataagatggtacggcccattgcttatctctggtatatttgacagctggcgctaagaaaagtcttaattgattttctctttttttggtatcggaaaacgttttgtgtaaattggataaacgaattatattacttttttttttcgatttgtcggtttgaaattaatatttttcccacactttaaatgtataagcaaattaatgtatttgatatcgaatttattaagagcgtataaagctcacaaattcaattcaatgggaccagtttaatttaaattatattggggtagttttcgagaataggcataaataacgggggagtaatgaaaaagttggaaatggtcacaaagcttagcggaatccagacaagtctatcaaatcgaatttattgtactgcctgaggcccggtttgtttccgaccagtgttcaacttctgacaagaaaaaaacaatagccaagaaaaaaaaactaaattagtttcccactctcgctgtagagagagagagagagagctttaacgaagcttttgttttttgtagagagagaaaaagcttcaaacttttttcactaaaagagagaattaactcgaagaagaagaagagctgccagaagataataaagcttccttctttcgagtaaaggaagcaaaagcaaagtgtgtagttactcagcaatg

SEQ ID NO: 22099 - DNA, 3000 bp, Unknown; identical to SEQ ID NO: 1441
  misc_feature (1)..( 3000): 2750-1469P.txt file - cDNA_ID_2046039; gDNA_ID_1620403; Annot_ID_156008

SEQ ID NO: 22100 - DNA, 3000 bp, Unknown; identical to SEQ ID NO: 1463
  misc_feature (1)..( 3000): 2750-1469P.txt file - cDNA_ID_2046125; gDNA_ID_1620405; Annot_ID_156072

SEQ ID NO: 22101 - DNA, 3003 bp, Unknown
  misc_feature (1)..( 3003): 2750-1469P.txt file - cDNA_ID_2046128; gDNA_ID_1620405; Annot_ID_156071
acatggatacatcaataaacaaaacaaatctatgtatgatatataatagtttacggtccatctattggtcccattgactaattcacaacttatttgattcatattttatatatacatgtcacaacccatatcacaaaagattccagaaacacaaatatttttaattcttataaataatattatctaaattaccacttcctaactggataatgcatatctaataataatgatttctaaatggataatatatagttgcatacaaatatatattttcaagcactcttggcaggggaaataaataccagtatgtgcaagcttaattataccaaaatagtaggttattccttagtggattggtaaaactaaaacaacatgacatttattaacatatagctaggttagtccatatttaaccaaaaattcatagatgacaaaatatattagatttaaatattatgatgtgaacaagatatgtaatatattgatttgcaccagtttggtgagttatcatctaggttcaaactcgtataatacgaactttttgacccaaaaaaaaaaaactcgtataatacattttgatgaccaaagaaaataatctatatggcatataaaaatattttaggaaaatagtatgatagtatagacgtgtgatctctaaaacaaaagtgggataattaacaaagacttagaagagagtgacatacatttttatttttcaacattcaaatctatgatcttttcttttaaaaagggaataggagatttaagaaaatatagaaagaaggtcataaaagaaaattaaaatataactaaattatagtaaaatggacgtatctgttagaaaaatagacaaaatagtctttcatataatgtcaaatggaagttatgaaccaatggtttatataagaagagggatataaatgacacagaaataataaactagtaaaagaatggtttggacattattggatatgaacaagaagaacaaataaactaagagaaaataggcaaaaaaaaaacatcgaattttttgtctgtcattcaaataggtttaactacgacaacaagtgaatattttttgggtgggtctagtcgaatattctaaccactacatagattgggaaagctaaactaagaagcctaagaccaagcagaaccggttacagagtagctaaaccgcaaggactgaaaccggttaatgaagccgagccacattggtatggtacagctttcgttttcgctgacttcacaaaactaatcattatacctaactcatcacagtttatttatttataagaaaagagaaaccgaaattaagaatggaccaatggatttctgttgggataatggctttaaccgggaaccggaaaacccggtgagctcaccaccacccacagtaacagtaaccaagaaaaacaattgtcttcccaatgcacctgccacgtgtatagagacagtacagaagtgtcaccacgtttcgactttctgttgtttaaatgacttgaataccctccgttatgacactattttactgtttgaaggaaacgcaagattgatgaaacggcgttttaatgggttggcagcgtttggttgaaccacctaacaaccaccactttccttcacacttatagttcctttttttttatttttttattttattttctgttgggaatctattttttctttatttttttattaagcatttggtcttaaacaattataaaaataaagctgattggtacaagtattaaaaaggaaaaaaggctgactgataatggagttgattagctacagctatagattaataatagctgaaaccttttatttaatatttgtttactggaaaatagtggttgtaaatttcaaacaaataaaatgtacatctttttaaatttagaacaaatataacaaaagtaaacattagtttgttagaaatttttaaaaatataaaaatatttaatttttgattagactattcactttttctttaaataagatatattttaatatgattggattatactttgcttaaaatcttgggatgtttatgaaatgacttaaaaattcttaaaatagatcatgaccgcaccaatcgcagcaaaacggtaggagcgttcattagacacctaattggctaattgatatggcttgtgaagaatttgggaaccttcccgatattcaccaatatttaattataatttgttgttttctttagaattttaattaggaacggcttttgtgttaaaattacggtggccactaaagcatacacgttttggagtataaaactataaattatacattcataacaattttttccggttttccaagtttcttcctctctcggtcctcttttagcatctctacagtttctctctcctctaccgccggaaaaaaaaaacgatttctccggccggttttggtttctccgttccgttaatagccttcgttttctcgtccttggaatcgtcctctggttgatttctgaatgttcgtttgactcggctacgcggcgattcggatctccgtgtttgactcggtccctggctcgttacgcggcgttttcgtagaatgtggtttactttgtttgcatgccaggctttgtattgaattcgtggggcgagatcgtgatctagggtttcgtctctgttcttttggttcgttgcttgttgtggtcgctttttgtttcttaatccggctgaagaaaacgaaagtctacagagataatagattacggaatgatatggtgagatgatttcccctctctgattttagtcaattttgttgtttaacgattttggaattctcgtgaatttttgttgttaacgattttgttggatcagatctctaacattgctcgatttttttagagtttctgctattttttttcttgaattggttactcttttttttactctgcttcgttgtttgatccttctctatggagaatctcacgttttgttgctatttttgtgaacttgagatttgagctctgttgaaatg

SEQ ID NO: 22102 - DNA, 52 bp, Unknown; identical to SEQ ID NO: 1457
  misc_feature (1)..( 52): 2750-1469P.txt file - cDNA_ID_2046139; gDNA_ID_1620405; Annot_ID_156066

SEQ ID NO: 22103 - DNA, 3003 bp, Unknown
  misc_feature (1)..( 3003): 2750-1469P.txt file - cDNA_ID_2046231; gDNA_ID_1620412; Annot_ID_156283
gctaaattatatttacatgcgaaatgataagcatgaagattttgtttaggtgacatatttgctaacatctctttaaaatgtatattaaaaaaaacataaaatattttgggcataaaacttaatgtggaattttattagttgtctcatttaatatgtttatttaatatatctgtatttgtggtattataatgaataagacattaaatatgaataaaaattccaaaataatatttgcacgtttatgatagaaataataaaagtctatttaataacttgaaaagaaatgacatgtagaaactgatttcaaatgttaaatacttatatggatactggatacatcatccaaaacatttttcaactaattttaataaataatataaaaatacttttaccatttccttacataccaacttaataattttcagacaattaatcatgacgaacacattgaccgttacatcatatgaatgataaaacaaaaatagtggtttctgttttggttttcctattactaattgttggaaaccacttcaattatacgcgttacgtagtttgatacattgaatatatggtacaatatacattaaatttattttcgaaaaatatgaatgtgatacatacctacaaagtttggcaaatacaaaaatggtccccaacgttactctcccccacctcaaagctgttcatatcgcccttcaaagattgtgaaaatcaaacccttatcctcttaaaacccttaaaatgttttcttctaaagaaaaagttgctttcttatttttatttttattttgaattctggttttggcgcatacatattagcgaaaattagagaaaaaattcctgtatatgcaaaaaaattaacgtttttttcctacaaaatttagtataaaaatcaataaatatattaaaattatcacacaagaattaactttgaatttcttttccagattagcttttaatatattttgctttgtaataaagaacatactgtattgaaatatgttctactattaactaatatgaagattaccggtaaagaattactaatgtttcatctacattaatttttgtgtgcccataatttcaaaattttgcctagagtgggatcaataattttggtgaagattgaagaaaaaaactaaaatttggggacaacattacaaaagagcattcagtatttggaaagcttaggaccatggtgatttagaagcgccacgggcgtgatgcatactgcatcttcggcggacatcaaggcttttgaaacctttttctaattttgttatctatataattcacatcaaatagaattagtgaactaatgtttacaaaattaggtaaaacataaattatatgtatgaattaacaaactattagtttaaaagtaacatatagtcttatttttttgaaacaaaaagatttactttaataatatatttttttttttttgtgtgtggatccagaagaattgtgaagaaaaaaaattcttctaaactgcatactagtcacaccctttactttcgcgtaaattcagatagttcggctgaaaaaaattggttaaccctcaaaaaccgtcatgttaattaggtttgcacaatccattaacattaggggatgccaagtagtatcacattagtacttcaagtcctcgatgaagtgttgataggcttttgctttgtttccttaatcgtaacataaatgtcttcatgtccttaggatatatacaaacctatccttgcccaattgattattcatctgcattccaaactaaacacaatgcttcttcatgtaccattcatatcagttgggtcacactccaaacatttaattttctttcatttccatataaaaatacataatccgtgaatagttgaacttctctatatttgacttgagaagttaaatagagaaattaacaactataccagttagtacagttggtaattaccaatagatattcaaaaattagggagagaattcaatgatttgggttagtaaggtggaataatcaatatatgtctacgtctagataaggtaacatatgttttattaataataactcgagatctatataattaaaacgcccctaaatcctaatccatcattaatgtcaaatatttgaagattgaaccaaattctcaaaaagtgttaaaaactatttgcaacaagagagagcagttgggttgtgttgtgttgtgttgtgttgggttgtgttgtggtctctttgtaattttacacatcaaaagcaacgcaaagctttacactttcctttctcctttctctttcactgcaaatttctcctacccttaaaaatcgaaacttcaagagaagaaattgaggaatcaaaaattccctagattcgagggttcttctctcacttgttctatcttcctgcttcatcggaatcgtttgatttgtgttctttacattttctccgactcaacttatggtctgaattttacctagtaagtacatttgtctactttctgtttattctttcgaaatcgatgctttatctggaattgatcatgttattgagtttggcttgggttaactaatcatggggaattctcaaaatttgttttttttttggattatgtgtttgattttgggaatatactgttagggtttggctagtgtgatgaagtttctgaaactggtgatagtaaaggtgtaaactttatgctcattttaggttaaattctctgtatcaataaggcactaggcatttagtttaacaattcaatgctcagaattttgatttgagtattttgttagagttcaagtgtttagtttagcttatcgtagtctcttttggtatttgaggtcactattggctcatatatgttatcttgttgtaggtgcaaggcattagagaaattggtacagtcgtgtgacatgtgaagattgttgttgtacatatagctgaaggaactctttgctgatttttacataaaagagtgtatcttgatatttggtttgcgatcgagttaagtggaagcgatg

SEQ ID NO: 22104 - DNA, 3003 bp, Unknown
  misc_feature (1)..( 3003): 2750-1469P.txt file - cDNA_ID_2046235; gDNA_ID_1620412; Annot_ID_156282
agtcaataaattttttattatataaagcttggtttttaaagtttagtaatttataagattgtgtcacatgtcaactttagtgatctcatataattttgacattgataaaccaaaatatctttctattaattttaaaaatataaaacataattataaaaatttataattttaaacaatttaaaaatgtaaacaaatatttacaaggaaactatacttatatatcatacgtaaaacaatttaaaaaatgtaaaatggataattataaagaaacaatctgtattttattatataaaaacagaaattattatatcatttacttattctgacttaagtttaaaaagattactttttccttcaaaattaaaaagagatttaagaaattatacaattaattaataaaatactactataattaaggtaattatacagtaaagtattaatcttagaaaaatggtgaggtagctgagtatctttcgcaacagttcttctaagtagttagcaatttttttaccacaaacaaaactagttgtgcctaaaaaacatttttttctcctccgttagatcttcagtccgatctctgccatacctgtacctagctcaagatgtgagagcccatttatttacaggctttaacccatttgtttaacacaattgccgaatcaaataactattgttttgttttgaggtcgactaaaacaaagtaattagtgagttacaaaaataacagaactgcactaaacgaccataattttaaatggattaagtatatgaactttttagtttacagtatacactaaatgacataaatttagaaaggacccatgacttgtagtggtgagtctatgtaacacaacttgaaattaaattggtatataacatactgttcacagaatttttttgaaggctattcaaactctaacaacaacgacattaaagatgatattgttatgttatattaaactatatatatttcatcttggattccatttaacaaaagacatgagtttagaagaaataatatgaatttcgaaggaagaacatcatatatcttaatacaagtttatagccattatgttcatgaagggtggatgagtgaaactccatggaatttacaaaaataaaaatttcatcattctacccttaaaagaaaatcttgtggatctaccactttgagaaagttaaactgaaattataggtatgttttggtagtcgtctaaaaaacttgtccataatatgttgtggtcaatcaaaaggtggccattaaaatctaccaaacatatcatttatggactagttcttgggggtttagctttgatggacaaattttagtgaacaagtggtaatataccaaaacatattatggacaaatttttgatgaattaactaaaaaataccaattttagtactattttgtagaaatggcaggtccataaaattttaaaagagaagatagaatgagtaaaatatccttagaaaatctaagtctaacaacaacaaaagtttcttaaacaacatcaaagaaaatttagtacaaaagtttcttaaacaacatcaaagaaaatttagagcccatgttctagtggtgattgagaattgaagaaaggttgaaaggaactaatccatgtttggtccaccctcgaaacaaaaaaaattatatttgtgtgagatgtctgggtttgagccaaatacctaaacatcttatctggtagtcactaatatatgatctggtcgaaaaatagtccaaattcagaacaaacagtgtagtggcccttttgaaaaaaatgtactttaaagcacttcttttttatctgtgttaatcggaccagctaataagattaattttaaaaaaaaacacaaattatcatacgaatttattcgtgtgttttgcaatatatattttcgaaaacttgaggatacttggatcatatatagaagcatgacgacgaaaataacacaatatgtacaatttgatacaagaaaatgataataaaatttacaaaacaatttgccaaataacatgttagttagagtatagcacccatccaattaaatagcttttgcaaatgacataagtttctaaaatatccacttaattaattttcttttcttacgttttttacatcctaactaacactagtatactcaattaatttttcgtaacattggttacatacctaactaactagctctagaaaatatattaaaatcgggacaagtcaaccattagacatgtgtaagctgaaccaaatcgagtcatttattttcccagtaacccactctcaccaagaccagaaaaaaagcgtagatccagaggcgacaatattcaaacacacaaaaagtcatcaatatatataaataaataaaagaaaatacaattcctcttcatataattcatattttcatgttacgaaaacaaaaaagatcaccgacacataaaactaaaccaaatatttcaatgaaaaattaattaacgactttgacgctttatttctctttctctcttcactctctcattatatctctttcgctgccgcttttgttactttttgttcgttcgaatcccaatatagaccaacgaagaagaagacgaagaagcagtctctcaaacttcttctccagatccgaatctcactctcatttctccgatctctctatttgaatgacctacaatttcgcatctcttttgatcttgatctctgtttctctccttctactggtaagtgatttccttaatccgtttctctgattttcttattccttcctttaaccttgtatctgaagcttcctccggaactaggtttacgatttgtttaattttggaattcgatatcgatattttgttgtgcgttaattgtgtgtttttatcgtagctttgtttctctgtttatcagatccattgataagaagctttttagattgttaatggcataagcacgatatgtttgtttgttttgtagaatctcttgttttgagtaatcactaatatacacaacggcggcgatg

SEQ ID NO: 22105 - DNA, 3003 bp, Unknown
  misc_feature (1)..( 3003): 2750-1469P.txt file - cDNA_ID_2046241; gDNA_ID_1620414; Annot_ID_156379
tgatgtttataataggaattagggtttctggtttgtgtttgccattttagctactggtgagattttgttctggagttagagtttcataagttccaccaatacgttaatgcttcattaacattactatgaattagttttattttgtgattcttgagatgccaaaattgctaatacgagaacaccttcaaacgtttggtattgatgaatgaatactgatagagttgatgcacatagatgtcatcattgtgaatatccatggttgccatttctctgtagctttgatggtaatgattatactacaattgcatgattaaaaatatgctttagaattagtttttttgagaaccttgagatgccaaagttttaacatgagaaaactgccaaacattttgttggttgaattgagtgttagctttgtgaagaaccgtagcagcattttctatgtagctttaaacgtataggatactgacattggcattgactgttagatttgatctctctttttctacaggcgaagtcttttcatgactctctggatagaaggatctctactcttgaaagcttgagacaaagtgaagctcctcagcttgctgagacaactgaatagtaatctgtctcgacattgaacactctctgcttggcaatgatgttttgagttgagatgctcttttttcggttttatgaataacttggaagttcttgtatgactctactgttataaaacaatgaagtttaaggtagtcgacaatggattgaaacttgctgtaacacttgccatgaacttgtgttcgatcaattattttggatctaacattagtagaatcttgttcttcagaaagatgaacttttgtctagaccatcttcaaagctagggatctagatacatctttctgaacagaagatgcaacagttatggtgaagataagcaaatgccattgactgtaccaagaacaatttgatatctcatgattaggtctaggccggcccaaggagcccagtgtcctaatatgggcttcttggtgggttggaagttcaatatctctaagactctcacgggtctggaattttatggttttgcatgtaaaattacaacttcaaaaataattgcaaaagatcaagatatatagtcatgctagtatcttactattgcaccatttagattcaatgtatgttattgacaagagaaattggcaaacaaacgaaaaaaacctagctattggcaaatgtaacaacaataacatgtttttcttgcaatgtcatttctcaattgaaaagatcttagagttaatatatctaccattcccgttatcactttaagaagaaaaataatctagtttcacataattaaagaaacacaataaatggggaaaagaaagaaggaatcataatggaaagacatgtcgagagcacatggtgtttgtatggggacagattccaatgtaagaaagaaaattaaataaagtggaaacaataatatgaagaaaaaaagagagtgatgcatttgtctccttggcggtggtatggtggcttcactatcacccgacacctcctcaaatttggaatacacctaatcaatcatgattatattacacacacatttcgttatgtagatacgacactcaatcacggatcattttgttgttccatcattttcctctttattagtataaacatcaaaaaacattttcgaaaacgtaaatgttggatgagactttgtgatcgcatccaaaccacttaattatttaaaattgtaacgatttttgttattttctacatatgagatttttttactatagatagataggttagtgtcacaaaggtagcaattggtttgatggatatttttacttctatagtttttgtcagactccaatgaacttactcatatgtcacttttaattggatgtgaaagaagatagagcatcaatattgaaatggcaatagactgagaagtcagaataattttttgaaaataaaggacaataagagagtgtccacatcaacttttaccatcttattttgtctggtggcttctgcttctttggatttaaaccttgagacaaatagaaagacgttcttcacttggctacctaacaacttcactttctgtgctcttgtcacaatcttaacccatttttccttacatctaacgtatatcattgattccttttgagaatttccatgttcaagacaatgagagaatatatttacgcaatttgatccaaacggtttaatttgtttattagtttgttacactttgtgtaaactatgatattaaggtaaggatgttggccttggatcagttcatgatgttttttagattaccaaaaacgttttagacttttgaccataactcttttgtaagacagaccatccctagtacactaatcaaccttgatttggccatgggatctacgagtcggtttgcggttaatatgtcaacaacgacaaaaacaactgatggatatgagatatgacggtttggtcatagctaggccggtccttggaaggctctttagggactgagccatgtcctgatttttactattacatagtaacattgccatattaaactctacatcaatccacaaactagattcatagaaaacatcccccaccgttagatcgttacatcccctaagtgatatgatattgatctacaagatgggtctgtcttttaaggattgatccaaatgtcggaagcatggaagcatagtataggacaatcttggcggcaacccatcactactccatatcctttgtatccacccaaatctctctccctctctctctatatatgttacattagtatgatatgaaagtaaaggcaagcaacgttttactcattatcttctcaccaaatttatagcccacaacggatcttttactttctttcttttgaaataagtcacatgttcttcagtctcttctcatgataatataaagggcaaaagaaaaatctcacaatctttacaagagtttttaaaatctctaaccttcatg

SEQ ID NO: 22106 - DNA, 3003 bp, Unknown
  misc_feature (1)..( 3003): 2750-1469P.txt file - cDNA_ID_2046255; gDNA_ID_1620414; Annot_ID_156375
tcttgattattcattaaattctattagattttgtgtcaatggtgatactattatttgaggaattgttatggaaaagttattgaattgtttgtttttatcatatcatttatcaaacgaaaacttgaggaaaacttaggaatgtttgtcacatcatttagttattaatattttttaaaaaattcaatgttgttatcattgttatgtttttagtaaattatgaatactttagtctattgtaaatataattaaattttcattagtttaattttaaactagttatgttgaaaatcaaaaagattaagtagaacctctgagcgtgtttattcatttttggaagtctttagagatctactgtatgtatcttattgaacaaatatcaaaataaatgactagtaaattataaggaaatgtagaaaaatatagttaatagattttaaaatataactaattctattacagatagcatattatagatatgtgtagtgtttccatatatagcaagttagcatgatataggaaaagatcttaccaaaatttcaaagctactagataagatcatattagctaaaataaaataagaaatatagcataatttatttaatggaatgatttataaagagtgatgtgtaagtgttttattgatttattacatatcttataattccatctccttagatctcttcccaaagaaacaaaagcatatagagttatgacacttggtctactcagccttgtttttggagaaatctttttgcatattatattatatatacttaagaagtttcataagaaactacaccaaaaaacaaaagtattcttgatagctatctagatctcatatacaatgtctttacaatttttgacgctcatctttctcctttctgctgctgtgatctatcacatccccgtcgtgacttgcgaaccatggtgctcggcgatgccttcttccacacctgagcagttacaagccaacattcagcttgcttgcagtcgtgtggattgtacaccgatccaacccggtggattttgctattaccctaatactttactagaccatgcttcgtttgtcatgaactcttactacaagagtcaaggtcgcacttatgctgcttgtagcttcggcaatactggttaccttatttattccgacccaagtactggcacatgtgaattttaaatttaatcgaaaaaaacatagaaatcttcagcatacttatacatttttattttgttttaataatgggtttctgtttcggactcttgtatttccaaactaaaataaatgaaatagacgttatttaataatttattctgaagtttcaatgttcttagtgatgacgtcttttactttctagtactattgttgtggttcaagatcaggttgttttttgactcgttatagtattcaaaattggagacttcaaaaacttagatttgttacaaatagtgccttatatatgtaagtcttgtcaccaattataattacttacaaaaagcctttggagttaatcgttactaaggtgtagagtgcttgtgttaatattatcttacacctgacttgttaataatttcaaaataaacttccaactgattcacgaagctatatatggagatgagtttttttttttttcttatgtatctacacaaatcatcatttatctagtaaattcaactcatcatgtaaactcttttagatgtaacgtaggagatgttgtttaatggtttgtacgtactttagtggattcgggttacaaacaaattttctgacaaaggaaagtacacgcatgagatgtattcaaagaggggatgatcaaaagatatataagtgatggttgaagaaaaagatagtataacgaaatgaaccaactgcctagatttgtaaccgcatgcaaaaaaaaaaagagtcattgatttgtatgtttacatacacaaacatagaaaatgatcagagttcttaattattcattaaattctattagatttcgtgtctaaatggggatacttaacttgaggaattgctcccacaaaaaaaacaaaaaaacttgaggaattgttgaggaaatcttaagatattattttttgtcatatcatttaccaaatgaaaacttcagaaatattagccacatcatttagttattaatatttttaatttttttaaatggtattattattgttatgtttttagtaaattacgaatacttgaatattgtaaatcaaaattttcattaaattttttattagtttgggagatatatacttataaaacctttggccttatcaacataaacttttgaccaaataaaagtttaaaatattccagttcaattaactttgcccaaaaataagtttaaatgatctaagagttggaaaaaaattggaagtaaaaaacttattaatggtttgctaaaatagtttttaccaaagcgagattaaaaggttaaactcgatctcctacgtttgctaaaactcagcccaataggcccgtacactaattcggtttgggtccaatgataaaatcaatatttcttaaaccataaattgatctaatttggtttaatttagacttaaacaaatctttaacaaatcaaaccgaaactaaacccaaaccgaaactaaacccaaaccgaaactaaacccaaaccggattaaatgggtcaaagaaaactcagcccaataggcccaacagaacctgaaacgtcatcttcactctcacgagtaaagaaatttgctaaactgattgattctgtaatttcagcgagtcgtctcgtctagctctcacttttgttcgtctcttctgcgtcaaacatttccaccattttcgtttcttaaacctttcttcagctcttctcttcgtcaatcgtgggttctttcatcatctctgtaaattttctgggttacaatactttagggttttttcttgactcacatttccgataaaccctagttttttttttcagtgcgatagtggaattgaagtctcttcggtgagtttctttactaatg

SEQ ID NO: 22107 - DNA, 3000 bp, Unknown; identical to SEQ ID NO: 1539
  misc_feature (1)..( 3000): 2750-1469P.txt file - cDNA_ID_2046272; gDNA_ID_1620414; Annot_ID_156369

SEQ ID NO: 22108 - DNA, 3003 bp, Unknown
  misc_feature (1)..( 3003): 2750-1469P.txt file - cDNA_ID_2046276; gDNA_ID_1620414; Annot_ID_156367
atctctcacaatgctaatatcaatataaatacgatagaaaatgaaaatgacatgttttattcttcaataactggtgtgtaaaaaagtatcgtatgaaaataactgaaagtgccattttataccaaatcatagttgcttggtgcgtatcgtttggcataaagtgaactataatttagatgtgaaggtccaatattcccaagaggcgaagacaaaaattgggtagacttaaaagagtcaattgatcaaacatgaactgaacttgggtaagatcatactttcaatcattagaaaggatccaccgagaggtctagctatgaagataggcatggtcaagctgagaaggttaggacgtaattagtaaatcttggttatagatagatagtcatatggttgatcttgctttctcacacttaacaccatcagttgaatccaatgttaaaaataggtaattctcagatgcagtacctcataaatgttgtaaaaaagtcataaataattattcaaaggaatgcatggaagaagtgaattacatatttttaaaaaaaatataggaaaagaaaagtaaagttcgtacaaaagagagtagtattattctctttttcttctccatagggcctcgtaatatctacttagcatacgaggacacattaatattcgatcatgtatatatatgcctacgactacgagacattcgaaagttattgtctagtggtttgtattcacacaatttccgtgttaacagttttagttccatttccttcatatagagatctaaatgatactactacatatcatttagtttaaggaaggacgatgtaagaaaataaaaatctaatatacgagagaattgtaacacgttcacttcataactagctagctagtggtacttaccagttactaccccaactctagtcaacactacattaaatactataatgtgaacaaaattattttgaaccaacggctgttacagtagtttattcaactttatcaaccaatgcattaaattgaacatatttctggccgattgaaataggttgggaacgatcttataaaattcagtcttaaacaagtcttggttttcaaaaatgcaaattcattcgtatgttcttggcaaaaaatggtttaattggtttgatctgatcttatcctatcacgcaggattggtgtaatataacgcaccaaattcggccaggaaacgtccgaatataatagtccaattctacttatgaatttgacgtgttgacgtaaagaatcaaaagtcgaacttattgaataatttattcgactttaattttcttttggggttttggtatgtttgtgaccacatggtatggagttgacatttaccattttcttgattgactacctaagaaaattttaattattattcacattatggagagttatgtttccatattttggctttaatattaatcatgtggtcaataaaataaagaggatagttatggcataagattgtccataatgtcatcatcttgtttagtaaaagacagtcacatgaaccggaatctcggtttaccaaacttttcactttttcagtttcacatgaatgtcaccagattcattgagttaaacatgtattttaatactataaaaggttaattagttatgatatcatatttatgacttttaaaagacttttgatattgtaatctgtaactagttataagttaaccatctcttataattagaacaaaaaaaaacttaattatggatgaactgattttaatggaaaaaatatttagaaatagaaatacattcataatttatatctaagtctaaccaaaacacaaatctaaagttacgaataaatcatttcaagtgtaattttactaactatttgactcctaatcttatttcatcacctaaactcctaattgttatatatttatgagagataatgacatttgttcctctacatactaatctaatggttgaatagtcatgtgtttgacaaacttataaagtttgatttttcgtatgtgacatttagttatacatccataaattatataactttcttagtgagatatatgaaggttatatatgtggagtatattcttaataattaattgttaccctactttttttcttttcggtgacgtaacttttataaagtttaaccccttaatgattattgtactacataaaccccaaaactcttttctcttttcttttttctttgtgtagtactgatatcaagtcaacgtgcggtacataagaacccaagatcccataaataaattcttcttggttttaagctttcttcttcatctctacttctctatataactttgagtagtctcaccaaagtccatttttaaaaaatcaactataccatttttagctattctttggtcttcgtttcgtgtaagcattcaatgttttttttcttttatctctttgggaaacgggagtgtggtcttcgtgtgtgtgtccctgtttcattaaccagttacgtttcattctcttcttttcttacgtttactacagatttcagaaagaaaaaaaagtgtttgaagcaaaagagattaatggcagattcttgagtcattaacttttttctaattcttttaattagatctctgaacataagagataacttgcgtcattattctatggttataaagattatgcacttgattaaaataatctctagttttcctttttctcatttgctaagcaactgtttctttttcttcttcttcttcttcttcagataattatgcttgggagtggaaagcaagaaaaattctaaactttatataaaattcccagaatcaattgatccaaaaagaggtaccatttttttcctctcgtcattttccataaaagtaagcttttgattgatatttaattattaaaagaatctgtcttttgggtttttgttttgacaaatttttgttttttcagtattgtcaaaaaagataatcaagaagaagaaactctgtttttttgttctgttcttggaaaaaaatg

SEQ ID NO: 22109 - DNA, 3000 bp, Unknown; identical to SEQ ID NO: 1541
  misc_feature (1)..( 3000): 2750-1469P.txt file - cDNA_ID_2046312; gDNA_ID_1620414; Annot_ID_156359

SEQ ID NO: 22110 - DNA, 1179 bp, Unknown; identical to SEQ ID NO: 1544
  misc_feature (1)..( 1179): 2750-1469P.txt file - cDNA_ID_2046338; gDNA_ID_1620415; Annot_ID_156417

SEQ ID NO: 22111 - DNA, 3003 bp, Unknown
  misc_feature (1)..( 3003): 2750-1469P.txt file - cDNA_ID_2046379; gDNA_ID_1620415; Annot_ID_156405
atgaaaaatactcctctctccattttcaattaaaactataattttaatatattaaatgacaattttgtccaacttttaaaaagctgtattttaataaattaatattaaatacgaaattacacattaatttaaaattttgaaggaaaaaaaaagaataaactaaattcaaaatcttaattattaattttgactatttatgagataaataaaaattatttattttatatattaaaatctaacatgatattatcaaaaaaatattttaaagattatcacttcatatttgttaagatatataaagaaattaataattaataacttttttaatatcgataaaacataaaaatcaaatagatttttggattttaaatataaatatttaaaaatgattactaaatttcagtgaggacattttcttaatttgtatcccttttatatattaaaaaatagattatatattagaaaaaagaataaggtatttttcaaacaaaatctcaaaaaggggtaattttccaaatttttaatcttaagcgaccaacacctaaaactattcatcaactcaaatattaagaaaatctgtcacattgtaacagatttgttgtcaaaaaattaattactagaatgacgtctaacgataaccaattttttttaatgttataacagacttgttttatgttataagagatttttataattttacacaatatctgttgtttgatggcagatttgttttctaaaatattatattttatgttatgatagagctattttatgttgtcacagataaatttatattaccataaatctgtcatttgatggcaggttcaataaagaagaaaataaattgttggaatgaccttaaagatatttgatgttacgacagatttgtaatttgaaatccttataatgaccgatttatagtttcctttttccatgattttttgtaatagaataatactaacaattgtaacagtttttttatttagaaaatcatattatgacagatttgattttttttgtcaatttggttttagaaattcttttaaataccactaaaataagttttttccaaaaaaaaactattatgaattttatttttcaaaaatactacaaatctaaaactaaatcttaatattcaaaacgaatttctaaatcctaacactaaaccccacacctaaaaactataccgtaaatatacatagtcaatccaaatatataaaaaaaattacaacttcaaaaatcaatttttttttatgtttatggtattttaggaataaacttttgtggtttttttggaagaaaaaaacaaattgttgtattttcgaaaaacaaaaattgaaaatgtggtatatgagagaatttctcgttttttatctttatttttttgaagaaaatattcttttaagaaatatattaagtaatttattttgttggtaacggcagatttaatatatgtgtgacagttttttatgatacttgtcatattgatcgtcaaaaccattaaataaatagagtattaagcaatggttttttggacttttaacacaaaatttatgtcaatctagtaatgagtaaaatagagtgttaaactagttatttttagcttaatttgggttaaatgggataaatttcagttattatatatatatatatatatatatatatatatatatatatgtttttttccatttgtaatatactgacaaattagaacactaatttgcaaaatgattagcggggacccggaaatagtcacttgcgtgccatgaggcatcttctgtagggtttggtcgtcattgtaattaaaaataaaaatgatacggatgactcgttaatttgttcttaaaaatcaacgacctgtaatttagagtacatttttcttgttggcaaaacatttagagtagattagaattatttttgtttattttgacgatggaaccatatagaagatgtctactctaaatcattattattttaatctactctaaattgttttaaatggataccgatggctttattttaatctactctggattctcaacttctattaataccgatggctttattgcatctactctaaattatttttatttttatttttgattattttcttagttctatataagccataagttctaatatttatacagattttcgcaaattgtaatagttatattttagatcgatttggactgagtttttgtacgtaaacattcactagatctcccactacataaaccttaatgaaaaaaaagaaaaaaaaaagagaaattttataaacttataagaaactttaatttttagatcaggtatttagaattttcttaaacgtagtaaagcttatcgtgcatgcatatggatatttcatggagatgtttataaacattcagaaaaacttaatttatttttagaaagaaaaaattattaactttatcagtagaagaaatatgtacgtatataaatattgtgtaatatctactgctcagactatgaaagactctttaaatgcaaaacactgagtggattacgaaaataaagcataaatctaaaagatgtgttgattatttttacaaaatatataaatatttatcattatacgagtcatagtaataaactaataattatcattataaaattttaattttaagtctatgtatgtgctaaatctaaaaaataaagtactttttcgtgaaaaaatatggaaaaagttatatatgtgtaatttttcatatttcaatacatcaattcgaagattatccattagaaagacttggtaaaaatttcaagcaaatattaagtaactcgtggtggctactttcaaaataaaacaaaagcatgtgacttattttatgatttcaaaaagttgataggttcggacgagttcacaaataatggaactaatagatccctataaatacaaagcattattcttcgtttatcttacaaaactttaaacacattgctttctattttaagatctttctatctctctctctctccatg

SEQ ID NO: 22112 - DNA, 895 bp, Unknown; identical to SEQ ID NO: 1542
  misc_feature (1)..( 895): 2750-1469P.txt file - cDNA_ID_2046438; gDNA_ID_1620415; Annot_ID_156391

SEQ ID NO: 22113 - DNA, 3003 bp, Unknown
  misc_feature (1)..( 3003): 2750-1469P.txt file - cDNA_ID_2046448; gDNA_ID_1620418; Annot_ID_156512
ccctaaatttcctttatttttttagttttgtattcttttctccattctccatcatcaaatccatttcattatctgcaacctccatcaatgaacgactgtgaccaacaaaaaaagtaacatcatcgatttctccttttcgagacgaagaagaaggagatccttactctctgctaccgaactccctcttcccttaatcttcctctttttctggttccatgctcttctctcttgtcttacttacggtttctggtttcgttgtttttttttggtaaaaggtttctttggttttgaatcataaaggccaatggtacatgtgattcgttgattctagcttaggctttaaattgtaaatctttaaacttttttttttgttatgggttctagattttatgattttatccttcaatttaaatttatttttgttagatctgttgaatttattgccttgtttttgaattgaaaaatgtttggatgtcatttgcgtagacgaaaagtgattggacgcataaggctgggtatgtggtggttatgcaagaagattggttgatgtttatgagctttttttgaaactttggtccatgaggctgcggtggccgccgtgagctccagtgtcttgtctggcaactccatacttatgtcgactcatggatgtcaagaaaagtttacgagaaaacacgaaatgtatatccatttgttcggcgctaggtggatacaccttcatttgttgcactatatccatttggtcgatgtttcatggatacaactctacttctaaaaatcatagatgaacacgtacttgccgattgtcagctataggaatccgtccattactcttcgaagatatgttatccaactaatgaaatattcttttatttgattttggtgaacaatgtttacatttggtgaacaatgtttagatttggtgttattcatctttcgtatatttgtttgtgcagataaaacattttaatgtaaaaactgtaaaatataggatcattcctatggtaatattcgtatgattatattcaaaaatggttcatacgagtgtgtaaaccctctacccttaacgctttacactaaatcctaatttacttaccctaaaattaaacccaaaccctcccatgatccttctccactaaatctaaaaccataaaacaaaactctgaaccatacaaaaaatgataattttaccaaccaataaaacacatttgaagcaaatcaaagacatagttgtccattgatgactatccaagcggtttagtccatgtggtaatctagtgactcatgaggtcgtttcatttcaatacacaagtttatacatgaatgataatcaccaattcaaacacccattcaaagtacatcgtctatttttctttaaccatttattcacttgtgtatggaaactcccaacattataaccaaaattgtctactaatcctagatataacaagaaacagatttacttatatagtgtataaaaggagcataatatcgatgtttgcgtctgaatggacagattcccttggatgacattaacaagcaggcgtccagctgaccatatatgtttgtactatcatctatggtcaccaatcatttgaatcaagttgaattcatggatgcacagtacgtcagtttgtgatgtaaattaatgtaatgcaaataatcatctgcaaaattgaatcaaagagaatataagatcaacacaaaagcaagtgtttggggaatcggatgcatcataacaagcgaatatctactcaaacaagtttaaactcaattcaccataacattcacacccaataaaaaaaaactcaatatgaataaatcagtgtggaaagaacctgatacaaagctgctccatcaatggaaaatcttcaaacactccacaagaagcaaaagcatccactaatcaagttttttttatctctctctctcaagctaaaatcttaaaccaccaatatagaataaatgagaaatcgtttactctaaggaaataaaaactaattgaaaattgagaaaagtgctatataagagaacacaactttgattaaataagcccaaaattttctctcgccgctgtgattatcagagaagtgggagaaccacgactgatgatttgccaccaaaaaccagagaaacgagatcgcggcttctactgctacacgagatccttcactcggtcgctcgttcacttattctttcttttcttttgttctccatattttatggtatctgaaattctaagatctagcaagtgaagaactggaagaaaaaaactgcaaactttaaggttttggagcaattgaatgaactttaggtagaacgcatgaaactacaataacatgaataaacacatagacaacaaaattatcagggtacagatttttaaaccaagttgtaattctagcaaacccatcaaccatcatcttccgctggattttgtgttttctaaagaaaaaaaagagatagaaaaaggaaagagacaagagattgtaaccgatgtaattaaagggtaaataagtcaaattgtccatacaaagtgcctattccttgaaaagtgtttaatcacgtaaatatttttaaaaaagtgctctacactgtaatattctcattaatttatccaataactaaatacgacgtcgtttagttacgaaaggtaatttggttcggcgtcgttacaaagactaaagattcacatgaatgtaactgttttttatccatatcaattttcaaaccaaaccaagaactgaactcgaaccattttttatccaaatccaaaccaaaccgaaatttaattggacctacaagcccattatatattcaaattttacaaaattggcataatataataatacaatgtttaataaataattaaactaaactgagtaaaagagggaaaatctacgatcctctctatctccttatccaacaacaacaaaaaacgaattctcgaagagaaagacactgaaatcgaaaaatctatagagagctcactcactagcaatg

SEQ ID NO: 22114 - DNA, 3000 bp, Unknown
  misc_feature (1)..( 3000): 2750-1469P.txt file - cDNA_ID_2046529; gDNA_ID_1620430; Annot_ID_156842
tttcttcgagtttatcggttaaagaatattactaaccaattgaaactaaagaactgttttaataatatttgagaaattttatttttattcaaatttttgttttgaataaatcaatatcaaaccaagaatttagtttaactcaaaaacgtagttgttatatatacttatatacctgattgattgcaaaaaaagctttaaaattttggcctcccaccacagaggtgttcgcaaaaccggctccaagaaagagtctcctatcaatttgaacgaaacccttacattttatattgtaacatccgctttcgaatgtatcttgctgcaaaaaacgatttggggttaaagaagagaaaaaaaaaatctactttcttgtgatagggacagacgataattggtgacattgttactcacactccagtatgcagtaagtcgtgtacggctatcgccatatagtgcaggaatcaccttaatatatttcatacgtagtaaaaaaaaaaagttatcagtaaaacttttaaccatgatatttattcaaatgaactaattatacatatgctaaatgatggttgcattaagtgggtttaattttgatctagtatatcacgatttaaaaaaacaaaacaaaaaattaaattcttacagcccaaccaaagtgggcactggtgcgttcgccttcatactcagtattgagccaaatgaaagccatgctgaattgctctttatttgtcaatttaggttggtaaatacttatccatgctgatgctccacgccacggggtggcatcgattttcttcattaccgcagcctgtatatatatacacatcagttttttcaaaaaaaaaatacacatcaaatggtttggatcatatatagtaaaggtataaaattttagtcacttcacatgttgaccaacagttccaaatccattaataggctgaaaatgtttctcggtgtggttgaaattatttcttggtttatggattggtacttgtccttgaggacatccttcttctggtatatcaaactcagcaaccatttcatcgtttgataagttttctgatgatgtatctcctgagagcatggctaaggcttcatcgctcggtctcatctatgtgatgcatcaaaaaatatatcaatcaaatagggataagtatatgatcatgataaacattaggtgcaggaaatcgacaaacaaatgtaaatatatagaaatatacttggattcggtgattttggagtttagggtgttgtagcgaaggttgtttgtagatatcaacgcattcgtattcaggttcttgaggctacaagatatgagaattttttttaactttatttgtattatatatttaagtttatatcaaagtgcttacaaaatggtgacagaccttagtattttgagaccttccatggaagcaaagtaatgaaagagagaatatgatgatcaacaaccaaggagaagccatttgcttagtttgcatattttctatgttcagccgttgaggcggagccaatgtatatatagggaaggtggtcatctgaaaattcttaattataaggtaatttacttaataatattaattcttaaatgtttttgtataaaaattttcatgttgatgccatatgatcatttcctacctttgaccccattcataatattcttttgagaaaagaacttattgacccaatatattaaattagtaatatttttaattagtaaactaattcataaaatataaagttaattgagttattttcatacctaaaataccttatattgttttgttaggcttataacagcttcaacaattccggatgagcttgggctgaacaagaactccacggcccatcttcaaacatagaaacccaatcagctccaaaccagctcaatccttaaaccaaattggaatcctgaaccacacatacgttatacgttaaccgaccgattaagctgatcgaacgtctgaccagccaaactgatcttcatttttcaccaaccacacttaaaacaaaaacgttttctcttaaagaaaatttaaagagacaaaacaaacaaacaaaacttcagtctctgcaaagctccatcctttgtggttgtgtcgtagatagccattcgagtggttaaaagttaaaaacttttatgtccacttgaatccttttttgtttctttttggattttatctgatcactcgttttgtgtctctgaatctctatcccgtggattcgcatctggatttgtttttttttcatttttattcgagcggctaacctttctcggatccatctgatatcgattggattctctctaatcaatcgttggtaagctaatatttaatcacttttgattgaattttccttctgggtttttgatctgatttcacctcattgtcttatgaatccaccatttgagttctagggattaaaagattcaaactttctcagagacaactgaggaaaaatgacatgtttttagagtttgagtttggttacattttcaggttttgttaagatttctctcattgtcttctgaatcctttgatttggtaatgattggaaatgatcataagattcctactttcttggaagcaaaataaaaatatccactttttatgagaaaaactctttgaaacgtctttgttatattcaaacttggtttgtttatacgttttgattggctaagtggttcaggtcacaagtgacaaaagtactgattttggatgatgatatagttggtttaagtggttaggttataagttaatcttgactcttgaaggattattcattaacaaaaagtagtgagtttggttggtttatgaaacatttggttagttaaagtggtttaggtcacaagttaaatgacaagtattcattaacaaaggttttgattttggtttgttctgagaaaattgtttcaagtggtgtaaaacttattcttaattaacaaaaacttttgatttttttggttgattctgagaaatttgattgatttattgtttcttagaaatg

SEQ ID NO: 22115 - DNA, 3000 bp, Unknown; identical to SEQ ID NO: 1647
  misc_feature (1)..( 3000): 2750-1469P.txt file - cDNA_ID_2046551; gDNA_ID_1620430; Annot_ID_156835

SEQ ID NO: 22116 - DNA, 3000 bp, Unknown; identical to SEQ ID NO: 1646
  misc_feature (1)..( 3000): 2750-1469P.txt file - cDNA_ID_2046555; gDNA_ID_1620430; Annot_ID_156834

SEQ ID NO: 22117 - DNA, 3000 bp, Unknown; identical to SEQ ID NO: 1703
  misc_feature (1)..( 3000): 2750-1469P.txt file - cDNA_ID_2046681; gDNA_ID_1620437; Annot_ID_157045

SEQ ID NO: 22118 - DNA, 3003 bp, Unknown
  misc_feature (1)..( 3003): 2750-1469P.txt file - cDNA_ID_2046770; gDNA_ID_1620449; Annot_ID_157412
ttgtatttggttccactccaatagatatcagtttggttcactttcgattattttatccaaaatacccaaaaaaacaaaacatcaaaatatccgagacttttttgacaaaattgtaatgactcaaaatatttgaaaattaacaaaatttattgggttagaggttgggaaaaaatgtattgggtttagatgtagttttgtataggaattgaccaaataattttggttccattcgggtacttatggatattctgttcggttataaccaatattcaatggataatgtgactgagatccatttagggtatttagtattctctagtgtgactgagatccatttggtttcattattgattttcaggtctaataagtataatcaaatatatttttgtaatttaatacatagatacaaatatttgttgaaaattagtttttttcgcgatatcgtcatatcctagtaataatattaataataataataatattattattaataataataataataataataataataataataataataataatatttcatgtatgcatgtatatataaatatttattgtgactatgggaatccttgaaagtgcagaatattaattactaaaaatgtagtaaatgaaacatatacaattggtaagtgtatgttgaaaatagtgaaaaaagagaattaactctctttttcttagcaaaaaaaacaaaaaaaaactaactaagtttaatcaaaaaataagtatgatttttctttttggaaactaaaatacatttaagtctaaaacctatgaaaaatactttttgttggggtaacagagataggcatattccgctgtaacaaataacggttttgccctcgatcatcttcttctttccttcttcatcgtttctttctcttcttaatattaccaggaattttggtttcaatttttttttttatcacaaacacccaataataacaatatatataccctaaagaatagtacaagaggaacccaaataaaataattaaacccaatgtatccaattaaattcgttttgatgagtgaaatctaaacccttatgagagtatagggaacccaaatgcttcaatcatagacacatatcgaatcaattatgaattttaattaataatttaaattattttgagaactttggatagggagttacttgtataaacttgatccatggagtagggtgtaaacgatgttgcaactagtggaataagtaaagaaataaaagggaaaataaaaatattttttgaaagctgtcaagggtgaaaccgtaaaattatataacgtaaaagtacctaaatttgtgagtactgtactgtgatgttcctatatcgacaaaagcacacactttaatgtgccgatctcgtaattgatccaactaaagtaggcttggtaaaaaaaaccaatgacggacaacacatgaaatattgctctctctcgctctctcttaattctttttaactctctcaatctctctcctcaaattggatatgagtttttcggtgagcgatctctttcttcctcatggatctggttaactttccagaacagatggtgaatccgtcggaaaatcttgcacaaaactaactgtatatcaaaaatgaggagtggagcccatattttcaatgtcaggatagctactggcttctatgcttttgatgaaaactttaatatcatccatgatgcagatattcatgaaagatggatgttagtgagaatgactgtcagaacccctgctattccgggtgttgcttttgcccaatacgatccaactaggttttaggtcacaatacatttacagctcagttcacgagcattctctcttgcttctttacaaattaagtaatagtaatgtttcatgtggttcatacaaccacggcgaataagatttgcacaacctaataattattgtagctttgttttttatattttcagagttcaaaattgaaccataatttaactagctacataaaaaacaatttcattacaataaaatgagcatatgaagttgtggtacaattgtaattaatagaggtttttcatatgcatttgcatatatctaaaggtcgaatatgacgatgtggagagctttttaatggtgattttttttacagaattctagaagatgacgaactaaacgaaatcatattcttggtgagtgcttctaaccttatagaaaatcttttaaatcttgtcttctaatgatatgcaaacttgtcatgttttctttgttgaggaaatgaatcaagccttgtaaattcattatcagttagtgacgatacaaagtggatgttgaaacttcatggctacagagatacttagttctcatatatcaaaaatttgcatatattcatatgttttcttccaacgattaaatgctttgagatacgactatattgtacatctttcagttattgttaattttcttaaaactagattcggaccgcatgttcgtgctggattatgtgtgtagatgtatttgtttggtatagtattcattaatccaaaccagggggaaaaacaatgctttataggagggtcaactgaccccataactttttaaaacttctatgttattagtagcctaaaacaatttttttgaccctaatacaaagattaatgttagaacatgaaacaaaaaaatagttcaaatacttgaaatttagtttcatagcatgcattaatgaaacaaagggaataataaattattaaacatgattaaggtgttcttagttttacacgtgggggttgtcaaagttgaccaaagcgttctcactgtttctttaatgagaaacaaatcaaataacatgggaacgtcagagtaaaactcgtgtcgttttgataatttaacaactaacgttgcgctgttttttagttacttagacacggtgagaaacacaaaaactatagacgacgaaacgattcctcaaacgcagaagtcttctccttctctcgacggattaagcttttacacagaagaggagagatatg

SEQ ID NO: 22119 - DNA, 150 bp, Unknown; identical to SEQ ID NO: 1817
  misc_feature (1)..( 150): 2750-1469P.txt file - cDNA_ID_2046800; gDNA_ID_1620452; Annot_ID_157532

SEQ ID NO: 22120 - DNA, 3003 bp, Unknown
  misc_feature (1)..( 3003): 2750-1469P.txt file - cDNA_ID_2046812; gDNA_ID_1620452; Annot_ID_157529
cgcatcgttggacatgaagagaatgcagaggtttaggctggcgatggtttttgacattctcaatgtattgcaatccatcaggctgcttggtacgagaggacactacacgattgatattgcggttggagttggcgctgggattctctttgactcattggccgggaagtacgaagagatgagcaagagacatttacggaatactcgttgtagtttgatttcaaaagactctctagtcacttaaatctattttttttttccggcaaaataattgtatattacactaaatctatttcttcttaaaacgtttagaaacacatttagttgaagtttaatgattttaatttagtttctattaaatggttctaattgaataccattcgttgaacctaattactaaatgtgtacgtgattgtgaagctgcctcattgagttttttaaatggtatatgtgtatattaggtcttcgtataactaatttatgcaaagttcttggttgaaaagttctccaatatagtagtctttatattaatttgttagttcaactaataaatagatcaacaagtgaacatttataatattgggtggctaaaaacccccagataatttaattgtgaagctcttatctaacacatttattgtattcaaatactgatattaacatatgtgtatatatatttacataaataaaaattagttctattcatcagaatcggataactcgaggggacaagagccatcatcaacattagcatatgggttgaaatgttctgaatttgtatccatgcatccaggaactagatccaagttgcatctatctccctgaaatttgttcatacattttaaaatttagtgtattcaaattttataggacatagtttggcgagaacttactccttcgaccgtcaagttggcgatcatcgtgcaacgagttggaacaacgttcgagtcaggaaatattgctctttcgcaggctccatcttggctcaactcgttcgctagaccctttttgcaccaattgataaatgataagttttgcatattgcatatatagatgataagtagttgtgaaaatttgaaaagaaattcattacatacctcattgaagaactcaataggtttgttttgccatcgcttggggacttgaaactgaagtctgtatggaccgtcccaatcgacaccattagtgaatgagaatatcaaattcacagctgataatgattcataggaaagataaaagtgtcaaattaatacaaataactatttggtcacaaaccatgatttgatttttgattataaaagaaaacgaaccatgcttaggaatgcaaatctgcatagtgtatatcggagaatcggctttgcctcgatctttcttaagcattgctcttggctccccaccacacatgattggttggttaaatcctcctgcaccatttagtaaccaattgaatattttcattttttttgttgttataagtactccataagactggtctatgtagctttctactaatttaatttggaaatgaaaatatatcacttgcaagccacacttagaaataattacttgactaaaccccacgattagactgctaactataagtacttgtacgaaaacaattatacagtatgtggtagccccattaaacagccgccctaaccgcgccaactcgttgggacaactcggaatacaagttaatttaattagatgttttatgagaaactcaccgttgaaagcaaccccatagtcttcgttaagagtgagtttgcttgcagctggattatagaaaagtttcaacttttcaccctaatccaaaaaagttttgtaagaagttaattgagttaaagagcctcaacacttgaaaatagctagagaaacttactgaggttggtggaagaccattcatggttttccagtacacaggagcagtacccatctcgaacatggcccatgaaggaagcttgtatctatcaaaataatcaatcatgaactatgtttattattatattcatatagttatatcgaccaaagcaacacgatgaactaaaataaagacagactctttgatctcttcgagaggtgcaagagtcgtggcaacagctttaacttggagatcaagtttcttcctcggaaatctccttagtattggaccaatccttgaactgtacactgtatcattcattagctttagttttaactcgttatatagctagtattatagattgacataaatgaatcaagaatttgagtgaaaatacttacaaaaactacgtttcgaggataaaggctgcgacggagaggcgaaaacggcggaggtattagcggcagcagccatcgataccgatctaatgagaaaccttttttggggatgaaagaaggagaaaaatatgtaagtaattgatatatggcttcaagataaggatttttcacaccacaaatacaaatatctactatagaatttttttcttacacatacaaacaaagacttaagtatcatagagacaaatatcaaatttgaaatgtaaggtctatggaacatgtccctttcactcttgggatttttcctttaatgaataagaaagaatgggctcaaaaccaaaataagcccattcaagagatcaatgagcccaattgtttgaaagcaaatattggggtgatttgttaactttccaagaaaaacacgggcttttcagcaaaacaactcgaaaaattgaagagaagatccgggttttagataactgccccaaattggcaatccaaatccctaaaaccatcttatcctctctttccaaatctagccgcaatgtagtcccgtgaaccacaaaaaagatgagatcttgcacgtctctgtcatcacaactagtactactaattgtgaagcatacaaaaaagaccgacccttatttatacacgcacacatattaacatatttatactactagtatataagttaagggtttaagcctcttctcttccttctttctcttagccatcacatcgataatg

SEQ ID NO: 22121 - DNA, 3000 bp, Unknown; identical to SEQ ID NO: 1816
  misc_feature (1)..( 3000): 2750-1469P.txt file - cDNA_ID_2046828; gDNA_ID_1620452; Annot_ID_157525

SEQ ID NO: 22122 - DNA, 3003 bp, Unknown
  misc_feature (1)..( 3003): 2750-1469P.txt file - cDNA_ID_2046832; gDNA_ID_1620452; Annot_ID_157524
tgttcattggttctgcaattagtccatatgttatgttgaatagcttgggtgatgattcctttataacatagaaggataggctggaaatagaaaaaactgcactcatgactgatactaagtgaaatgaatactcttgttttctttttctctttgtaaaggtcttgtgggagctgtgacaagggttcaagaccgcgtaaagattttcctcgcagtgttcttttggatgtttctcttcttctgggttacagtcacagatgggacgggtaaaggcaaaggcaagaagggttcacgtttcaagtagtttccatatatgaagaggctttggtgattatctactactctatactgtatatatatcaagacttcaaagagatcaaattacctgtataaacttcaccaagtaagcatcttccttgtacatcacttattcagatgataataggaaacaataagatcgtgttatcttcttggttaatgctagtgatatatagtactcaattcctgattctttcccagtctccatctgatcatgcttaaaaaacggcgtcgttgagcaataggactcaagacatgaatgggcctaatttatgggctttaaagagtttaaaccacagtaacgttctgttttaccggactccaaagcaatactccattagagtttttttcccccaaaatggagaaaagtcgttaactatttggcacgtgtattgcatgagcaccaagtaagtctaaatctgcattaaatgcgaacatccgagtcgacttaacaccttttgatcaaggctttaacgtgtcgttgttaccatagaatatagatgatagagcgcattttatatcactggatatagacacgtggttaaacttaattgggttgttagttaagttgttgtgctacctccaagtgactttatcatatactctgtgtgtttctggtagtaaaaaaaggtctaaaaccatagtgttaagcaaaagagaaaaagaagagcagagcaaaatccctaaaattttaaactctgttttgctttccgacaatcaaaccctaggttgtctgttgcttcattcgtgtaaattgttaaattttttgtttttgttttcttggcattttgtggttgatctttctaatttgttttcaggggttgctaaagggaaaggagagagatgggtggtgaagaggaagttgtttctgttgagctaccagcaccttcttcatggaagaaattggtttgttttctttgtttcatacaaagacttagaatttgttgtatatgtgtagtgctgcaattaccaaatctttttctttgaagactctgaatatggtagcttttggtggcgaaatgttagtataagtgtaaataactttatgttgattaggtgattcaaaggttatagacttagaaaaagccacatttgattgtgtttgatctactatttctacttctttgttcttgacttaatgcctcattttgactatgtttgatttacttcttacttttcccgattcttatggattttaagccacttgtaaacattgtttaagctacattaaggtcttctttagaatttaatctttcagcgttttgaacctcaaattttcatattttcagaggtttacattaactgacttgtttttgcagttttaccccaacaaagtgggttcagtgaagaaaacagaggttgtgtttgtggctccaacgggtgaggagattagtaacagaaagcagctggagcagtatctcaaatcgcaccctggaaaccccgcgatcgcagagtttgattggacgactagtgggacacctaggagatctgcaagaatcagtgagaagactaaggctacgccgtcaccagataaagagccacccaagaagcgaggtagaaccaaatctccagtgtcaaagaaagatgcagaaggtgagaaatcagagggaggaggagaggaaaactctcatgtgaaagatactgaaatgaatcctccagagggaatcgccgagaatgaaaatgtgaccgataagaatggctccggtgaaactgagagggtgaatgatgcaaaagaaaacattgttgctgaggaaactccaaatgcggctccagttcaagaagagggtgagtcgatgaaggagaaagctctggattctgttgatgataagagtaaggagactgacaaagaaaaagatactggctcaatcgaaaagaactcggtagatgtagagaagaagaccgttgaagctagtgatgagaagaagaattctgaagctgagaccagaaaccatgaagaaaatggtctgaccacagaagctgaggggaaagagaaaacagcagaaggagaagctaccggatagccctgttctgctctgcttctgttagctcatgaaactgtaagtcagttgtttctatcaatctattgaagtatatggtttcctttttgcttcctactcggagcattatcgcggtgaaaggtgttgttaggctgagatatgtattatgagatatgtgcaagttctgtttggttgtaaggttatgtagaggatatattattgactcttctctaaaaccattgcaatcactaggtttgatgttttatctttctgctacaatctttagtcattttcgtatggatggacaatcaagttatgaacaagtcagattaaagatccacacatagattaatcttctagatttctttttatcattggttcaatcttcatttgaacgccataaaatgggaaacccaaataaaaaaatggaagaaagcagaagaagacaagaggaaaaaggtaaaagttttgctttgagagtaaagtaagaatctaatgcaaagaaagacttacaatgttagttttcttatttccttgattccatccttttgcatggtcccagggacgagggtttagaatctttctattaaggaacaacttcatagtataaactcttattgttcccattttaggattaaaaaaaaaacttgctctgttttcaaaaacatcattcgagacagtatctcaaatg

SEQ ID NO: 22123 - DNA, 3003 bp, Unknown
  misc_feature (1)..( 3003): 2750-1469P.txt file - cDNA_ID_2046855; gDNA_ID_1620452; Annot_ID_157519
ttggacacagtccaccatgatgacttccatcaacctaacttcactggtgctgctatcactaaaggtggtccaagggagccttggcatgacattcactcccgtcttgaaggtccaattgcttgggatgtcatgtacaacttcgagcagagatggagcaagcagggtggtaaagacattctggttaagttgagagatcttagtgatattattatcaccccttctcctgttatgttccaagaggaccacgatgtgtggaatgtccaattgtttaggtccattgatggaggagctgctgctgggtttcccgagtcgcctgaagctgctgcggaagccgggcttgtaagtgggaaagataacatcattgataggagtatccaagatgcttacattcatgcaatcagacgtgctaaggatttcatctacgttgaaaaccagtacttccttgggagttcttttgcttgggcagccgatggtattactcctgaggacatcaatgccctgcacttaatcccaaaagagttgtcgctgaagatagttagcaagattgagaaaggagagaagttcagggtctatgttgtggttccaatgtggccagaaggtctcccagagagtggatcagtgcaagctatattagactggcagaggaggaccatggagatgatgtacaaggatgtgattcaggctctcagggcccagggtcttgaggaagatccaagaaactatctgacattcttctgtcttggaaaccgtgaggtcaagaaagatggagagtatgagcctgctgagaaaccagaccccgacactgattacatgagggcgcaagaagcacgccgtttcatgatttacgtccacaccaaaatgatgatcggtaagttcacatttcaacggaaaaaaacttgagaagtatacataaatgttgtgcctgattcatttgatgaaatccattttgcagttgacgatgaatacattatcattgggtctgctaacatcaaccagaggtcaatggacggtgcaagagactctgagatagcaatgggaggttatcaaccacatcacttgtcccatagacaaccagctcgtggccagatccatgggtttcgtatgtcactctggtacgaacacctgggaatgctcgatgaaaccttcctcgatccatcaagcttggaatgcattgagaaagttaaccgcatttctgacaagtattgggacttttactcaagtgagtcactcgaacatgaccttcctggtcacttgctccgctacccgatcggtgtagccagcgaaggcgacatcactgagcttccaggatttgaattcttcccggacacaaaggcccgtatcctcggcaccaaatcagactacctgcctccaatccttacaacctaatctcactaagcatgtcaagtaatgatctctctctccctctctgctttgctgctgttgtagctttgaataaaacttgagtgtctacctttagaattaagaagtcaaatggttgttatgatgatgcacttctttacccctttggtttttatattcgtacaatgacgtggtgagagaatgtagctttgtgatcttgttttgttgttgttatgtacctttggacttatgaatcttatatctgatccttttctttttatttagtgtgtttcacatcaaagtttaaacaaaaatagcaatgaactaggtaaaacatacttcattagaaaagtgaaagtgacaatctagagataaagcatgaaactagggttcatatagcacaaaactaatacaaaaggggttttaaagttttaagccggaaacagggcacgacacaccggacaaatcccactgttcctaagccattcctctccacaagtacgatgaaacacatgcgaacacggcattcgacccgcttccacatctgacccaactcggatattatccatgcatatcacacaatagccttcattctcaacaacaagcgtctccaagtgcatctccaccgcctcatcgttcgctggagcaaccgcaagttgcacttgcacatctacgtgatcatcttcaccgggaaacctcgagacagtaacacctatctttacttgtaccctctccacgtctttcgcaccatctttcttcaaatccttaatctcatcagcaagagtgttaacaatagcagaataaggagggacttggagcgaatctagaatgtgatagacgatggctagtgaatgatcaccgtctccaccaaacaaccaatctcgatcaaactcgtgtgtttgctcaagggttagagtttgaagattgtcaaaatcgggaaaatcttcttcttcttcaacgtcatcatcttcttcttcggcacgagtgtaatgcactttgaaatcgaaaaacaatttttggctctttcgtagttctccgtcgtagtcgttgtagatccgcttgacatcgatcacgttgtctacgttatcgtttacatagaaagccatgattttgttggaagaagatgggtttgattatttgctgtgggtttagggttctaatatagagagattagagaaagatgaggcaattttgagttaacggcaaaaacctgaaaaaaggaaagtttgcttttgcttttatcttgctgagaggaagagagatcagatgatcaaagaaggagatcgctaaagtttcgtaacaaggctgagccaaacactcgtgttatatatcccactcctcaatttccgtttaacttgggaaattttccttttaataaaaaataccgaatattatttataatatgaaagtaaataaagtattaaccaataatattttttgaggatatttaataataactactttccttatttccctattttacaaaaatactcaggtggattccgaatcaaggtcccgatatctcagatctttttgtaaatatcatttcgtagaagttgtggccatcgacgatcctcattgttcttctttactctcgagatcttctttgctcaaaccttttatcgtggacgtctagaactgatg

SEQ ID NO: 22124 - DNA, 3003 bp, Unknown
  misc_feature (1)..( 3003): 2750-1469P.txt file - cDNA_ID_2046859; gDNA_ID_1620452; Annot_ID_157517
atgtgtcttcatgttttttggttccattttttaaagatgttttttggttccatttcccttaacttcgtttgattttcaaggaaatgtcaaatatctgcaattatataacataggtaaaaaaagagaggttataatcagctgtacattaaacacatagtgtatatgccgcgatttatatgatagtctccgtccactcaacaaaaacttaaatctacaaaataatctgaattgatattttgaatgcatattaaaaaggtgttatttgagatatcatttttgaatcctacttgagagaagtggtccacggatttgattacatgatactcgagtgtgacatgttcaatcctagcaaaaagatatcatgctaaatttgtcttcttttgacaaaagtttattggttttcagtcctagaaacttgtaaattatgtaagcgagtgacaaagtttattggttttcagacctagagagcagtgaatgacaaagtttattggtttgcagacctagaacttgtgaacgggcagcgaataaagtagctcatatcattacgctttcccgattctagttccttggttttatatgacgacggttatctgttgtgattgataaaccggatcgtataactaattagtaattcctttcaaacttttagtttgaagaagatgttgagccaaaaaacatttatataatctatccgaagaaacttgtgtttgcttcttaggccatcttcaacggtaaaattaggtggattatcttaaaatattgttttttaattattatcatataatattattatttacttaaataattattctgaaaataataatttaacctattaaaatgtaacctattatttacttttctctctctcctactttattattattttatattttttagttagtgaaaaaccatactagagactactgatggagatgttcttatcttttctgtctatttttgactttcatgattcgcttttagtttcttttcttcggcttcgcttttgggttttctattttagcttttttctttttgcttataagaaaaaaaaaaaaactaattatgtacttattgtagtttaattatagtaatattcttttgattttttttcttttttttcctactaaacagttaaagattcacgtactacttatcaaattcagttcagacagtcggacaatatcaataggtgcacctaaatttcattccaagttttaccctaccacaaaaaaaaaaaatcattccaagatacaggcctaaatacgtgtacagaatgttaaatcaccaggcccaattatggcccatattcaaatatcaatagcacctaaatttctagtttctacgtcccttcttcattttttccttgggtcaactaaaattcaaaagtcctattttctaaaataagctaatatagaagcaaaacaaaggaattgggttattttaagtccagatttttcagacaagtcaccggtgagcggtggctgcgtatcagaaaccttgccgtgagcattgctaaataataaacatagataggggaataagctccaaaataagctcccttgtatcctaccattgtgttacaatttagcattacgccgagttgccaatactgtcttaattttccctttgatccccatatatgagacacctctgatctgttcttcaccgcatttttatgattgacggttttgctgatggttagtacattagaacttattagataccagagaatgcaaatacattgtataatccccatgtggccacgttccgtttatgaggagtaatattttatacaactatcacattcttctttacccaaaaaaaacgaaaaaaaaaactacccaatcttatagcgaagatgtgtgagatccaatgatgaagcaattaaattattgctagtgaattcatgtcattatgcgaacacgtactacttgagaaaagtacaccatatagttttcttgtgatggacggtgaggattcagcttgggaaacgatgtcgtaacgtttggatgcagaacgtcgggcgcacgatttggatatctcttttttttttttgtctcccctatcctcaagtcagggattttattacaactttgaatatttatttcctttttttatgtcggccttcttaaaacttttcaagattttcaattagtcactaaactttccattttatctttttcactctattatataattttagatgtaacgtaaaatattactattaggatgtgagataacataatccaaccacaattatatcgttatctagtaacattaactatatattataagttataaattgaaaggaatctcttgagagtaactatttagggcctaattgtgaaactaaaaacgtgtagggctgaaactaataacaattcgtacgttgggtcactattaaatcatcaaagatctgtagaaaataatgaaaaagtggccccacacgctccaattaaattacagcagctccacaaagtagctcttaaagagcttccatcacggaccagatcccgaattcttcttctgaccaccgaacgattgagtttctccgatcagatctcagtttctgggaataattcgaagttagtatttctctacttcatctctatgaatctcattcattttatctttatgtttctctttacttgttttgcgattaaaactcgtttgatcatttaggtggttctttgttttgtgagataagtggaactcgctgacttttttttttttctttttggataatcaacgatcgggttcatttgctattgtcctctagtgttacactgatacgatctttagttttgagttagatcagtgactttagtttcactattcaactagtgttccttgtttttaggacaatactgcgaaaatttagctgctctaaaattttgataccagatctttgagattcgtagatctcgcttttctttttttttagttttttcagaaactaatattgtgttctggtcaattcttattgctaaaggtgaaaaaatg

SEQ ID NO: 22125 - DNA, 3003 bp, Unknown
  misc_feature (1)..( 3003): 2750-1469P.txt file - cDNA_ID_2046880; gDNA_ID_1620452; Annot_ID_157512
taactgaatgatgagcttccttggtgttgaagcgtataataatcaactaataaaatatagttatgaattacattagagatagagggtcgaaaaaggtacgagtcaaaggacttttgtgtagagctagaggttaacaagatctctttcttttagttgtatgtgggctcctaagttgttttgttagcttcttattatgactcttaatttgcttaacattacactatgctttgacccaaaattctaaccaaagtactttaaatttacaactgttatacaaaaacaaagaagtgatcaagaagataaaaagaacgactggtgacaaaaaacaaaacatgtcgagtaaaaatcaagttgtggcatcaactgttgagtctatctttgactatatataattttgcataaaggaagattaatttgaaaaacctatcaaaacatccgtgtttcaacaacatgcattacgcatgtttcattcatgtggtaaattttatatccatatctagtataacatatttctaattttaaatttttttaattcttgaatatgaagtagtagtccatgtatttgtgagtaagagtaacatcataatacaacaaaagctatggccaaagtaattatctatgttataaattaaattaaacaaatatatatatatatcataatacaagaagtactctaagctatggccaaaaatattataggcttgggaatctcagccggaattttcacttagtttattttaaatattctcgttttttttgttgctcttcttttgcgaaagtttacaatattgtggtgaagaaaacgaaaaagtaattattattattttttttctttattttttttcaaacgagccaccagttgttcttgtgtgttctatttaagcccatcctcttcgcatcactctttcaaagcctcgtgtcttgatttctttcaccaaactcatataatcacatatctctccaagttcatcaaggtcagtctctaatttatattattttgtaactatttgattattttaggtatattttcagaaatatatagccacaagaaattgacaaataattaatacaagtaagaaaaaattgatcttcaaaactagactaagtgcatatatccagtactatacatatttaaatttgttaaccacacacatcgtgtttttgtccaaagttttaacgtaaacaatagtaagattttttgtttttcttagaaatatttctattaatttctgttaatctttttaatggaaatatctaatagaaagattcaaatttctatgcatgatgttacagaaaataatataaacacacacatacaagaactgaagaatgagcagacccggagattggaactgcaggtcatgcagccatctcaacttccagcgccgtgactcttgccagcgatgcggtgactctcgttccggccccggtggagttggtggcttagactttggtaatttcggtggcagagccatgtctgctttcggattcaccaccggctccgacgttcgtcccggtgattggtactgcaccgtgggaaactgcgggacacacaacttcgccagtcgctccacctgcttcaaatgcggcactttcaaggacgagaccggcgctggaggcggaggtggtggcatcggcggtccggccatgtttgacgccgacattatgcggtctagagtccccggtaacggtggtcgctctagctggaaatccggcgactggatttgcactaggtaccaaaatgaatatacttggttgatataactcgatttatgactataatatatagtttttatacgtacctatctaaaattttgattgataaagattataattgaacttgaaaacaggattggttgcaatgagcataactttgcaagcagaatggaatgcttcaggtgcaatgcaccaagggacttcagcaacagaacctctttctaagttatacaaactgcttttgaagtagccttgtctccaatttcttaggtaattcaactttcaaatatttatatatatttcgttacacaaatactatttctgcctatgattaaaaatctttatataattatactgatatgtttgaatatgcttgatttttaggcaccgtttcgatcaatggaaaggagaagcaggagcaaaagagagaattaaaagatgataattttgttagatgttgcaatgagagccaatattgtaactttagctgtcgtgcttttggatgtattatccatttttattaagatttcttttcattttctccttaattcgtaatttttcttttgcagtttctttttaagagttttattattctaatcattgtacgctgcatgtctttcttaaaagaagattctcttctcaatttcatcgctttatacatgagttgctactttctttttgtttttgtttctttgttgtccagccttttcaccgtatattcttatagctagactgtaatatacttactatcactttttagtagacataattctatcaacctagtgaccagtgactgcaataataatcaaattttttacaaacacacccccaaaattgtctaacttccaaactatctgaattttaaaatgcttaggagataataatatggagattcttaatcaacctaagaaataaaaaataatatttgatgttcttgtctgtatttccaaatgaatatgatcaataatgcaaaaacaattctcttttaaagaaaaattggagctgagagtaagggccaataatgggcttatatgggctataaaggcccaaatgaaacaaaagttgaagtttcgtgcttcgctgtacaaagacaccactctggttgtatcgaacgagcgaaacccaaccaacgacgagcgttcacctcaaatattttgatttgatcaaatcatctccacactcgccaaatcgttgtgtcctcgttcatatcgttatcgtatcagctcaaaaatctcaatctctcttccttacattcttctgtttctcgaatccttgtctccctccatg

SEQ ID NO: 22126 - DNA, 3000 bp, Unknown
  misc_feature (1)..( 3000): 2750-1469P.txt file - cDNA_ID_2046922; gDNA_ID_1620464; Annot_ID_157861
ttgagtttgtgaggagccacgtgtcgatgcactccacatggaatgcatggctgcattttggtaagagccggagctcgtcttcggctgtgaactctctgagacaaacggcgcaatcagagaggtcgtgtcgaagaccaatcatggtcttgtaatgtaacaagggcaatgcatcaatgaatgattggtcaatttctgcgtcatggagattaaaccgtgtttgataccgaccttgcagagcagtagaactctctgtaatgccatcataggcgtcgtcaagtcgagtttggggtctatgtaagaatttgaccagaaggtgaatcaaagcagctacaaagaagatgatggagaggagagtgatgtagagaagtacgatgggactaatcatgcatatcagatcaaagtctttgtctgttgaagaagaatatgaaaatgaaatcgatgaaacagagagaaatgaatcacttttctgatccatggttttcttgagaaagattcaagaggaaggagatggggaaataagtgaaagaagataaaaaaagtgaataataggaagactctgttattgtaaccaaaaaaagtaaagaaacaaaacgttgacgtttcagtgcaaagtgagttgtggttttcctaaatatagaagtcaagtattcatagatttcccaatacagatgtattgttgttcaaaagcaacgtggtttctttgacattagactaacagagcagtaacggattaacaaacagaggagaaaaaattaaaaggattcgtttttttcttcgttaatcaagacaattgggaataacaaaacaagcatcaaagatattgttatatgaacgtaatgatcttacgaacgaaagacagacactttaacagaatctgttatagatttgtcaacgagatgaagaaaaaaagtagcctgacaaaattacaagcatgcgtatttgcagagggctataccaagaacaacataaaaagactcaagggaagctggaacagtaggtgcaaaatgaggatgatgcagtatgtcagagacatgaaccatatgaagttccctaaagcttggaaattcaagtttaaatttagcttagaggagatcaaaatgacaaaaaacaagttctgttgtgaggtggaattcgagaaagctgcagtgcatgttgtttgagaacttgaagaaacttttgggacataggcttatgcaagatgtttctcgcgaaattgaagcagtgcatgggaaggaatgagaattaatgttcaaaagtctggatctggcttgtcaaagcagactatgaagccaaactatgagtgtgtgttaatgtctatggagttggccattcaacaaaggatatcagaaagtcaaaattgagctggttatactctagacttttcaggaacttcactttccattgcagctattttgaaaatgtgtacagaaggtgaggatatatggttacatttggaggacgacttgatgagacattctagactacttcacatctctctcttacaaaacactaggacagtgagggtgttgtgtttgtggttccaacatgtgcacatgcacctacttgattgtgtgatgtggactcgagagaacatagatgtggaatagtggacatgtttcagactgaattacacaactcatttttggtgtggagaagttccacataaagcacaagtggagatttaagcttgtacatccagtttgggagttggagtttagtttggatagtgttaactctggacaaagaaactctgctacaagttccaaagtacaagacaaattgtcaactaaagaattttctgtcaatttacagcaactggccacagttttgcacaattgtgagacacaaattagtgattctacagaaagtgagattgaagatagcttgggtcatctttaaaatcaagtaatatttgttgagagtttttttgataaatatatttgctgagagttggcatgatcattctgatttgctaatgttaaaatttgaagtcattaatgttataggtttgctaatgcaaatgcaattataagcatgacgtgacacgacccacatgctcctccacatttcattattatacacttgtttttccactaatgtcatgttacttttggagacttgctaattgaatcattatttgttggcacaaaaagaacctatatttattcaattacgcagtatagtaagattatttatttaattatatgtaataaaggagaaagctttcttatggtgtgatgaagaatgtcttttttttttcattgttagagaatctttataatcattaagattttggttaaaacaaaaaaacgcgcgaattccggctattggtttatcgaaacctctggctacaacgttggctttgtcatattttttttttgttcaaataattaaaagtcaattaattagtgtcaccatcacaaaatattaagagatcctccacacacaataaaaaatttagaacaattcttttccatttttggtttaaaaataaagtaatcaccaatttgttattattgtttgttattttccttaatcaattgaccaaaaaaaaaatcccacaacttaatttcaccattctttttgatgttctctgtattacaattgtcagagaagttttctggatgatctttcctctaaagtttaaagctttttttggtcaattcttttaaagttttgatttttttttggttaattctttaaagtttctttctttcttaaagagggatcattatgatgatgatgatgatgatctgatctgtacataagagaattaaagaacaccaacaacaacaaaaacagaggaagaaaataaaaaccaaatttttcttgttgcaatcatttgaaattaaattcaattcttcgattcttccgagctggttctcgaattgggtttgctgcaaattgtgaatccaataaaatttgttcgtgttgttgtgttgatggtgatttgttagggttgatccgatcaaaatttcaattttgtatcgtaaaacgatg

SEQ ID NO: 22127 - DNA, 3003 bp, Unknown
  misc_feature (1)..( 3003): 2750-1469P.txt file - cDNA_ID_2046935; gDNA_ID_1620464; Annot_ID_157856
aaaagtagatttattttgtattataatcaacgcttaccaaaaagtaactagtcttccctacttaaaaataaaattaaaaactatacctaagtactactaattaacttaataacgtaagaaaaaaaaactataccttaccaaaaagttagcttagctcagtttgaaattttgaatacgattgtttgattttagtgaatctgaatagtgaatacttatacgattattcctgtttatttttgtcaactatgtatacgactttaggcgttgcacaattaaaaaaaacgtataccactttagggctaataatatagaagctcacatctaaaaactaaaacccgcttattatgatcttatgatcacatatctgataaaatctttaggccacgtttcgaaagtacacacgatttactcctaattagagagattataatatcaaactatagatttcgtggaaaaccaaagaagtaaaatcattggtccgcttgattatgtatatctattttcgaagttttaagaaaaagatgaatagaaaagttaataacaaagcaaataataaaacatggaaatagagtatatgtaatagactaatagtagttttaacctttaagccttttctcgtgctaaaatcatgtaagaattcttttgacattttaacaaaaaaaatgtaagaacataaataatgagagtcacgacagcttttgctttagttaagcacacgagaaatcatcgattgcaagttcatagttactatctcgcatcctaactaaaatgatacaaatgcattgagcctatatctctttttttctttgccataaagttattttttatatacatattgcaagagtaaattctaaggttgaaagtgctgtgcctgttatacgtaattaattcagtttttttttttttttttcttccgtaattaattcagtttcagttttcctttttttacatactttcaaacaaagtaaaggtagtcaacgtttagttgaaaattttaaagtgtgattgatagccagtataaagcaagatttttatcttttaatagtactaagttaaaattttaaatgactcaaagtaaacgcagatattatcacgtttactttaaaacgcgtattgactttgaatgacttgagtttttctattttagcaactagcaagcataactttgtatattagtttagtttagttttgttttgttttatctccttacaaaatcgtattacttttttttttgtcggacaaaatatagtattacgtactagttcctgctggagatccaaaacttctattatctacgcttttagtttatagtccaagttttgaattgtttttgtcctattaattaaatctttaatgttttcatataatcgaaagattttcaaaacatatatagaccatcataatttttctaaccctattaaatcatatcagcttccatttaaaacgttgatataatattcatctacttccacctactacttgttcttaaagtgtgtaactatatatcacgtgaactgaattttgccatgaacatctcatgaacgaggtacctaaaaatacatgttcctgttattcacttttgaattttgtttctaatatatatcacggagaaaatgttgaattctgaaaagttgacatttaacaagaaatgttggttaaagacttaaagccatgcttcgagatgcgacttcaaatttttttcgtatcacatatttgtgttaatgacattttttgttatcactcgtttacaagttatctatatcaacaaaggcaacaaaaaaaacaaaatagaaaaaaaaaaaaatcaccttatatacatgaatggtggatttagatgaaaaaatggttgtgaaaggaagtcgagaatctaaactaatctaatggaaaatttaaataaaatgttaagtttgtcttataaatgcatctcatagtatatgttgcataccactctcaattagaataatggttcgaataaagaaaaaaaccaaattatttgctttaaaatttatgtaaaagaatattaattattttctaaacaacaatatataagcaaaaagtataatttttggtgcctttaaagatgtgattgtcatattaaaaagaaaatttccctaaagaattaatggtctaattatttagctagcttgtactccagaccaaacctgttcttctgatggctcaaacttaaaaaaacttaggtgataaatgcaacgaaccaacagaaaaaaatcaatttaactcacatccacaattttttttggttcataattaccacatccacaattattattattacttttattatactcccacaatatttttttgccgtatgtatgaaacataccaatttttatagagaggcagagatacgcgtacagcttttataattgaaaagggcaaaagtaaagtagtacttattattcacttcttcttcaccttttctctttgaattttcttcttcactctgcaacttctcttccccacctttctatatttactattttctatcttcaatttgttggatccgaaagttccttccttttttgtttttattattctttattcaaaagccagtttttgtgatccatttgaaatcccaatttgtctacttctcccaataataactctttttatatctctttttttcttcctttacttcagaaaacaagtctaccttcttctcttcttctaccttcttctcttataaaacctatctaaagccttttcatttttttggccggtgggatattgtttgaatgagttcaaccaaaaatcttatatattcttatccttttttttcccgatcagaactcagttcataaaacttgtctgaataatttaagaacccaactcaaaagattcaatttttcgtttttccattttccttcaaagtcttagcctaataaaagattcgatttttatacaattatttaatacccacatataattgaagaaagagagacagagagataacacaaaagtggaagtaaacgaagaacgatg

SEQ ID NO: 22128 - DNA, 3000 bp, Unknown; identical to SEQ ID NO: 1900
  misc_feature (1)..( 3000): 2750-1469P.txt file - cDNA_ID_2046950; gDNA_ID_1620464; Annot_ID_157850

SEQ ID NO: 22129 - DNA, 3000 bp, Unknown; identical to SEQ ID NO: 1914
  misc_feature (1)..( 3000): 2750-1469P.txt file - cDNA_ID_2047023; gDNA_ID_1620467; Annot_ID_157936

SEQ ID NO: 22130 - DNA, 3000 bp, Unknown; identical to SEQ ID NO: 1919
  misc_feature (1)..( 3000): 2750-1469P.txt file - cDNA_ID_2047053; gDNA_ID_1620467; Annot_ID_157926

SEQ ID NO: 22131 - DNA, 3000 bp, Unknown
  misc_feature (1)..( 3000): 2750-1469P.txt file - cDNA_ID_2047075; gDNA_ID_1620467; Annot_ID_157921
ctcttcttcaattgcaatttgtcttggacagtttggtcttcaattgctctgagatgtcaacttcaacctttgcgttcttggtctgcaactgtcactcagatgcaagccattcaaggtccgaaagataagagaagactctctcttctagcttggcaatgctcgatgtacttcctctggggagaaaggaacaatcggcttcatcgcaacaccttcagatctgctgactctctgcttcgcctaattgattctaccgtccgaaacagaatctcgaccttcagagaccagaatccgcgtttatcatcgtcgatgctacagctatggttctcttcctcttgatcttctccaggtgaactctcactattccatcggctaccttcacctacagtctaggttcaaccctaagatctatgtttcaatgtgtgtttctaattgttattggggtatgctctttctctattggtttcgaccaaacaaacactaaagtcgggctgggcttttgtaatttttatttccttatgcatttcaatagaaagcctttttcaaaaaaaaaatatataacttgctatgattaaaacacaactatacgtttatatatttgcttgttaaggtaatggaagtttattttgggatctaatatttatggattcaattaatgcatgctgtatatataataactgggagtagaaaaccaatccgagccgcaaattcgaagaagggtttatgcatgcctgattattgattgcgggttacagtagtcagtagatatattctttagcttaaggtactagttttaattttacattagtagttacacacgaatttggtggttgttacatatgagtttaaagacaatttaattatagataaattatgatacacatgaatgaagttatattattttattaaccattactatatttttctggcgacacatcacacataatttaaaggaaatgtattggaaaaaaatacacataaattaaatgttaataattttctgtttatttttaaaaatgaattgccaagtagaccaataaaatattttttatatataattggttttatgaagagtattgaatcttctatataaatgaggtagcttgtaactatttactatatccaactttgctctttatgcagattgtctgcagcgtcgtcaaatttggccttatagattcttcttaaatatatcccatcttctctagctctccaatcccataagccagaatttttaaatgctctaaagctctgactgtgactaaatccaggtccttgttttaaggtacacataaaacgcgtcgtaccaaataaattatgaaagaaataatctgtaaattgtcctccatttggtattattgttggaccaagtacgtcatttttggaataacacctcatccaaagggttttcttatttttgagttcgttcacgattctgattccggcgccggatacatgaccaagcatgcaaagactaaaaacaaatagaaaaattgtgaaatatttcattttttgtagagatattttgatcttcttttgtcgtgttgacttgttttttgtgtgtgtgtatttataacaacatctatgttgctatttttgaatttacagtttcttgtttctctgttaacataaattttctattaaattttgtccaaaaaaaagttttctattaatagttgttaaaacaaatcattggagactttcaatatatgttggacagaaataagtgtatgaacttctaagtaccagcctagcataggttatctcatccatttgcattatatcttttgtggcgaacaatatgttcaccaaaataaaatctcagataagttgctaatattaaccttcattatctattacttataatgtacattatattagtataaacaaaaaatgcaaatgtcggaattaatcgatcaactatatcttaataaactatttcttttacaagtacttcaaaacaatcctatagattttagagtccactttttgtatactagatctttttttggtcaaaatttgtatacaacatctatctacttattgtgacatctactacaaattatgaaataaagtagtagttttttttgtcttttattatttccaataaaacttatagtaactaggcaacaaagcgttatgaaaatagattccatcatccctaaataaccaattatacgatgatctatctttaacgaacaaagcttgcgcttgatatgcagtaaaacctataaaatgcttatcactagatcttttatatatatcgctccaaaatcatgtggttctacaaacatttgtcttgaagcttaatgacataacttctccaattttgatatattttataccaatattattgttttttatttacaatgcaattgatgattttcttgcttttgcgactaaattcgttcttgaccgtaaacatagattttttccgtatacatcaccaatatgcaaagaccaattagaaatagaaagattgagaggtctcaattattgttataaaattcttttggtaaatttatttataggtaacttagagagtcttctcattgaagtgttatttatacacacatgctagtattttagcatttacatttctctcttttcttgtaaattttttattaataattgaggtagcaactcaatacaaaactaatgattgatagttgacaaaggatctatgtattggattttttttgtaattaataatagatataagtcattttcgcttaaaataaaaatgttattgtttgtacttactttcttatcgttttatgtattttgagtaatatgtttttgtaaaataaaattattgttaagaatgcacttccaaggctactcctttttaattttaccccttccattttcattatacagcctgaattaattaaattcataaatatttcacaaacaccttcatatatttgccagtcaaggtaataatagtttaattttggaatctaatatttttagattcaattaatgcatgctgtagacatg

SEQ ID NO: 22132 - DNA, 3003 bp, Unknown
  misc_feature (1)..( 3003): 2750-1469P.txt file - cDNA_ID_2047091; gDNA_ID_1620477; Annot_ID_158210
attaaggaaggaagaccatggaattaaaatatattaaagcgactaacacaaatttaaatcataaactaacaaaagaaatatgtctgtcattttgttaagtttttataataaagaaaatatattgacgtatatgtaattttaaaatgggccatgcagcatgatatgcattactaagcgaagaaacaaaaatagaggccgaaacgcggaaaagagctgacaaatcgtaaagagtgtcttccacatgggattaggtcaatttcaccataattttcatggcacttcagagcctattgcatgtggtggatacatataagaaaaataagtttatagttttaaaactaaaattgatttagtcaaaaacgcttaataaaaatttcttgtcaacacataaaaaataaatgctataatagattgtgtttttggatagtatggaaaatccaacaaaacaaaatttagatgatatacgattgttttttatatctgttggcaataaattgagatgtataattgaaggattaggtacctttttctgaagaattcgccataatatatacatgcataatgtcataaaacatggagaaaaatgcccataaaaatgtagattgatgatttatgctatttcagtccgcgttttagtccatatttgggccttgcgagtaatttctgcttttattttcgagaactctgtctctgtgtatagactatagagccaagatgggctttataataaaaagtagatatgtagagggactttttggagtaatcgataattatgaattataattacaaattaacaaaccagaaagtagcttgcatatgcttcacattttagatttccttcagttatcatggtaaatacttaagatgctacttgtccattccataaatgttccatgtcctcgtccatatcttacttagcaaagagtccaaaatgtgggatttttctgtcctttaaaaacttaactctgttttttatataccagaagtgggagaccaaggcaacaattggtaactaagtttcaacttttttgagtttttctctcctgactgaatggctttttaaactttataaactcgttctaatttgtcttttccgtttaaggctttttcgtacgttttgcaaatagctaaacttttgaaaggaaaaagtaacctcgcgtttttctcatttatattgcacagaatatagatacaagttgcagctattactgataaaacgtagctacttttttggttgggtttatttgagccaaataacttcattaaaagctgtagtaccaagtttgggtctatcatttacactgctattgtctttgctatatgactcgaatctgatacattcgatttctaaagattatatctaatttttaagcgaattaaacttttgcaagcttggttttgatctctactattctattgactagagaagatgtcatagttgggtgtagaataaggtattgaactgacttgcttttattgattcattaactatggtatttatacacaatgatctctatcaagagataaacataaatccctaaaatataggttagaaactctatcatcaaagatattgtactaatcctaatcggattacacatatctccaatagagttgatatctattaacggcaaaaggagctaagctgccatgatgacccatgaagtatatgcctgcatgctaatacgcagaaaaacattgaatgtgaaagtggcaattattcgaacactcaaatttttttatcttcctaaaatcgtgctcgtgaagatttttcaaaacaaccgatataaccattggtgtttagttgtttacctttctttttattgcatacgatagcccattcttaggaattaaaccatgggggcaactggcaagcatttataatcattgatgttactttaattttcatttaatatgaatattaaacgtagtagctatatcattgggttggaattaatgactgagaaagaatgaatgaaagagagaaacgtgtactcgcagtagaccatataaccattggtgaacaattttatttggaatcgtatccataaatatcatttttatactagtacgcttgcttttacgactactataccttgtgtgggcggaccaacaatttaagaagggggtgtgggtgtaactggcccggtaaaccataattttgttttggccatgtacaaaatgagtttttggcatacggtgttttgttgtatttgaagatcccactcaatatcatttttttttccccaatttgattaatcatttgctttcttgaaagattattttccttataaggataagaataaacagtttcctttttcatggaacaaatttttcatgtttcaaagatattttcattttgtctgaagtatcaaaacagttttacattattatttgtctttttctgttcaaaaaatttaagcaaattagtatataataaataaacagatttgtgtatagtattgaaacctatatccatgagcaaatgtgtggtatataaattagataacaattcttttttgacatcatataaattaaataacattgaatttgaaattaatcacatttttaaaatgtgattgtacgttatttattctttaaaattatgaatactaattaaccaatatatgtcatcgaaataactcaaaatattgtaaagaaaactatttgcattttacatatagatatcttgtaaagttaattacgatatccatagaaatgttatacaatctttgactaaaaacgaaagaaagaattctaataattaataacctttggtgtttttaatgagagacgtggactctctcggtagaaataatacaatgattaacatacaaatttgtaactatcattagccgtcactcgccaccctcgataggacctatatacacttatacacaacactagccacacacatcctcaagcgataacaccacaaacaaaacaacaaaccaaaaaaaaaaaaaagagagagagagagagcaaatctccatcatcatcatg

SEQ ID NO: 22133 - DNA, 3000 bp, Unknown; identical to SEQ ID NO: 2007
  misc_feature (1)..( 3000): 2750-1469P.txt file - cDNA_ID_2047113; gDNA_ID_1620477; Annot_ID_158205

SEQ ID NO: 22134 - DNA, 3000 bp, Unknown; identical to SEQ ID NO: 2010
  misc_feature (1)..( 3000): 2750-1469P.txt file - cDNA_ID_2047125; gDNA_ID_1620477; Annot_ID_158201

SEQ ID NO: 22135 - DNA, 3000 bp, Unknown; identical to SEQ ID NO: 2008
  misc_feature (1)..( 3000): 2750-1469P.txt file - cDNA_ID_2047149; gDNA_ID_1620477; Annot_ID_158194

SEQ ID NO: 22136 - DNA, 3000 bp, Unknown; identical to SEQ ID NO: 2073
  misc_feature (1)..( 3000): 2750-1469P.txt file - cDNA_ID_2047218; gDNA_ID_1620484; Annot_ID_158418

SEQ ID NO: 22137 - DNA, 3003 bp, Unknown
  misc_feature (1)..( 3003): 2750-1469P.txt file - cDNA_ID_2047224; gDNA_ID_1620484; Annot_ID_158416
cggttgagtatctctggcgtatgggctcatgatgtcgcttggagtctggcgagtgcagctgaagtgacaaggatgccaactgtgacatcaactctccttgaggccataaaagaaagcaggtttaagggtctgagtggtaactttcagttggatgatatgaagttgttatcagacaagtttgagattgtgaatatgataggatcaggtgagagaagggtaggattctggaattctaatggtagtttcagcaatagaagacaattatcttctactcatgacaatctggagaccataatttggcccggtgggtctgctcaaagtccgaaagggagaagtctaagagagagcggtagaaaaaagcttagggttcttgttacatctagcaatagattcccaagactgatgaaagtggagactgatccaataacacatgagataacaattgtcgaagggttctgtatagaagtctttcaggcatccattgcacctttcaactatgaagtggagtacatacgttggctcaatggaactaactacaccaagcttgcatatgcacttcatagccaggtactaagcatggctcgattttacaattgcaagtacttttaaaatttgcgtagactgtgtgtgggaactgacttaattccattgataatttttgttgcatcccttagaaagacaaatatgatgctgctgtgggagatattacaattacttccgatagatcgatgtatgttgattttacgttgccatacactgaaatgggtcttggaattgtagcagcaaaggagagaagtatgtgggtgttcttccaacctctaacaccaaacctttggataacaagtgcagctttctttgtcttgacgggtattatagtttggttgatagaaagagctgagaacaaagagttccaaggatcttggcctcaacagattggagttgtgatttggtttggcttctctacccttgtttatgctcatcgtaagtaccttttcacattcttatataccaatttggccataagagaagagattgtagtgatgcttaccttttgttgcttactctgtgtgacaggggagaagctacaacacaacttatcaagatttgtagttacagtttgggtatttgcggtgctcatattggttacaagttacactgcaacattgacatcaatgatgacggtgcaacaaatacgattcaacgccaatgaagattatgtgggtcacctctcgggatccctcatcgcaaatgcggccctcaccaattccagcctcagagcaatgagattattgggtctcaatacttcagaagattatgctcaagctttgatgaataaaagtgtctcatatattgttagtgagttgccatacctgaaaatcctccttggcgagaatcctggacattttctcatggtcaagacacaatctaccaccaatggttttggcttcgtatgtatccttcttctgcatcatcagttgctttactcttgattttacttgttgaaaaagaaatgtttggtttgttatactatgttccagatgttccagaaggggtccgagttggcgcctaatgtgtcccgggagattgcgaagctgaggacaagcgagaggctaaacgagatggagagaagatggtttgataaacagcttccatacacaaccgatgatacatcaaatcctataaccctatatagattccgtggtttgtttatgatcaccggagtttcattcgctttcgctcttgcagtacttctcattctttggctccgagaaagatgggaaatccttgtgaattcggtcaatatatacttctcacaacgacttagacatttcaggatcctcttcacaagaactatccatcctagtcccctcggcctcgataaccccattggcgagaatgcggttcaaatggctcaacgtaacagacgataggaaatgagtaacatagagagaaaacaattgttgtgatgtggtacgtctctgactctgaccttggagcagcaaagaagatcctccagtgatccactagctcctgatccaagccggcttacgtctgaaagtataaatgattgttataccaattttgtaaattatagtgtgatcatattcgcaaccacttttgtaaatagcaaaaaggtattggtaatatattgagttaaaatttaacacatttagtttgagtattttttggagaatatgatacttttgcaaagaaaaaaatactttaattcttcattttataaaccttaaaaaatgtaccaaactttaatcagtatgtaaaagactcgtgcatttcgtttgttggtatttgtgtttaatttcttccatcaatttatttgagatgagacgactttcaccatttttctctgcttctagatttatatctttgactgtctaaattgtcaaatcccttacactaagtacttttgttgatttgttcttgtcaacacaagttaatacaaccccaacaaatatggagtttttaaccaaaaaaaaaacaaatatggagttctacgtgtaaaaatttcagattaaaacacatttgttcctacgaccgttgacaaatgtttttttttttttaagacaaatgatttttttcttttgctaaaattggttagttgacaaaattttatcctatagaatccttttcgaatttattccgtatttttacctttttactttcttcaccaaacattttgatagatttagtcagattctcttaaataatgaaatgatttgagagacaaaagagtagccaaactcgatagcccataccgaattttacgttgactaatgtaatttttcttaaaatcatgatgtcatcatcttaaactttgaatttttcttcaaatatagtacgtatgttaatttttaaaattggaataattagacagatgaaaaacaaaacacggcatgggtttatataacaacaaaataaaataatgactaaaagcagcaaacgtggggtttctcctttctctctagttggaaagtttttttaatg

SEQ ID NO: 22138 - DNA, 3000 bp, Unknown; identical to SEQ ID NO: 2067
  misc_feature (1)..( 3000): 2750-1469P.txt file - cDNA_ID_2047242; gDNA_ID_1620484; Annot_ID_158411

SEQ ID NO: 22139 - DNA, 3000 bp, Unknown; identical to SEQ ID NO: 2078
  misc_feature (1)..( 3000): 2750-1469P.txt file - cDNA_ID_2047274; gDNA_ID_1620485; Annot_ID_158464

SEQ ID NO: 22140 - DNA, 3003 bp, Unknown
  misc_feature (1)..( 3003): 2750-1469P.txt file - cDNA_ID_2047282; gDNA_ID_1620485; Annot_ID_158462
cctggttattgtttcagcgatttttttgagtttgactacagacccttactccttctcaacgtcattatgtcttgtgacaatgaccaattttccacttctcggatcgaccgaagttgtgtctccgatttaccttcttctcgtatgtggcattgtgttctacaacttttgtctccgagttagcatggttttatcatcggactattgtatttttatctttattgcttttatttttgttgtactaaagtctgagaatgatattttcttaagctttgtactaagtttgagtgattgaacgaaaacaaagtttattgacaaaaaaagaaaaggaaaacggatagctttcttggctgaactatagcaaatgcaatttgcaatgttttaagtcgttaaggtactaactactaatctcaaaagatgaaaaagattatataagtgaataaaatatcaccgcaaagtgtttatatgcatactttatctttcaaacataccagtttccgataaatatacaacaaaccttgtgtttacgatgtaatggtgttctcaattaaaaaagaaaagagagcacttttctatataacaaatacaagttgagaaaaaagccaaaattgactggaccgaagctgtaggagaatgggggcgataggaccaagggagagttacaattttatcacaagcttgtgtgtgtatgttttgtttcttttctttaaatttggatgttgacagctttaattttttcctaaaaatatacactagaaaattagagaatatttagaaggtgagaccagcgaatgtcatgccacaaatcatgttcataatgttataccaaataatcataatgtccccatgtgacgctttacttttctatattatctcgtaaccccactcatacgttttagaagaattttcacacaactaagataagttgatttttgaggcaaaatattgtttattttttctatcaataaatcttcgtaagactttccaataagagaacatttttcttattcctctcgtgacagaagcaaatcatcccatccacacaaagtcacaatccaagacacaagcccaccaatagagactccatctcctcactaaattcatctacaatagtaattcattattgctattatgttactataattgctttaaaattgtttcctatgaataattgaatatcataagcaatatgaacaaagaatgatgttcaaatcaaaattcgaagataaggatataaagttataatcgtgttgagtcatacacttcgagctaaagtttttctttaaacaattgatttagctaccacttaatctagttggtactgaacaagtaacaacataagtagaagataaagagaagagaatatcttactttgggactattagccatgatgtccacgaccaaatcggcctcctcaaaatcaatttttgtctaattttgtaatgtgagactttataacttttccataatatatagcggacgttattattttactcaaaattgtatgtggcttccatttgactactaaatgaacaatattatgaaacaaataaaatgaacaaaaaagttgaacaaaaaaaattatttgaatattttatttagaaaaaatctgttcaataatatgcaaaccaaaatatctccggcatgtgtaaactaaattgactatactaatttaacaaattatcaccgcaattacgccgcgttgaatttgtttttccttagatttggcgtgggtcatcgaatgtttaattaaattaacataaaaccaagataggccattgaccaaaatacaataatattttcataaaaccttatattattttctgaagagcaaaaacattatctgagaatctggagataaaattgacgtgacattaagaaccttaatcgaatttgattaacaaaatatttctttgttgcccgtttcaattttagtggattattttggtgtaacttgacattttagataattctattaataatagattaggggaaatgtcaatgtaataggtggcctcgaatttgtgttggtgcactccagctgtcttccttcgctttggagcaagtagaatcccaactattttctccacacttaaaaaaccttaaattactcattctcaatcttatattttctataaacgcaaatattttatgaaattttatactattaataatctaattccctaaatatatatatattttgcattttttacatcatatctttttttgcctaaaattttatacgagaaattttatactattaagaatcttattgcctaaaattaaccacttctttttttggtgttctatttcatgcaccgatattaaaaatcgtaggaatatcgatggccaaaataaaataaaatggaagaggatctaaactttgtattttatactggtcctagtcctagaaaatcgaattattcagtgttttcattaaatgcatagttcaacatattatttggcatgatagattgtctgcaaatgacacatcacttttcctttctgcaaaaataaaagactctataaagtaactttagaatttattcagttcctcaactcgatctagtccctttaattaagcaaacataattatttaaacaactcttttgagaaaacattttttctctttggtcaaataacaaaacaaattaattcttatttctacattcaattaaaaacataccaaaacatctattaacttcttaaatattttttctcaaatttgtagtccaaaaaaaacacgacgcgtatgttttttttgttgttgttgtgtaataagaagagaaagaacgtaaaagaattgacgcggacgaatcgtgttagacccaaaaagaacagctttcaattccattgtccaaattccttatcaaaaaaaaactctactctcggtggcaccagatcactcctcctctctcttctcctacctttttcacattctcttcttcttcttctcgtgagaaaaagaaagagagattctttattcattagatcgaagcaaaaatg

SEQ ID NO: 22141 - DNA, 3000 bp, Unknown
  misc_feature (1)..( 3000): 2750-1469P.txt file - cDNA_ID_2047293; gDNA_ID_1620485; Annot_ID_158458
attggggagaaacgtaattacctctttttacagtttgaaaagaatcacaagtaactcttttctaattaaatgttgaagaaactttaaaggaaggagtgaagtaagagggaggacatctttttaaatgtagaaatgggttagatctgttgcagtagtctgtggtagttgaattggcaccattctaatttagctactcttgatttatctattttaccagttctatatccacccacttatattcttatttttatcaacctaaacatgaagctgccatattaaaaatagagattcggacaacaaatcttgagtttattctgatatatcctaaattttattttcattaatttcaatatatattattctgtggtctctcataaacaattaaattttataattgtcattgaatttctagcagttagttatttatttctaatacaactataaagttattactaattaatttgtgtgctaataggtggaactatttaaaattttaaatataaatagatctatggttgagtatatccagttaaacttaatggattcataggtcgaatttcgattatattttaatctcaatttaatagaaacagttacgataaaaaaaaaatgtagattgcaaatgcaacatatatatcttgtattgtgcatgtggctaaatatatattaggtgttttttacgcccggtatatttaccaatttagttaattacgttgttttaactatactatacatggttaaaatgaaataatgttgtatctaaaagaaaacaaaatttaaggagagatttgttttttctaaaacaataaaaaaattaaaaattattcgctgatgaagattcatgtttagggattactttcactttcaattgaggaagtagacagaactgaagttacatgaaggacatagatatgcaaccggtaaaaatgttagtagatcgagatttggtaataaaaaagatgaagctaatgataatttctacgatgttcagtaactcatacctcaaacattggtattacgaatgtactccaaagttttagttacttccctatcccaaacattagcctcaagttcagcctctctatctgatatctcggagcaaaggcagcatactgatacaaaccaaaactgaagatgagtgggctttagtggggctttgatttaggcttagtgttaagcccaatttccttttattgtcttctacttaaacttttcttcttcttatcaaattttggtcaatatcggtcaacaccggttaatactgggtaatgccggattctggtcaaagtaggatgtcgtgtatgttcgtatgtgatgtcaatatttcgtgtagctaacgagacatttttaaagtctgcatgtgtggcgatgtgttggcttgtactccgtgtagctgataaacattttttctatcgaaaacgatcaacaacaatatcaatctaaatttctctcttatctctcttcttcttcaccgtaaaggtgcaatacttctctccctccatttctttctgttcttttcatcttagataagcttccggagcttatcacgtaccttcggatgatagattggaggacatagtttccatagcagtcatccatcaagcttccaaaacacaagagagcttacgcaatacgaatgaggcagtagaaccagctccatattcaacaacaggtcttacgagaaaatttgcatacttgtgtgtggcgaaatggggaaaaaaaccggaaatctcttggaccaacattggcgcaacatctggtttgtgagaggctattagaatctgaagcaaatggcaactacaaaaagaagagaatattcactataatgtcaaagaattgaatgaaacaataacgtatactccctctgcttcacaatgggtaaatgggagataagagcgatcaataactgaggacttgcaagctttaagaggatcttcacattgttcaatccattactgtgactcgtaagagagatgagttgttgtagtatgatcgacaataatggctcaaactgatcaaaagaaaactcatgaaagattacaaaacaaatgatgtagttgaccaccgacaaagataaaactaagtaaagttcgtataaaataaagttattaatttgaaatttctgaactagaaagagataaaaaaataaagaaaataattaattatgtgtagtatgcatatgtgtctgaatggatcagtaacatttggctacctcaatcaaatcatcaaatcaattgtattattatagaaaatctgaagtattaaagtatatttttaaattctaatcaaataaactgttcaaatttaataaatcaacgtattttttctaatttaaataacaaacaatcatgaatagtttatttgcttcaaaatttgatttattaaatttgaatttcgttttcctatatgtttgatttatttatatataacactaatggccaagtttttaaatagtctactaaaaattagataattatttaaatagactaaaaatttctccaaaaatgatacatcaacatgataattttgttttaaaaaagataatgaaattttaagaatacttctcatttaatctataaggtattttacggccgtagctataattttttattttaaaaaagttagttaagagtgaaatgagaaatataattgtaatttgtaatagtgattatatgattaggttaatcaatgaaataatggggcaaccaaagcttagctgggtttaggaagacgccaggaaagtaaaaaaacataaaaagtcaggtaggggtaaattagtcttttcaaataccatgaagaaagaagagacgccaaagaaaagactagtgacgaaagaggaagacgcggaggtactctcattctctaatctatttcttcgatagtgttgattctccgcaaaatcctctcgagagaatctttcccaaaagagattagatttggtggaagaaaagagttcttcgtcttcttgttgttgttgaggattgaagaagaagagaaatg

SEQ ID NO: 22142 - DNA, 3003 bp, Unknown
  misc_feature (1)..( 3003): 2750-1469P.txt file - cDNA_ID_2047299; gDNA_ID_1620485; Annot_ID_158456
accttacacccatcgttacccacctcctcggcgatgaacaactccagtttctccttctcgtgtcggcgagaacatcggccttggaaccttattcaacgtcatctcgtctcttgacagtgaccaatttgttgtccattgattcgttcgtggaagatccttcgactacccgtgacctcacatgtgccatcatgccttatagtttgtggctcaaagctctcatgaattttatgtcgtttcacattatctatcatatcttggttttggggaatgcctcttttaattatgttttaaactttgtgatctttgaatcactccttcttatatttgttttgatttgaataaatgaaaacaaatctttgcaaaaaaaaaaaaaaaagattatatcgacaatgatattgtttaaatatatcagtctacatttatcatcttctctgttagactcgtcgttaaatttctatttttttaatagtttacacagatgttttcatattctaactatttctttatataataaatttgtatatctagtagacggatcttcaaaaaaaaaaacaagttctccccacatattaatatcaaaaaaattcttaaataccttatcagcattttagatttaattatgagcaaaataaatgtttagagatatgaaacttaaataattgtatcttattctcaacaattaacgaataaccaatttggagacaaatctataaactaataaatcttgcttctctatagggtgcgcttttgtccctgttacgtatgaagtgacgtataatcgtctactaaactattttatccgtacgacatcagtttcctataatatttgtgtgacactataataaaaatgaaaaatcatgttcgtcgtatacctgaattaagcaacgtataatgaataaactttccataaatacaaaaatactcgattagtggagtgtgcatcgccaacaaaaaagattctacgcaacgtgtcgaatcagtacttgttcctgagttcctccgtcactaaccagtgcggaccatgtcagtatccaagcacccacacgctcgtcgtctcttgaaaacatctcacacaaatacacaacggctcggactaataacttgccatctaagaaaagctaattgacctaaggctttgtggcacctgcatgtaaaaagcaaacacgaatttgccacgttattacaaagcataccacgtcaccgtctcactgttacactatctcttgttctcctttatttcgctatggacaacaaaaattataaggtggggaagagatgtctcaaaatacttttttatcgtcctctcaatttatgtaactgataataatcgaaatagataaatttaattgtaggttgacaaagcgctaattttaataaaaacatatattagtttggaaaattttgtcgtagtaagtaattaaacctatcaatcttgactaataatttcaagtatcccataaaaatcaaaattgtccttaggttttgaaattgtactactgatagtacgtaattaaacaaacaaaagctatagcttgtggattatagctaatcccatttggcgatgagagtaatatatatattgttcaaataaagttgtaattaagattcgattgaaaaggtaaattatagtttaagaaaaacaaagagaggagacaacaattaaaaaaatgaaaagtggagaactgtactctcgcctatacgaggaggtcattatctccaaggctctcaaggattaaggaccatgctttgattctataaatgttgttttattcaaactatttatattattatatcatacgtaatatgtggttagcatttgacccacgtccccttaattaagtctagattaatcccattaatctatccaattaataattaggaaaattttatataagattgctattggatttctcggtggtggtttaaactataaaatagtaatgcctttgatgcgtgtgattttttattggaacttattggttttaattcttaacctagcaattatatttgtagtagtttatgttaatcattgtttaataatactcctataataactcttgcaagtagcaacacttgtgtggctatttattccagagtccatggatatgtatgtataagaaaataggagtgcttttgcagattgaagagtttgtctataaaatcatgtttacttggcatttagtgttattgtttgcaattttttattttaaattagtcggatattttaagttaaaatctgaatacacagcatgttccttctaacgttttttaacataattgtaaactaaagaaaaattataatataataaattaaattataccctctctattcattgtagaagatttgtttgtttcaccaaatgtgttttttttttataagttgctctcactcttgagagttttggagtattttgaagaggacgaggttcttttgtgaaaaagtgaaagaaacaaatcatgtcaagaattagaaagaaatcatgacaaataattttgtttgtgcagaaattacaaatgaatcatagatatccttctaattcgggatcggaaaccagttgaaaaatcgatggactaagctttctatattgggactagcttacccttagaattagtcaagcagcttaaatcatctatgacttaaaattataattaagaaaaaacaatgcctaaatatgcatatatttcaaatgtatcacataacttgtgacataagaaaatataaacaaaacaaaaagggcaaaaaagacctgaaagcttagaggcacacctgcataggtcccacagttcactcgtgacaccgtaaaaggcaaaacacgaacccgccacgttatcacaaaaagcaagccacgtcaatatagtctcactgtcaactacacttaacttactattttcacatctcattttcctatctttatataaaccctccaggctcctctttaatttctttaccaccaccaacaacaaacatataaaccataaggaaaacagagaaagagagagatg

SEQ ID NO: 22143 - DNA, 3000 bp, Unknown; identical to SEQ ID NO: 2079
  misc_feature (1)..( 3000): 2750-1469P.txt file - cDNA_ID_2047315; gDNA_ID_1620485; Annot_ID_158451

SEQ ID NO: 22144 - DNA, 2400 bp, Unknown; identical to SEQ ID NO: 2076
  misc_feature (1)..( 2400): 2750-1469P.txt file - cDNA_ID_2047330; gDNA_ID_1620485; Annot_ID_158445

SEQ ID NO: 22145 - DNA, 3003 bp, Unknown
  misc_feature (1)..( 3003): 2750-1469P.txt file - cDNA_ID_2047358; gDNA_ID_1620491; Annot_ID_158622
cattactatgaacaatctctcggcttggcaaatctaagttcccgaagatagagtcccatattcgaatacggttgtcctgacacgtcgtgaggattttcgtgcctgatgatggagagaagtaagcagagttgactactcgtttgtgtgcaagatcatgaagagaagctttaggttgtagtttacgcatatcccagattcgcgcctgaaaccataaccaggaaaatctattaaacaagttctgaaagaattcagataaacatctaaacgaatccaaagtgacagcatgatcttggttttgtttgatagacttacaaaatgatcgttcccacaactgagaagaagctcaggctggacagggttgcagtcgaggccacaaactttgcttccttgcttgtgtatcagaataggctcacccgtactgttattggtacgatgatcgatccttttacaaaagcaatcacgagaaaatcagtttggcactcatttaaaacagtaacaaagaggctagtctataaacagttcaaggggatgaaatcacttacatgtgaagaaacccaaaattatcagcagcaagcactacacctttctccgagtttatatccataccgtacagcattttccaactgtttgcgccctataaaccgatgatatgtcgtaataagttaaatgaatcagagaagacaaattagagaaacgagacgatggtgtgacctgccatccatcagggttgagattcagcaaagttgatgaagttccagtttccaggtcagtataaccaattgttccatcagaggatgcagaataaaccatgtcatcatttgtgggactaaacctgcaataccaacaaaagaagataaatttgataaaacaaaagacatgagcttttgtttccagatactataatgcagaaagtaaaaccacaacatatactgtaagattgaaagccagatttaaaaacttaccgcatattattaacttgaacagaatgtatgtttccatacacattcttctcatacacttttccaaaatcccagactccaatttgccctttcttcagagcattaaccataagaccaacaacagaatcgaataaaaacaatgagaaaataaacgcagaaaattagttacgtatgacttttgtttcattgtaaaaccttatctccagagagaagaatgttgttctttgttggatggaactccaaacatgtaacacgtctgctgtggtatctaataactgcacaatgaacttgatccgggatcacatattttggtttaatctgtccagcaaaggaaaaagagaaaagatccagtcaaaaaatctcatcaggtatcaaaaaatgtttggcgcttgaacacgtaaggacttacaggaggaattctcggttggagttggcgcttgaacacaaagtcaatagggttctttgtattcctatgagaagttgggagtattccgtggtcagtaaccactctatgaggacaggacattgtggtgtggccttcaagtgatgcagtagaaagcgaaaacattgagtaaattaacattttctccactcaccatcatcaaaaagctcacatgtaagcaagaatcgataagaaatagcaggagctttaccaggcattttacacaagaagcaaggcttcataggacaatcgatatacgttgctcctttaaatccagcttcatggccaggctgtttacaaacctataaaaccaccatgaaacaacaacagatacgaaacaatcaaagccaaacaccaaaatcctctgtctctgcatccaagtgaagaatactaataaacaataaagtgaatttcaggcaccattataatgggaaccaatacagtgaatacttctaatatgttcgaaatcaaaatcaaaagtcattacttattccacataagcctactcagaacttgaaatcataagccaagtaagaaaactcattagaaaagttagggtttttagaatagcgttactttgcaaactttcttaataagcttaacggtaatgggtgctttccctttggctttattcttctccaattcaattttccctccatttttaaccgcttcatcttcctcctccgactccgagaaagggtaattatcttcctcttcttcttcttcttctgacgaacttaactcggaatctgtatctctagcgatgacgatttctgggtccctttttcttctgctcctcgttgaactcattttcggtaaaaatctcacgacccgacaaaaggaagagagtacgaatcaaacagttttgtttctttttgggtttgatacgacgcagcggacacaaactaaagccggttaggtcgatgaccggtttaattatttacgcggataaaaacacttttactcccatttagatttaccattataccccctccagatcttgtaatatgttcctgtaataatgtgagggtatattggtatataactaactatctcgtggcgggagaggttaagacgtggcgaattaccggccggaagcaccattcacgtggctctcacgagcaatactagtattgggcctttttattcagataagtaatgggctatggcccaattttcatttatcccatatttaaatttgacttacaaacaacattaattgaggttctttgctggtatgttgacaaacaacattagttgaagttctaggaggaggttttaatgcatttattttctttaagaaaaggaaaattaggagacgtggacgaataggaactcgtataaaccacacaaaaaagaaataaaaagacaggagcttggaatttcttaacgataaagtttgtttgtggcgctcaatttcgaaaaaaacatgtcaacatcatcttcttccacaccgacaaaacacgtcgtcgttttcaaacacttaccagaaccatctgtggaggaaagaaagttccaaccttctctgcttataatacaatacttcccctatgctatcaaacctatcacaaagcctagagtaaaatcgattctcttaagatg

SEQ ID NO: 22146 - DNA, 3000 bp, Unknown; identical to SEQ ID NO: 2123
  misc_feature (1)..( 3000): 2750-1469P.txt file - cDNA_ID_2047385; gDNA_ID_1620491; Annot_ID_158612

SEQ ID NO: 22147 - DNA, 3000 bp, Unknown; identical to SEQ ID NO: 2131
  misc_feature (1)..( 3000): 2750-1469P.txt file - cDNA_ID_2047393; gDNA_ID_1620491; Annot_ID_158610

SEQ ID NO: 22148 - DNA, 3003 bp, Unknown
  misc_feature (1)..( 3003): 2750-1469P.txt file - cDNA_ID_2047397; gDNA_ID_1620491; Annot_ID_158609
atctgattcatgcttgaggtcattgcttccttgtagtcagatacatgaacatcctaattaacattgtcataagtttcagtgtcttcaataagcaaatcactgcaattagacagtttgagattttatttcataaaaacatcatctctgtgactgttgtttgcactgattatatctcaaggcttattcctgctgcaatgtctatacatgtatatgattttcagttcccattgactattgatttttataggattcattatagctgcaaggtgaataggattttagagatgtgtggtcgatcaactttgttgattggggatgattcttagatgctagaaaacctgaaaggcctgactttggttcttatatatgattatgaatgctaaatgacatgacttctttggatactgttttgaacttctccgcaaaaggcataagtaactctagctttctttatcagtgtgactggtgttcatcccaatttttttaatttgtaggggaactgcagtcaccatgaagaagatgttagagacggcttttcccggtttagatgtgattctcgcaaattacccaccaccagcaccaaaacgccttctagctaaggttgtgccggttgttcagatgggagttattggtatgatagttgcaggtgatcgtatccttcccatgattggaattacgaacccacctgcttggttccactccttgagggccaacagatttggatccatggcttccacttggcttatcggaaactttctgcagtcttaccttcaaagctcaggcgcctttgaagttcactgcaacggcgaaccggttagtaattaatggtttaagattatttccagatatgtaagatcagtttgtactaaatcctgtgtttctatttcaggtgttctctaaattgaaagaaggtagattcccaggagagatcgagctgagagatctcatcagtaaaactctaacacgaccgagcatactcacaggcagcagctactgaagtagtagtatcagaagatagaaacgctggaacctttccgtgaagttctcacaagtatttttaatacgagatggtggtacaatctcatgtgccaaaagtgtcttctatgtttcagttaatctgttgatgtagcataccttggtttacctagagtgaactcttttgattcaatcattttgcatagacacaaattggaaaataaggtacaaagtcattgccataagaaaaaaataaatgaagttgtatggagattacgagaaaatatctatatagacagattagagaaagctatatgaactgagatttaatctcagacaaactgaaaatgtaaacaagaagagttctttccttctgcgttaactaaaacattacgtcagcctctgccgacgacacgttggccggttgctgacggaggaacgccggggtcgtgcttaggatttgcagatgggtcaccgtagtcctcaacgttcaccatcaacaaactcctttggaatccagaattctcaaacccacctaatccaaacgaaatcattcagacatagagaaaaacatgaacgaatcgaaggaaggaaacaagaagatgagattcgaacctgaaacggaaacagggttgcgggctagagaagatgtaattgtaagcgtcaataagagacacacaagaagacgaactacaaaagtcatatctctctgtctgatataattaaaagaatcttaaaaatgcatcggttacagattcgtgtccgtcttatttataaagaaacgacaacaagtgtgtgtttatccaaactgattttacttgtctcaaatctcaatcaaatatatatacgtttcttataatgcggagatgatgaaaacaggtcagaagagtaagaccatgtagatgacgacacgtgtcagctaagaaggcgggagtgggaggtgacgtgtgcaacgcgtggtgccacgtatgtcacatcaaggccaagcaagtggaagtgtggaggcacacaagacagtgattgtcattttgtgcaaatcgtcaacgcttattaccaaattttaagatcattttaccaatttctcccactcccaaacttttttgttgacttttttctttctctttatggggtttcctcgaacttctcgccagaaaataataatttatagctcactctcctcactgttctttctaaacgaggacaaaacatgtttactacatttccaaaagtcaaaatatgttcatgagacagttttaaccaaagtaagtgaaattcgtaatgagattggtacttcaccgattatgccttaccatgcattgtactgccctccagtaattgtatttagaaaaatcttttatttttaatgtagttgtataatttgctacaaagattttccgtgggttctattgggctccttaaaacctcatattggatccgactaatggtgattggtgatacgcatcaaacatgctctcgtcaaattgatagatttttggtttctgttggatgaattcaaaatatataagaagaagtagacaagattatttacaatataatacagtacatatttactctacatctgcttatataatttcgttgtatagcagtatcggtataattacgaataagttcttttaattttcatttaaaaaccaaaaaatgttttgattaatttagaaaaatattgaaactttacgagagatgggccgacaagtaagattaaatggtacacgtacccacatcgcatgcaacttggtctcttcgtttatacagaatctatgccttatttgtgttacagacataaatccgtgacaagtgacatcaattcattagggaatattatattataaggaggtgttgatctatagatatatatattatggaaaatttatcattttttggaacgtaatcctttgtaactaaatgcacctatagatacacatcaaacacttcatttgttttaagtaatttaatagactttttaaaggataaaatcgaaagagatctcaagagaaatagggagagatg

SEQ ID NO: 22149 - DNA, 3003 bp, Unknown
  misc_feature (1)..( 3003): 2750-1469P.txt file - cDNA_ID_2047406; gDNA_ID_1620491; Annot_ID_158606
tatcggagcaacaaccacacctcctttgagtcctaacggtgtatcctctccaataggtggaggaaaaacgtggatgaactggcctaacataacccctcctgcattgcagcttccagggagcagattgaaatctgcattgaatgcaagagaaatcgatttctctgaagagatgcaaagtcttacttctccaactacatggaacaacacgccaatgtcatctccattctccggaaagggcatgaacaggcttgcaggaggagcaatgagcccggtgaatagtctcagtgatatgtttgggacagaggataatacatcgggtttgcagatccgacgcagcgtcattaacccgcagctgcattccaacagtctttcttcatcacctgtgggagccaattctctgttttcgatggattcctccgcagtcttggcttcaagagcggctgaatttgctaaacagcgaagccaaagcttcatagaacgcaacaacggactgaatcaccatcccgcaatctcttccatgactacaacttgtttaaacgattggggctcattggatgggaagcttgactggagcgtccaaggagacgagctacagaagctcagaaaatccacttctttccgtctcagagccggtggcatggaatcaagactgcctaacgaagggactgggctcgaagagccagatgtctcatgggtggagccgctggtgaaagagccacaggagacaagactagctccggtttggatggagcaatcatacatggagacagaacagaccgtggcttgaatcaaaagttttgaactttcattaaccgttccacaagaagcaaagtcagaaagattccgagaggtcgatgctaatctatttcattttatttgtttaatgctttgttatttttctttagaataaaaagaaaaaattcttaggggacaaaagagagttcgtttgtctctctctctgtctccaaagaaaaacagaggtgaaaaaaggtttcaaaacctaagaaaccttgaattacctcacctcacttccttgattctttactattcacaatgagtaatcgatttttttttttcttggtaacactctcacgctgaatatatatgttttttagtaataatataattggaatacagaaatgtatttacacttgtgaagttagggaaagtgttgtaattgtttcttctaagagttgatctaagatgtttgagactatatcttcgcttatgattccttctatatcttcgagctttaaagcttttccgttaaaccaatctgaaccttcaaggtcagatacagtgagtttgcagatcatgagccacatctcttggtagccatgaagtcggatttcttggtcttttgatctacttgtcaatgtgatgtgatcttgttcaatcgtttcattgagcttactagattcaagttctgaagacaaccgtcttcttgaaatgtttcctgttacaaggaaacaagtatgctttaataacacaagaaaggacatttcaattttcaatactgaagaattaccaacctggtgatggagttactcgaacaccagcataccggtcataatcaagaaccgagacagggctcgaatcatcgcagcttccacactcttcttcttcttttgttgatctcacttcacaatttactaaatcttcttctttggaccaacaaccattactttggacccaattctccttctcgatgttctgtctcaacttagtttcttttcgttttcttctgctcttacgtttctcctttctacgctgcatcagttctccaatctcaagcctctcacgtcctggtgaaacgttcatggcattgatgttgttctctttaccctctaggtgtgtttgatcctctgttttgctctggttctctctagtatctctcctcttcttacaatttctagttcccagctccttatcatttttatccttctcgaaactgagaatgaagaaatcatcatcttcaagctcaacatactcaagagtggacttaactcttctatgctttccctgaatctcatcgtcgtccctcttcaaatgattcactgaatggctccttgagagaaatctggttttgtcgatcacgggaattgagtccaaacccatgagcctcgccacagctcctggcccatctcctctgcctctgagtggctcggggatgaaatcacgagacttgaaactgggttcagtaattagatcagatgggtaggtagaagaggtgccggaacagagaaatctttgaagaatgatagagatacagccgaatgaccgagtcttcgagccgagtgagagagaactagccggagaaggcgatgacttcatcttcatggtctatagtgtcagtgtttcgaaactaacggagaagtaacgcataaggaaaataacttttgtctttacttttttttttcggttgagtgatgatggagagcaaaacaaaaagtgtgaacaaactcagagcgggatctagaatttgaactaacattctcagtcaaaaacaaaatgtaaatcagctttttttgttgtactttttgtgattgagaaagcaatagacaacagttgagacgctgtgcactgcacgcgttttgacaagtcaattcccggagaaattcatgtcgtccggtgccgcttttttataacaaacctctgtcacttttgttctttttagttcttgaaccgagtcaacaagaaaaaatagttgcggatcaaatatttgggccgttttgatacttttcagtgggctttatgttacttctattcattcaagcgggggtgtaagtgcaataaaatataaatacaggggtatttaagcaaatatttcaaaatataagacgtcaacaacaatgagcaggataataatattccagcatccaaacaagtcttattgaactctctcgttccgtcttctccgattcgctttacactacttcttccctcgtctctctctctcgcgcttcactgtgaattaatcgagagatctaaatatccgccatg

SEQ ID NO: 22150 - DNA, 3003 bp, Unknown
  misc_feature (1)..( 3003): 2750-1469P.txt file - cDNA_ID_2047440; gDNA_ID_1620491; Annot_ID_158594
aacgcgtactctacaaaggttaaagctttatcaaggtcagtgacagaagcagccaagcgagcctcacattcagacttcagatcatcgcaacagaatttgctggctaattgaagcagctcaaatacagtttccacacgaaacagatcaactcttttgattctactatatatgttgagtgccaacattgcctcaatagagatgccattttccgagaaatcaatctcagaagttgttgattccacgaaagaaccatacaacatggcctcaaaaggacgcgaaagcgctgcgattctcgacctaacacacttagccttctctgaacctacgcagaaggaaatatcgctaacctcatctagacccgaaaactcatcagccttagagattttaacgtcatcactaccaaattcatcctcacataccgtagaacattcacaaccctcgtcgtctacattcaaatcacaaccatgagtcaaactagtcttcggacattcagaagcaagcccattacaatccatagattcaactcccacaagttcatgttctctcctaaaaaatctcaaccaagcagagaaaacaaccttacaagggacatcaatggcgtgcctcctagcgttgagaaggcacctacgcaagagcttggcatcaccgagactgcggagaacagcgtactgctcaaggtagagcatcgatgcctcggattccgaactggactcgattctccgatatagatttgataatgactccaccaaatcgataggtttgaggtaagagtccaagggaggctcgaggaggtctgtggtgggaaagccatgagggagaagtgaacgagatttggatttgggatgcccaaggaacttcatcattcgagggctaccattgctgcttgtagagggagagtcttgtgtagtaaaggcgtggacttgagtgcttttaaatctctcaaagagtttgagattgcgcattttgctatatcacagaaatctgagaaaagggtttgattttgaagtaaagagagagtgagggagacggagagagcaagagagagagagagagagagagagagagagagagagagagagagagagagttgaaaacacaagctctgtctccggtgacaacacacagtgcagagacaaaaaggagagagagagagagaggaagaagaagacgatgaagtgtgattgagaatataaattatttttataaaaaggtcaataatttggggagaaaaaagagtaatggcgtcgatttttgcaaacccaaaaaacatttatatggaaaaaaaatggtcgaatctcatatctgtttttctttcttttatgcatttttttgtggaacagtttacgaacttcaacagttggtggttcttattgggtgcgatacgaaccagaccactttcctttctctttcctttttgtgtaaagaccactttccttttttaaaacaatattttgtttctgtttttttggtgaggaaatattttgtttctttgttaaattgttatttttttccatatttgaagatattggtatggcttttaatttgtgaaaatttgggtttattacagagttatatgatgattaaatatagtttagagaattatagatggttggttcgtttcgggtataattaaaataagcctctctgactatccaacgtcattgattcatgtgatgccaagataggtaggttaactagttatgtggtttcttatcggttatctcctatctaaacaattgagcttaacattaaactttgaagatattaacttatctctctaatgaacgaaaaaaattcagttttattggttgattggttatgatttcaatgactaacaaagaaatggtctttaatttatgtacagcatgaatttactcaatttattacatacaacatgatttcaaaaaattgcttaaaattttgcaaaacatttctttactgtgatcacactaatcatttgttaatctggtgtctacttttttactcgctaacgtgagcgtgtatatttatattttctgagatcttcatagttttaggtttttagcttgtagttagttttttttgttctcgatattggaccaacaactatcaggaaacgcataatttattatatatataaaaaactctcataaaacgtactgtattaaaacaataacaaataaaaagtggagagaactatatccagaaccaattctgatgttcttttgcccgcacacctggaaaacacatgcaagtgtactctttaaagataaacatatataccatttgcgaaataattgaggattttttttcttttgccaacagataaataatataagattgtttcagaaaaaaaataaagatggataattgaggattaggttggcattatttgatgcaaaaaatactaaagaaaatctcacattgaaatcaattaaaataattttcttatggtatatacaagttgatgcaaaattgataaaagattaaacaaggcaagagacgtgtggtcatgtgtctcggcaacccatgtgagggaatctgaatcactttttttttttttttttttatgtttctcgaatctgagtagcacaataattgaattgtgtttcgtaactaaattagggatttattaatcatgaaaaattatttgatgaaatcaaattgtggtccgtctagttgacttataccagcccaaattatttagcgaatataaagcccaaactaggcccacaataacaaattatgcgtttcctcaaacgaacaccaccatgtcatgaaccattctagccgaatccaaatagaacgaaactaaaattgctttaatccatatgtgaccagataaagtaaaacactccttttggggaaataaatatccacttttcaccatctttttggtaaacaataaaacaaaccaaattttgtgtgcttgagcaacaacaactaccaaccagttactgtcaaaaaaaataaatgaaaacgtaatcgaagaaaaggtcgtgttttctagtgttgcagaaaatg

SEQ ID NO: 22151 - DNA, 3000 bp, Unknown; identical to SEQ ID NO: 2120
  misc_feature (1)..( 3000): 2750-1469P.txt file - cDNA_ID_2047453; gDNA_ID_1620491; Annot_ID_158592

SEQ ID NO: 22152 - DNA, 3003 bp, Unknown
  misc_feature (1)..( 3003): 2750-1469P.txt file - cDNA_ID_2047614; gDNA_ID_1620500; Annot_ID_158836
aattttatagggaagacagtgacaaattcttgttatttataaaaaaaccaaatttgaaaatcgaagagccaaattgcaaaataaatttaacatttttttatcggatgttacaaaaataaattagatatccacataacatgtgcgaatgttattgataattttgtattaatcaacaaaaaatacatgtcgggaaagaaaaaaaagtgtttcatttattgttatgaaccctttataagttatgtattaccaaaatagcactcattgttttaaaattacaaattagtccgttcttttattcccgtactcgttccttcttcttcttcttcctctcatcgtcattttctcgattctcactcttccggtcaccgactaattctggttagctcacattccttatgctcattcatccacagttccctaattaacgctacgaattttgtttctcctcttatttcttctttcctcttgtagaataaggtttatcaaaagaataagaataaggtttatctcttaaatctccgataattagcagagttttttcaggattgagtttgatttgctgttttggaatcataaattttgcgttttagtggataaaaagctagctttgaaagagttattgcagagaaaaaaaatgggatcgagagggattatcaacgataagtggtcaatgaggattctatggggttgtgctatcggaagtgctattggtatgattgatccatctttcccacattttcatcttagagactatggtttttgttactcaaattcatgagctttttgtttgtatgggacactttctttaacccataattgtttaggtttatacatggttgctgtagagagacaaactcagaacagggctcgtgctatggctgagagtttgagagctgctgaatcacaaggtgatggtgataatgtctaatatctaccaagtagtgctcagttgaatactctcagttgagtttttttttttggtgtttgtttttgttataatgacttcttctgccaagatggtgttgatgtagtttcttttttgcaaataatcgtaataaggtttcgaaacttggagagttgaagttgctgaacatacgatttgtgttatcgcaaaaaaagttatttcttatgcctgtcatgctatgtttgtgaattcgatttttaatgcgtattttcagcaaggcgtcttgcgtttaggggatgtgttttctattaagtaaaagtcttccttcctataaaagcatgagggatcattttatcaggaatgtacagcaggatcaacttattacatagaaataatggctcagggacaccaaggcttatgctttgggtttatcttcttactatgcttcttcagctctacttttgcactcaggattcttaaggacctccctatgatggagccaagaaagctagatctgaaccatgaaatgatgcctgggatggttatgctacagccagatcatgaggtccaacctgagcacacggtcaagcctggccatacactccagtccatgtccggtgtatcagaacatccagagcacacggttaagcctggccatacactccagtccatgtccggtgcattagaacatcctgagcacaaggaaaagcctgaccataaactccagtctatgttgggagaacatcctgagcacaaggaaaagcctgaccataaactccagtctatgttgggagaacatcctgagcacaaggaaaagcctgaccataaactccagtctatgttgggagaacatcctgagcacaaggaaaagcctgaccataaactccagtccatgtctggtgaatcaaaacatcctgagcacaaagtcaagcctgatcagataatgcagaccatggcgagtgaactggaagaggaagatcctgaccacacaagtaagcctatggggtatggtgtaggtaggggctatggaagtggtgggtctggtgttggctatggcgttggaattggctctagtggaggcagtggctttggagaaggtattggctctagtggaggcaacggctttggagaaggaattggctctagtggaggcagcggctttggagaaggaattggctctagtggaggcagcggctttggtgaaggaattggttctggtggtggtacaggtattggcattggagaaggaataggatccgggtctgcccaacccaattgcggccctgtcacgggagctccaggtagcggattcggtgaaggcataggacaaggtagtggtccaggggaagggattggtatcggtataggacagggtggacctagtgtagtagtcccaggcacaagaatccctccgatagtggttccaggcgcacagattcccggttttgtgattccaggtatcacagttcctggctacggtactggatgccaaacaggtggctgcaatccgaacccaccacactactatatcccaccaagctgtccccattgtccacctttcacatcaggacaagacaaacacatgtcagacaaaggagccatgaccgaagctcttgcacccacttcaccggagatacatgtttaagctttaagagtccatgaaacaccagtctaataaatcactcataatgaaatctattttggtttataaaagcttcacagaaagttgaataatacaactttcttgctcaagtaaaaagatatataagggaaatgcatataagaataagtgagaagtactcagagacagaaaaagattgattaagaattaggcagctggtaattgcatttccatggctgtgtatctgtatgactgacaaatgagtttaaatagaccggtccacaaatcaagttaagctctctactttaatggaaaatacgaactttagcttatataatttcttaatttgaaatgacataaaaagaggtgaatttttcttaaagcattaaactttccgaaaggagagtggtggcactgtaataacgacggagaagaacgaacgaacgcgagagatcgagagagagagaaatatttaatg

SEQ ID NO: 22153 - DNA, 3000 bp, Unknown; identical to SEQ ID NO: 2205
  misc_feature (1)..( 3000): 2750-1469P.txt file - cDNA_ID_2047662; gDNA_ID_1620502; Annot_ID_158933

SEQ ID NO: 22154 - DNA, 3000 bp, Unknown; identical to SEQ ID NO: 2202
  misc_feature (1)..( 3000): 2750-1469P.txt file - cDNA_ID_2047725; gDNA_ID_1620502; Annot_ID_158938

SEQ ID NO: 22155 - DNA, 3003 bp, Unknown
  misc_feature (1)..( 3003): 2750-1469P.txt file - cDNA_ID_2047729; gDNA_ID_1620502; Annot_ID_158942
tttttttaattattaaatttaagctgatgatattcagaaaatatttacttcttggaaaggacaaaaataaaactaaatttactttttttttttctttctctgccttatgtggatgataaattttcggataataacctacaaaatgtgaataaaatttatgagaattgaacaaattgattcatcttttttttttcctttccctggtacagagtttgttgtataagttatataattcggacggtacaaatgagaaaacaaacaatcaaagattacctcaaagactgatgatgagaaactacattttctcggacatcatcatctctctgtattagtattaccttgtgacaccaacggtattgattcagcatctcctggagtttctgtggtaacaactttggatgcttccttcttcagcttatggttgttataagccgctacaccggcaatagctgtgtgtgaacacagagcacactgtatgagaagcaaatttttttcttgttagccaatttgtatgtgagaagttttgtcttaccgatggcgtaaccgaaaagattgatgattgtgagtttcgtgtcggcaaagagaagagctgacaccaagacaaccacccaatccttgacaacgccagcaactcggatagtgagagcactcgtgtgagaaatcaccaagaaaaccgacaagttgagggcaaatgtacagagggaattaagggtcaacactacaaagtggaagttccatgggccattgccatctatcttcgatttctctagaaagatccacggcacaaacaagcagatagcactgcaaaggaggtacaaaaagataaaagtaacccttaggcttaaataatgagagaaatgagatggcttcctcttcttcgattttacttacctgcatgggctcacgtagtacataagagagattgggtttaacttgatgcccttcctcttgacaagaagttccatgaagattagcctcagggcttctccaacaacaccacccatttggtaaaccactccaatccagttgatgtttaattccccataagaagctactaaaacaccaaaacttatgatagacattatcaaaagcatcctgcagctcatcatttcaagtccagcagctactccaagaataaacacagcaacaggcactgcaagtatggttgaagaatactgtacattgttagtcagatataagaagtaaacataagacttatgaggaaccaagagcatgaacagtttcttacttatagccttcaacatctgcgcaaatgcaactgatatgtagaggtaggcagtgtttcccaaccagagggtcattgcaaacattgcacctattggaataactgacgtaacatatctgagtacataaagtgagttaatactgctacattgataaaattagtaaagatatttatgttatgggtattttcgactactccaaaatcaaattccttacgaagtctctttcttccttacatttctagtgtcattccttcctcgaccttcacaatcttcatggagaaataaatagagaacagagaagggaccaaaagttaggcagtctttacttgtgaacaaaaacagaaagaacattaattgcaagattaccttaagaactttggtaagaagaaagcacaagacagaggaaaagatcatatggagtaaagtcaatccaagaggataagggaaattaatttccttagatgacaaaacccactgcagcagagcaattcaaagacaaaaacgttagtcatgacgaaaagagagaaaccacaatctatgaatcgttacttgctacagattgtaaaacggtgaactctgatgcataagcaataacagagaggtcaaaagcaaacacaacacgatcaaacaaaagcaaacggatgttgaattctacacaaccgagggattctaaaatctgctagtcaacttcctagaaactagcacagtacattgcacataccagctcaattccttacgaaaactagcgatcggtttctacaaatcgaaagagcacaaaacaatacgatgcgagaacatagatccagggaaatatagattgtgagatttaaggtaaaccttattgaagaagatttgaccactagaaagagcgatatagagaagaatgtaagcataggtcacgaattcagctctcataaagcctttgctccgatccgccattgaaaccgattattatgatctcagattacggaataaaagttgtcgcttctggtttttatgtaacacttttccgagtgctttttgtttcttttccaatcgtcttctccttcactgagtatttcactttcccatcttctcaaatttcaacaacagctaaataagagcgacggtgacgactttaagtgggtcccactttttattatcctctctcattttatgggcttttctcacatttaaagcccaaatactgttgggtttataagctattgttatgtttcgtcaagcccatgaatttggttctacctcgcacacttttttttgtttcagtttcatcatccacccttggatatatgtccaatgaaaagaaatgaaaattattaagtattttttctcgagattgtgaacgataatatgaaagaaatgtaaggaacacacaagttgcttgtggattagaccacaacccatctgatatttgtccgcatctccacaaccattcttcacctccaacttctcatccatattataatccaacttgccaataattttttcaactgttacagattactacatcaacgaaatattaaacatttaaccatatataaaagttggagatatatgatataagcttttcttagcagtcccacccttcctctctcgagagagctccattccaatcaaagctgtgtaagattctgtgttctagaccaaacagagacgcgtctgtgttctggagattataaacatatgtctgataatcacaactgataactaactcggggttttttgctcttttgacagaaacacacttcagaagatg

SEQ ID NO: 22156 - DNA, 3000 bp, Unknown; identical to SEQ ID NO: 2240
  misc_feature (1)..( 3000): 2750-1469P.txt file - cDNA_ID_2047775; gDNA_ID_1620510; Annot_ID_159096

SEQ ID NO: 22157 - DNA, 3003 bp, Unknown
  misc_feature (1)..( 3003): 2750-1469P.txt file - cDNA_ID_2047816; gDNA_ID_1620510; Annot_ID_159085
acggtacatttaaccacaacgacaagaagttattaatctgactttgcttgttacgtaattgtgcatttcattttcatattgttttgatttattttgctttgctgattaaaataaaaaaaattatgacaacattttaaaatcatcattgattttgtttcactgcatttattatataccatttcacatacatatgaccatttgttcaactataagtatagggatggacattcagttatttgggtttccggtttcggttttttggtttatagaaaatagatccaattcggcttaatattataattcggttagtgcatatggaaacaaagttatattttggttatgtttttgacaaacaaatcataaatagcttactataactgattgtagttatagattgtagtcttgtagattattaataatataagctctttaatgaattttggctagtttggttgttttatatagttcgagcttggttcgattcaaaattgggttattcggtatagaatattttttcttccatttaaatcaaacataatttggatcgggttagagtagacttttggttcggattcgagaagtttggttcggcttgaaaatttgacctagctctaactataactatttgaatcgttttaaccaattcctaatttgccatagtatgtcgagtttttggtttgtaattttttttaaaaatgattccaaaaaaaaaatgaatagtcggattaatattataaattaacaaaataaatagaaatgatggtggaggcgtggaacaataaatagttaacgagatttgatgaccgatgacttgtcggagaagaagcaaactctctgctgacgtatgctttgtgtcagcttattttcgaagcttctttcttacgcgttattccttatttttaattgttttttcatttactttcctaaatttactgtttctcaatctattcaatttattagcttaaatttccactaattttgtctctttctgttggttttatctttccctcagagcacattttccatcttatactctctatctacatgaaagtatgtgctcacgctgtttccataaaggaatattaattttgtacagtataaaatccgttaaaagtttcacactaatgaatactactatcttctctcacattggaaaatgcgctaaaatataaaaggagttaataactgcgtgtttatcactagtgagtttgtaatagttattgtggtgattaatctaattatagttggtccttgatttaatcttaattaagaaaagagaaattaagtattgcaagtgtaatatgaaaagaatcggcgacaagacgttcaagtcaaaatagaattaggctaaataagtataaaattttacgtcaggagaggatcacgaaaaaaaatctttccccttaaaaaaacaattacaattgtattggaaaagacaagttgtcgttaaaagttaaaaatcaaacaaagccgcgaggagtttaaaattgaaaacgaaaaataaaacaaaaaagagtactgtaataatcagatgcgtcagacccacaccttttggtttcgtacgtgtcttcccttacgcgcctatcctcgtatcccttggtctcttaccgttttaaccggttatttctttgtactaatacgcgtaaaaaacaagagtcttgctaaaagatcatttgagttcatcaaattctgttacgttatttgaattgatacgaaaactatttaagaaattatgttctaaaattctaaataacctgtttatactatactttccataacatacaaaaatttgctcaaatactaagaaattctctcttagtaactatgtccagccatacttaggctatgaatgataaccaaaactgcatctaaaaccgtaccgcaacagtgctgtaacagtatcaaaatctctacatatacatatgtatttatgtattttcattactatttgaaccgcaccgcacttctcccgtaccgcaaaacgcagtcaccattcggagccttaatatttaatcggctttcatgctcaaacgttatgacgtaaaattttaaaaattcacaaaatgagactgtttattagtctcctcaactatactttagtttggcctgatgtctacaaattgtaatctagttaatagtaagattttgtttgtttaaattttttttatttttttttgcatatatggttgtgagttaaatgcccatatgatatctatcaaaagtatcttttctaatttcgccccctttacaattatgaaatatacaaaacgtatatatttttctgattatgatgaaatagttgaactattcgaaagctcataaacggtaacccatccatatatagcttatatcacacactaatcattggaaatagttaattttgctcacgttcatagtaaaaatgaaatgtaacaaaaaaaaaatgaaatgtaacgaacccgaattatatttggacaagaaaaagtcaagttagtattcaagaattagagaccaaattgtaacaaatgccgtttggagacacgacacaatgtgggaataaagaagaaaaaaaactgcaatgaagtgaagggacaaaaattaaatgctcggcagaggacggcaccgtcttgatccattcacaaccgtacgccacacacccctcaccggcgtttaccggtgaccagtgttttctttctttctattatattttaattccatttttattttatattcttttgcccgcgtaaatgagacgaaataataaataattattataaaaaaaaacaaatgggaaacctcctaaatccaagctgttttccagaagaacccaaaactccacaaaagttatattcacacctctctcttatctcaaaaatcttataaaccattacaaaataaaaaacatataatcacccagaaagctaaagaaaagttttccttttttcccctcacgaaatctcagagaagatgatatatatctataaaagtatcatctcatagattccatcttttctctattacatg

SEQ ID NO: 22158 - DNA, 2528 bp, Unknown; identical to SEQ ID NO: 2249
  misc_feature (1)..( 2528): 2750-1469P.txt file - cDNA_ID_2047850; gDNA_ID_1620511; Annot_ID_159125

SEQ ID NO: 22159 - DNA, 3000 bp, Unknown; identical to SEQ ID NO: 2251
  misc_feature (1)..( 3000): 2750-1469P.txt file - cDNA_ID_2047860; gDNA_ID_1620511; Annot_ID_159121

SEQ ID NO: 22160 - DNA, 3003 bp, Unknown
  misc_feature (1)..( 3003): 2750-1469P.txt file - cDNA_ID_2047895; gDNA_ID_1620516; Annot_ID_159299
tgtgactcactaggcaagaacaaaggaggactaataccaaagtttttatcatcaatattctttcagcagagtttgtaaaatgagacttagcaaactacaatgttttcataggtaactggagacttgacacccctcaactcgaagacggttgctgtgaaacttcaagtgtttaaaattctcggctttgtaagtattaccaaaactcttgctgttataagggaaactggtagtactgactcatacatacaccatatgcttcttttactgatcattagtgtttgctgtgtgcagattccggtaaaagcacctgatggtactgcacgcggtgaactagagattacctatgtggacgaggaactacggtcagtagtgaatgatagtttttcatttctctatggaactgacaaccaaaaacatttgaatcttgaaacaatgttcattttttacaggatatcaaggggcaaaggcaacttgttgtttatattgaagatgtttgatcccacttatcgaatccctctctgatctatcgaaaaaaatagtttcgagctatcatacatacttaaaatcgcttgttctgtctctctattcatcatgtatgtaaaaatctaataagagagaataaaaagagactagcttttgtcaatgattcaacttgttttgatcgacattgcaccacattagattaaaaaagctctaaactttgaattcggtacagaaaatcagaaaaggactcatgtcctcttcttttgaaatatgttacaataaaaatttggtttcatttcttcttctttcttggtgcgttttctctgataaacgacgccgtatgaagctggcgagacacagacctctcatttcgacgctttcttcttcgtgaaactcttcatttgttttatattggaaacagagtctctcttatgaatcaaagcgacaaactttgagaaggcaggcgaaaatctcggatgggttccatcgctctgcaatcttggagcagaggagcttcaacttctcttcatctcctttttcgtccaggtaggtaagtgcgattcctaacttgatatgatcatatatatgagaattcgacaaagatttttggttgaaatttgcttacttgatgatcagttggctcgaaccctaagctatatgatgctcgaagagtacaagtaagattctttaatgttgccgcttcttggtccgaacagatgatctcttatactatagtctgtttattttgtcttttgggttttaagtttgatgtaagagcctcttcaagtcgtaaatcacttaagaaactcaaaagagagtcacaacaaggtaaagacataggcttaagaaatgttacagatgaagaagtttcttctccaagatttgaggaagctcaagttgattcttcaacttcaaaggactccattgatgtttttgttgctgctcctcgagacaaagtgcttcaggcttgcactgtaacttccggtttgatggctgcactaggtctgatcatcagaaaggtgaatcccaaatctgaaagtttatgattttgtgattctagcatttgtatcttgctgatttggttaccgcttgcaggcgtctcatgttgcttcgactgaaggattactggttccagactgctctatagatgtaccatgtaacatctcggaaaacgattatgttgtgtactaagaatcctttgagagattcagtaaccaaaacatgttttgtattgcatgatctttcttgcagttgggtttgaaacttggcatctcggtttaattgctggaatcgttgtgtttatatcgtcaagtaggttcttgctacttaaatcttggccagattttgctgattctagtgaagcagcaaaccgacaggtcaaaacattacacattatatacatttatacgattctttaaactccgcttattgtctcctttggtattcactacttgcagattctcacttccctcgaacctctagattaccttgttgttgcaatgttaccgggaataagtgaggtaacaataaacaatcacaataaaacacagaaaggctctcctttagaaaatgtcgttcattggtttgatttggtgtattcacaggagctgctgtttagaggtgcattaatgcctttgttcggaactaattggaatggtattgtagcggttggcctcattttcggtttacttcatctcgggagcggaagaaagtattcttttgcagtttggtaagccgtttttactgaacattttggtacctcaatgctgatgagaattgcgtagaccgaatcttgatattagatgattgcctttaacatgttcttgcatctctctatcacatttccgaggttttcctattgaattctttgcggtttcttgaaattttcagggcttcgattgtcggtatagtctacggttatgcagctgttttgtcgtcgagtcttatcgttccaatggcctcgcacgcactcaacaatttggtgggaggtctgttgtggcgatatagttccaagatcaagtcattggagtgaaataaacaaaatttacaacagggttgaattaaaaaagtatacaattttaatgggtgggtttgtgaaatctctcaatagtatagggtggttatgtcaaaaatctataatagagggtggttattgtaattttaatgtaccaacttgtcacaaaggacaagtatgaaaaatctataattatagaagtgaaaagtgaaaaaccaatcagaattgttaccggaaaaaggaagtgtcttctggtcaaaaaagtcagagaagaagagagaaacgtgaacaatgaagagacagagacgtctcttctcttatgcgaaagtgtgaatcttttaaagctttttgtttcaacatcgataaatgaagtttcttttattgaatttatagaaatttgcacactttaccttgacattaaagcaacaagctttgaaaccaaataaaatctcaaaaacccagaaagcgagtggagaagagagagctgatatgctacaatagaaatg

SEQ ID NO: 22161 - DNA, 3000 bp, Unknown; identical to SEQ ID NO: 2289
  misc_feature (1)..( 3000): 2750-1469P.txt file - cDNA_ID_2047921; gDNA_ID_1620516; Annot_ID_159292

SEQ ID NO: 22162 - DNA, 3000 bp, Unknown; identical to SEQ ID NO: 2303
  misc_feature (1)..( 3000): 2750-1469P.txt file - cDNA_ID_2048000; gDNA_ID_1620517; Annot_ID_159338

SEQ ID NO: 22163 - DNA, 3003 bp, Unknown
  misc_feature (1)..( 3003): 2750-1469P.txt file - cDNA_ID_2048012; gDNA_ID_1620517; Annot_ID_159335
ttccaaaaaataaaacacagacttatccactaaaccttttaaaagtgcagtactgttaccagttaaaatgttattcaagtcgcagtgataaaaatctcaaaagtatatgacaattttcattcgtagcacctatatatttgcatttttacatcttccacttcgaatttattgattgaggcttcgacctctactacaaatgttttcacgaatatatccattgcaaaaatttagccacagacgaacaatgccgataccgcattgatgactatactattactaatcttatggtacgtagtatagcacatttgttttaggattatagtttgtaatgaagaactacagctgttggaaaaaaaaaaaaagagttatccgacgatagaaaatgcagcatatagaatttgtaatgaaaaactacgtctttgagacgacgtaatctaaagcaaacactaatcttctatcttgttaatccgtttcattttttttgctgtgagttcttttatcggtcaaacaacaaatgcatggtggggttaacaccaaagtccttttaccacgtggttttaaactaaattacttaattatacacatggataaagacatatatgttgatgaagagaatataataaagcccttttaccatgaagtttctttttcgaattttgaccgaaaagagattcaataagatccgttatatagatgagaagtgttattgggaaataaagcaagagtggcaagtggacgatagtgtgcttgcacaatagtcgagagaaaaacacattattttgagtttaaggagtccattaacaccatgatcaaaccaattactatctattcaaattcaagattaatcactaattttctagctttttgagtaattacattcgcatttgattgttcttcacttaaatcaacttaattttatgatgaaccacaagactatatctatttaagtatttatagtaaaacttcaatgtaagttcttgtaatgaaaacaaagagcgtttttgtccactatctatatgttacaaacttacaatacaattcgtttaagaatgtttggtgggagattttcacatgcaacatatctaatgtgggcaagcaagagattgcttgaaatagaccaatcctcgagcgatatccgcgggcaaccattttaatcttggtccccttagccgctttttgaatcaaaatcttttaaagtttctttatttcatgaaatcaatcaatattaagaattttttggaaacatacaaaatatttatagttacagtagttagttcgtcattaccaatatgcaaagttcgaaacatgtattaacaaagatgattctaaagctaattttgggcgacattctaagtttttgcttctttttatagttcttttagttagtggggaaaaagaagtattaaagtgggttgttgggatttttatggtaaataacattgttgggaatttttgtatcagacaactcaaaaatatattccctctgtttcttaagtactatatgtttttgtgatttttgcacaatttaagtaattatttgcaataccaaattaagtttcaatttattaattgattattataagtttataactaagatttacattaaattgaatttaataggtatgagtaagaaaatgaaatattactgtcacaaaaataaatcttaacccttttttgtttgtaccgaacacatttcattttgttttccttcttcctttacttcttctctttatgcaattcttgaggatcgttctcgtcacacgttagcacttagccttagcagaccagaggagctacaagagtttttttttgacaaatacctttcacttaagaccaaaattgattgaagtttatataaaataataaatgattatgtggtataaacaaaaggagggagagatgagacagaaggttgcttttgcagtattccgggaatgcaatgctgtctctctccgaggattggcgtgagtgagtgagagagagagagagagagtctcattcatctcttttgtccttcttgtaattaattggttttcactattacaataaaaatgatactataattttcgataaaaatatgcctttattggagattaaacaaatgcgagtctaaataacctttttaggaccaacctaagatatacataaaaagatcaagaagatctttgtttggtcactcctacgcacatcaatgcaaaaagagacaaaacttctcttaaccaagaaatgaataaatttttactttttacaaatgtccaattcaattagcatgcattttaaaaacgattttttctccacaagttattaatgtgtaaattagtatatatttgaaaaaaagacagcttttttttatgctcttattcgctaataatgaccaaaaattaaaagagatatgatgagtacactgaagctgcactgttactgtaaaaccaaatgagaggagaggaacaaagaaaagagagaagacaaaaaagttgagtgaaatgcaaaaaatcaaaagcatacaaaagctgctcatttgtccaaaaagaaacccatcataaagtaaaagcattataatgagatcaaaacccttcgaaaaatttaaaaataaaaaccaactttttcttaaaaaataattcaacaataggaacagaaaacacacagcatgaaataagtataaaggaaccagcttggtctaatttccttatctgtctaaaactctcttaaacctctgtctcttctctctctttcttctcttacttatcttcttcttctcttctctcatttcttgagttctctctcaagactcttcttttcttcagtcttcaaacataagaaaggaagttccttttgtttcttctgttttagttctcttgtgggtttatctatttggggtggtggttaaaggagggagctttgggattagaagtttttcagtgaaatcagaaagctttcgagagaggtttttttcaatttcaaaacgtgggggtggggggttagggttagggtttacaagttatg

SEQ ID NO: 22164 - DNA, 3000 bp, Unknown; identical to SEQ ID NO: 2348
  misc_feature (1)..( 3000): 2750-1469P.txt file - cDNA_ID_2048071; gDNA_ID_1620523; Annot_ID_159511

SEQ ID NO: 22165 - DNA, 3000 bp, Unknown
  misc_feature (1)..( 3000): 2750-1469P.txt file - cDNA_ID_2048091; gDNA_ID_1620523; Annot_ID_159506
atttcttgaccaccacagcgatcttgagagtcttcttgggtttagaagggaaagtgagatggttccaagcagaagagaatcgaagaagatcgatggtttcattgttttgctgatgatcgaatgtgttaacgtaggtgttgtgatcgtaaagacaagaacagagtgatgtgttgtgtctgaagagaaaagagacaaaggagaggagagagaggagtagagcaaagtgacagagatatctgaaactaaaggagaagctcatcaatgggttttctctagccatgggaagtgatagatcgaatcttgaaacccaaaaagttacatctttaagagaaataagaagaagtaattaattgtcatcggtcgattgaatcttgaaaaaaagtttgaccaagagacttgattagattagatttaagattattgtcgtgttctctaagtcacatgcacatgctctctattgaattatcgtagtatagtcacgcgcctccgtgatgtcgctgccgagaaatatgacggcgctggtggttgacttgagagagagactcaaatcgtttttttaaatttatttaactaaactcgatttatctataaaattaaattagggtttaagagaaaataactattgatttacaattcgagagatatagactgcgtgccgtctcaagcgaagaaaaacgtcaagacgattgatgttgtagggttatttaaaacgacgacgatcatagttgaaagggaaaacaatactaaaaatagacgccgtgaccatctattctttgaatgcagcttctccatggcggtttggtcttcttttgctagtaagttcttcgtaaatccgccaagctctcttcgtgatgttgcgagttggatccagtccagaccagtcattgcctctcaacctcggccgcctaacgctactatcactaagctcatccttcaggcgtcaatctctgctatttggaaggaacgcaactcgcgcatcttctctgtggcttcttgctcgatacctgtcatccgcaagtctattgatcgctctctccgtgatcgcctgctttcgttccctgctccttcttcctccgctccttttttacttgcagtttactttggttgtattccttttgtttaatttctgtttatcgttttatccttccactaggttgattaataaattgtatgcaacatgaaaaaagaaaatagtataaaatttaacatttacaccaaaaaagaaagaaaaaaaatagacgccgttgccggggatcgaacccgggtcacccgcgtgacaggcgggaatacttaccactatactacaacgacatttttgattagcaatcacataagataaaataaaaagtaaaacagagatagataatacataatttataacttcgcagagagtctcgtatctcttttgttacaaattcatgtatttttctatccctaaaagcttattctaataaagattagtttcttgatttcatccataaaaaatgtcaacattagaggtttgattatcccatactcaaaagccccccatatggtaaatggttgttagataaaggctttgctataaagggatataagacctactttcttgtaataaaaacaattaatggcgacttaaacgttgtagattcaaaatactaatcaatacaattttttcctcattagaatgtgaatgcgaaatgcaattagtggtagggactatttatagtatttataccgttattccaagaaaaaaggtatgcatagttgcatacgcatggttggtcagatcttaataggtgaaccaatctttccctctaacatttgttacttcaaaacatcgcatgaaaagaagaaacatatatgttttgtctccaaatcactcatcctaagttgcatttgttgacttaatccgcactaaaaccaaataaatcacataaaccaacatattatactgtgtatcactagtatttgtaatggttggtatataatggaatcttaatttgatcacgatctggttatggttagcagatcttcattaatgaaaagttagtagaagaatcatattttatgttttagctaccagagtttgacggcattacataacacattacttatattagaagttatattccacatttatttttaaaatttccttcgtcaattatttactttcactggaatacgatggtcatttggatttctgggcttctgtccgaatgttcaacttcgttgtgggcttgcagaaattttttaatgaaaaaaattgtttacatgtgaaattagtcggaattaccttagcagatttgtttatcataaaatatttgtttaccataaaaatttatttgatggcaagtttgtttggaaaaataatgatagttttgtttgggaaaaaaaataaaaaataaagaagacaaattttaaaattacaaaaaagtttatttataggtcatgactaataacattattactatctagaattgtcaaatactaataattattcaaactataaatagaagaaaaatcaatttgttgaatacattgcttttagagattttattaaacaaaaatcaccaaaaaaaggtttgtcataaataaaatgcattcattcatcataaaaggaaaaaaagaaaagaaggaaagataacatatttatacatgtataccttttaataatgaaaaaaagaaaaaaacatatgtataggtttccttaatcctgaatccttaatctctctcgtgagtcgcaaactcacaacaattggcaggtgatattgtcgtaacgccttcagctaaatctgtccatctgtacggtcttcttctttataaatctttaaactcttcaccactaacccaaacttctctctatctctctcttctctcttttctctgtttcggatttgctctgtttttctctctgttccggatttgctctgtttcactctgttcttgatttgttctgtttttcttgggtttattctgtctctgtcttatctttttcttctagacaagaacaatcaaatg

SEQ ID NO: 22166 - DNA, 3003 bp, Unknown
  misc_feature (1)..( 3003): 2750-1469P.txt file - cDNA_ID_2048133; gDNA_ID_1620524; Annot_ID_159540
aactatgtttagaatatggttagggtatttttaactagttgtttaaagagccgtctttaagtattttaagacgactaaaaataaaaaggctgttttacacatattgataataaattattatttatgattaaactaaatataaaactggatatagtttaaacattctaaaaaggaaattgttaaaattagcgtttctagtgactcaaaccttagtgttgaagattatttagaaccagcctttaccactagactacctaacaaatacaaaattataaagctgaaattgtttttatagtatttgcggccgcaagtttgggtttggcacgcttgtgcttgtgaccggtttgtaagtgtatgtgagaagtgaaagctatataaaatcatatgtatttaaacgtatttagagcatctccaatgaaaagagttcctcataggatctctctatttttttaagtataaatttcaaaaaaagttaaaaagagagctttagtatttttaaaaaaaattcatactccagtcaaagtttctcttagtggggttctcagaaaaaaatatattattttaaaatttttttatttaataagacttaataattattgtaattcataacatattaaacatacattattttgaaatatttttttaaaatagatgtgcaaaaacaaaattgaatatattatcaaattgttgatcgagtaattgatcaaaactttactctatgacatcgtaaaatggaatacgggacgaaaaagccatatcgtttgatagcttgtggtagaaaaagaaaaaaaaaattaaagaatgaaaacaaaaaaatctctttattttttgttaaaaatatgcgtccaatcacaagacgacaagtgtcagactctattaaattctcaaagctctctagagagagtcaatgctctcaattataatgagtttagaaatatttttttgaaataagtgagagagaattcatcaaaaaaataaaaattgaatagaactccccattgttgatattatggttctcttcttgttgttgttgatttagactataatttgtaacgctatacctaatatatgtgttgctccccattgttgtccttaaggagatgctatatacatatagatactagccatgcaaggatcattagaaaatgaatgtgattaaattacaaatagacccttcgaacaatgagaatctcatggttattgttataatgactaaagattacataaacataaataacacaaactaaacatttgtaacaacatcaaatatcctaacctccgtactatgcacgaatttaacgtgtgaaaaatcgggccggagaacaaactgttttaaaataaacccaaaaattgaaatatgaaacgtataatataatcttaaatgtagtatgaaatctccaagaaaatactagtaatattcaatcatatgaagaaaagccatgcaacggctgcgagaacagagcccgagacagagatcacaagcgatgaggctcctgccgcaggagccgaagcttcagggccgtcactggcgccagttccgtcatcggaagatggagacatttctggagtcggagctggcggagaggaggcggtaggtgcgtcagaggagctggtaggaccttcggaagaatcaccggagcttgagtcagggcttgaagccggagttttggctgatgatgactttggagatggggaagatggggaagggcttggagttccggtggaatttttcttggccatggttggagcagctgtaggcggtgaggttggggcggaggccgtgggtgattttggggatgctgcggcggcgggagaaggagaggtagagttcttttcgccgttggctttcggtgcgtttgccggtgttggaggatcggcggccaagacggcggtgatggccaaggcagccacggcgagagataggagtttaagtgtcattgtcattttgtggtgaatgtgaattgcttttgtggtgattaattatgtatttttgtggtttatgattagtgctaaaaaagattaaaaagaagaaaagagttatttttgagagattaaggaagaggtaaaatttaatttatagggaattctacagatttgaccaaagttttggttgaccgggtccatcggaacttgtcttaaaattttattggtttgatcttttgttagtaaaaagagaacatgtggtaatgataattcccaactttcaagaaacaattgagaacacgtgactattgagattgattttgtggtaactaaatgagcactgtttcaacaaaagttaattttaatttaagctatacaaaatactaagaattaaaacttgattaacgtaccagttagtcaataactcaatattaagtggaagttcaattgttcaatacaaattcatacacgtaactgaagaagcacatttaaaagtcaacgaaacatttacatttcgtaaactaaaaataaataaatctactgcaatcttgtgaatgagtctaattagagatgagaaagtaaactgagcccaaaataaataaggcccatttaaaatgtaaggcccatgataatactcataagctttgtaatccacgacgcacgtgttccataatggctaacataaaaacggcaagcagtctacttttttgtcgttatcactttttaacccttttcggcttctatccgtcgattcaaatcggcggcagttcccagcgacattaatctccggcgagacagtttactcggtgagtttcgcggctacatagtttttttgaacttccttgaattgttcattatttcgggatataaacggaatttgcttttccccgatcgtcgtatcactgtagagaaaccgatacttgattggttcttcgctatttttctctattttgatatgcaattcgatttcacactctcaaattcataatcctagtttgtatagtactctatctcgtgaaattgtctgcttttatcgattaaggcgttgttgcgtacattgcagtgtttattgaagctatg

SEQ ID NO: 22167 - DNA, 3000 bp, Unknown; identical to SEQ ID NO: 2349
  misc_feature (1)..( 3000): 2750-1469P.txt file - cDNA_ID_2048171; gDNA_ID_1620524; Annot_ID_159524

SEQ ID NO: 22168 - DNA, 3003 bp, Unknown
  misc_feature (1)..( 3003): 2750-1469P.txt file - cDNA_ID_2048208; gDNA_ID_1620530; Annot_ID_159710
acctaacattgatcctttctttcctcacactcttcttctgaaactcaaaccgctctttcgtagagagattcgtgcaaataaccttccaaataccaaaaaagattcatcatcaatgatcaatccaaggtaaagtaatcgattttgaatgatactcacaatcctaatttctccttttaactcaattacttgaaaactaaagaaaagaagcccttaattgccaaatttacaagattagcgtctaggactatctcaagatcatccaaaaggtaagaaccctaaacaacaatttctggaaatcgagtaacctaacgctaggagtgaataaagaagcttatttgtttgatacctttggtcgtaaatcaagtgaagctgaagaaggtctgaaaatagaagccatggaagagaatcttggattaggctctcaacacaggagcaagagtttttttttgtctttaaagtaatgatttcatgttttttattttctttattggccaagaaaattaaggagaaaaacaaaacctgagccactcagccacataatcactgggaaaatcaatttcgtattgtctcgaaaaatataattgtttcaacgacaacaaaaaatcaaacatgcggtgtggtggcaaaagtcaaacgtttatttaatgaaagtttatcagagaatcgatgggcctagcccagtccaataggtgattcacgtctcactatttttgcagcttcacaaaaatggtaagttggtaacttactatttcgagcgaaaataactcagtaataacttccagattcgtcaaatttctcttaccttgtaatgaagtttagatgttttagctttatgtataaaaatttaagaatatggtctaattttatataattttcttattatcattttgtatttgatatcatattgacaaaatttaacaaatagatattagttgtacttctatgtgaccgccactttattcaatactaccttttaagttttaacagatccgtgtagcaactgatcatctcaaaatatgtgacacatagtatactatacaatatgagctggttttgttttttattttatatcgaaagatattttactttatctgacagctgcgagagatcctaaaaaaaatgaattaactttaaagaaattgcatgcgtctatctatctacgtatatctcaaaaataaaaataaaatcaaggtcacatgactcatatccagtgaataaaaaatattcatgaaatcgtaaataaataaataaaaacagaaattcatatatacgtttttagttatataactatacgattggttcagtgtatttgttgcccaaccaaagctactttcacttcacatatcattacatggtccaatgattatggaacacgtattattatttttgtttaaaaacaagtaaataaataaaacagacaccaaataaaaaaggaaacacaaagatatttacggaagttaaaagagaggtgttgtctatgtcagtgcaatgaacctcttcggctcatcttttcccgccatcccaactaacagatctctcaccgtacacgccatcctcttcaccaaatctaatgactttctctctgtctacgtggcgatcatccggtctgttttccgacaataatgggacccatttgattgttatttcgaaaatgattttatttttcttcaatattgtttttttcttcaatattgttttggaagtaaaaagaatcatctgttgacaacacaacacttcttgccttctcgagtttgattctcctcctttctgtttttggtatccacccgattgtcattattttattttgaactctagaaccaaaaatatcagagcaagctctctagtcagtaaattttgtaattattatagtacctcatttttattagtagcattaatgtactagtgtggtcagtgtagatgaatatattttctactaaactaataaaaattgtatcataatttgtatattttttggtgttttcatcttttactataaaatatatttttgtgacatatggcatgttacactaaacaaaaaataaaataaaagaaatttgtttttgtataaaataagtaaattacgttttttgtcgaccaattttgattaaagctcaaaagaaaagagcaattcctaagagatattatttttatgtgaaataagtaaattactcattatgtaaaaagtttggatttatcttaaatctaatttcataacgtttaatgcaagatattttggtaaaataggaaacgtataaaacatctgtattcaaaacttctataaagatacccaataataatggaggggtgacacgatagtaaatagaataagaaataaaatttaatcaagtcaaaataaaataaataccctttgtttttgtttccacaattccttaagtctttctaattactttgttgttcactaaaacatctcacattgtgctattttttttaataaataaagacctctctctttaaaactgattatcccctaaactatttgtttgtgagaaagaaagagaaaaaaaagtttttttggttggaaattaattgagggagagagagagttcagaatctctaaatggctgaaacgaattgcccagaatccaggaaactctgattttagtccttttttcctcgggaaaacgtttgctttttcttttttgtgtgtgtttggttctttaattgacaaatctctctctatctgtttcatgtgctagctaaggttgtcttcactttcctctaatgagtcatgagtttcttgtcttcatcttcatctaataaagttaacaacactctcatcaatttttattatgttcaaatctgtctgacttttcgttcttttctcttacacccaagcgttttaacaatctaacatctgtctctttgaatacttagatatccaacttcaatttctctcctttctcttcccaactttgattcctgatttgggtttttgttaaagttcaagaaagttcttttttctttttttttcctcctttaatg

SEQ ID NO: 22169 - DNA, 3003 bp, Unknown
  misc_feature (1)..( 3003): 2750-1469P.txt file - cDNA_ID_2048212; gDNA_ID_1620530; Annot_ID_159708
ttatggatttgattgtggatttttgtagttgcctcctatatcaattggtgatggtgctttggatctagtggttattggttgtggtcctgctggtttagccttggctgcagaatcagctaagcttggattaaaagttggactcattggtccagatcttccttttactaacaattacggtgtttgggaagatgaattcaatggtaaaaatctcaatgatccattgttttagtcactatcttcatggtctgtgtttaacatgttgtttattgttactgttgaagatcttgggctgcaaaaatgtattgagcatgtttggagagagactattgtgtatctggatgatgacaagcctattaccattggccgtgcttatggaagagttagtcgacgtttgctccatgaggagcttttgaggaggtaaagtatggttccactatgcatatcttgagaggctttttctctagttatttttgcatgactttgaactgttttaaatacataatttgttattaatgtcttctaggtgtgtcgagtcaggtgtctcgtaccttagctcgaaagttgacagcataacagaagcttctgatggccttagacttgttgcttgtgacgacaataacgtcattccctgcaggtaacaagtcagctagtactattctggttttaccactacgaaaaggttctgacttctagcaaatgcaggcttgccactgttgcttctggagcagcttcgggaaagctcttgcaatacgaagttggtggacctagagtctgtgtgcaaactgcatacggcgtggaggttgaggtataatttgaatatgatattccacagcaataactatatggaggaatcattgttcattgagactgtttttctatttgaaatcttcaggtggaaaatagtccatatgatccagatcaaatggttttcatggattacagagattatactaacgagaaagttcggagcttagaagctgagtatccaacgtttctgtacgccatgcctatgacaaagtcaagactcttcttcgaggttctctttggtgtttctctctccttctagttaaatcgttattgtgataagtctgttgctcatcagctggaaatcctttcaggagacatgtttggcctcaaaagatgtcatgccctttgatttgctaaaaacgaagctcatgttaagattagatacactcggaattcgaattctaaagacttacgaagaggtaagaattggtggtcctatatcaacatagaaacttcttatttgcttttttaattcgtttaatataaaactgtaggagtggtcctatatcccagttggtggttccttgccaaacaccgaacaaaagaatctcgcctttggtgctgccgctagcatggtacatcccgcaacaggtagtaagagcaagaagccttgacccgatgtacttttattcacatcttgaatctgtaccatctctgacttagctttcccccaattaaacaggctattcagttgtgagatctttgtctgaagctccaaaatatgcatcagtcatcgcagagatactaagagaagagactaccaaacagatcaacagtaatatttcaagacaaggtgagctctatataaaccacaaagttaactatgctgttctttcacacaatgagaaacttttaaaacttgtgattttctattttttggcagcttgggatactttatggccaccagaaaggaaaagacagagagcattctttctctttggtcttgcactcatagttcaattcgataccgaaggcattagaagcttcttccgtactttcttccgccttccaaaatggtaagcaagacactgattcgtgattcataacaatgttactgtaaacaagaaaattgattcttcttttcacttactcaggatgtggcaagggtttctaggatcaacattaacatcaggagatctcgttctctttgctttatacatgttcgtcatttcaccaaacaatttgagaaaaggtctcatcaatcatctcatctctgatccaaccggagcaaccatgataaaaacctatctcaaagtatgatttacttatcaactcttaggtttgtgtatatatatgttgatttatctgaataatcgatcaaagaatggtatgtgggttactaggaagttggaaacaaacatgtatagaatctaaggagtgatcgaaatggagatggaaacgaaaagaaaaaaatcagtctttgttttgtggttagtgaccgagaaatgtttaaatcaacaagagtaaaaatgttcaacacatgcttttaatttttatcaatttatttcgcttatattgtttacgattgccatttattttaaatatgatcactttcgtgttcctaagtgcaaattactcaataatctatacacattatttataaacaagaaactgctaattttggattagtgaaactacaagtggttagtgtgccgtctttaatcattaatctaatattaacaagaacagagaacaagtatatgttcgttgcatcacatacagaatctaagaacaagcaccacataattatcaattaaattaatcaatccaatgaaacttcttcttaaccctttaaaaaaacaattactagtcaataaaatcacttctaaattcgctatttgcacattttattcaaaatgaattatatatctttattaatgtcaaccccttgaaataatatagaacattctttctaatatttttctcacaattatatcaattaaaaccttcaaaattatcaataaaacgaccatatcttaaatttcacaaaaatataagtcccaacataacaattttttcgaaaaagacttttctaataaagtaggcgctttcaattttcacaacagtcaataaatacatcacccactttttctatccaagtcaactaaaaacgcgggtcttcttctccaaaacccatttcctcacaaaatccatctgagaaaaagagcaacaagtttcattttcatggtggtgatg

SEQ ID NO: 22170 - DNA, 3003 bp, Unknown
  misc_feature (1)..( 3003): 2750-1469P.txt file - cDNA_ID_2048225; gDNA_ID_1620530; Annot_ID_159705
cgtctccgaaacgaaggaacaggggtaacttaacggcgttaagtttaccagcaccgacgccattttggtctccgagaccgtccacggagctagacgctgccgccgttacgttacaaaaggtttacaagagttatcgaacgcgtagaaatcttgctgactgtgcagttgttgttgaagaattatggtacgtttgaatttcagttttatacattttaacccaatgttgatatgaaaattatacttaagtggtgtgtttggtttaggtggaaagaattggaattggcaaagttagaaccgaacaaaaccaatgataaaccagagtctgctgtatcaaggtgggcaagagctggaacaaaagcagcaaaggtaataattaattattcactagtcatacattatcatcattaattcttactttggttaataaaatagtttgatatgcttgataggtggggaaaggattgttgaaagatgataaagcacaaaaattagcattgcgacattggttagaagccgtaagtttaggcttttatttattttactttaatgtatacatattcctttgatttatagtaatgattttaaaaaattattattacagattgatccacgacataggtacgggcataacttacacttatactatgatgtctggtcagaaagtgagagtactcagccatttttcttctggtaaattttacacaaacttagtcaaattttgatttcgaatgttccttagtaaatggagctgattttgatagcaaaccttctgaatgatactaaaggttagacattggagatggcaaggaagtaaatctcaacaaatgttcaagaactcttcttcagcgtcaatgcatcacttaccttggtccggtatgtacacatggtcttcggttatttccggttggtaaaagaaaaccgattttagttctggtttttgactaacagaaagagagacaagcttacgaagtggtcgtggaagatgggaagttagtcagcagacaaaccaagagccttgtggagactactgaaggaaccaaatggatctttgtgttgagcacgacaagaaaactgtacattggtcagaaacagaaaggtcggtttcaacactcgagctttctctccggcgccgcgattaccgccgccggtagaattgtttcacacgatggagttgtaaaagctgtgtggccgtacagtggtcattatcttccgacggaagagaatttcagagaatttatctgtttcttaagagaaaaccacgtgaatctcactaatgtcaaggtgattaagctaattaaatctctaatcccgcattttattatttatttctttgctatattttaataaactttcgtaattaattgtgttgtagatgaatgcgattgacgacgatgatcatctggtcaataatgatggaagcactaagccgtcgatgatggtggcgaaatcggacggttcagatgaacagaaacgattttcatgcaagtggagtacaggaaacggtccaaggatcgggtgtgtgcgggactacccaatggatctgcagacgcgggcgcttgaacaagtcaacctttctcctcgtgtagtcaacggaacaatgggattatttggcccaataccatcgccaagacccagcccaaagattcgtgtctctcctagactatcttgcatgggtcttccaagcccaaggcactaattttaccaattttcctaatctgatcaattaaattatttcaaaatttttgaatattccttttttttttcactcccctaatagtattgggcgattctttatttagagtataacttgtactcatttttatttaaaataatttaattttacatgtatttttatgtttttgaggtttgtaaccttttatttactttgtaccttcgatatcattattttcttcaatcaattataataaaatccacttaaaataatgaatgactatttcataatagaaaacagttatttatttcgactgtccaaagttacaaatatttaattttcctcctcgtacaatttatgattaagaatttagactagtaaagtcaaaataccgagacaaaactaaaagaatgaagtcacgtggggattacgtttgagtatatttgactcataatgatggatggaagtcacgtgccaaacgatctttaccgctcaccaacggcacgcgtagctctcacgcttggtgacgcatttcttactcgtagccaatcccaattttctcacatttttttaacttttaaaaataatttaaaactctacgcgtgttataagtccaaattccaaaataccgaactaaaccggaaaattaaaaaatcgttatgatacgtaattaatatgagttgatgaaatttaagtatggtgataataagtgattgatattgggtttaagtttaacataacgtattagtttgaaaatttgaaacgatttatagttatttatttaaccggatttcggtttaataaaaccgggatatgtggaaccgtgtaagctgaggaataatagttacctgtaaggaaagagaaaaaaggaaagaggagagaagaaagaaaaggaaaagacccaaactttgagaaacaccttcattctcttccttccttcatcaaagcttaaccttttttaatttttatcctcgttttttcaattcgcgtgaagagacagagagagagaaagataaagctagaagagaatcgacattacgaatcttttgttccagatcgtgagagaggaggagttggaagaatgaagatgactattgggtctttgttccaaccctaattttgcagattaatttcgtttttgttgatttctgttttgggtttgcgttgctgattccggtggattaaagggttctttttggagagcacaaatttgttgggtttttttttggggaaagagaattaaaattttctcctttagagtcggcgtttgggttgagagagattattatagtttttagggttttggatttctgaattggtgattatcgatg

SEQ ID NO: 22171 - DNA, 3003 bp, Unknown
  misc_feature (1)..( 3003): 2750-1469P.txt file - cDNA_ID_2048229; gDNA_ID_1620530; Annot_ID_159704
cgtcttgctttagacgagaatgagcaaattcgatggaatttagggattttgtaggggttttattgtgagagtctgaatttgggaaaaatccgttgagaggtaaaaattataattgcatgattcccacaaggcaacactggaattggtcctaatttgaaacatcgccagactgttttagcttaatattgggtcccacttttatatgttttatgctaattaagtcattaaatccttctcttttctttgtttagaccgccacgttaactattttataatgggcccttacaaatattatggcccatgggtcttacgttataatggtcatctttgttttttttttggttcagtctaactttaacatgcggagaacactattggatagatttttactcaagagtcgacttttatgaaatcgatccattcatattttgagttgccatttctttcttatatgaataaaatatatttttaataactatggaaaaataacgaaaataaaaatcattatagaatagtattttttttatacaaaactacataaatgatatggatacacgtctagcaaaatagcccgttatttatttacactcttcctttaaagttgcaagtcatatcgtgtctctgacttatcggtgcaattttagacaatacagtttcaaactttgacctcttggtcttaggtcaagccaatacaaaagagaagaatgatcattttataaaatttaattactcataatatgaaatcgacattgagaaatgtggccagctcgtcgacataaatagaagaatataaatgaacatatatatcagagtaactcataatatgaaatcgatatccaaaatgtggctgtaatattttagacttaacgacaacgcattatgtagttattttcacctatgcgagaactttaacatcacaacgacacgaaaaaagtaaacaaaaatattcaagtcgaaatactcgtggtacggtcttatttgttgaccaaagttattagttttaaaattttaatccattatctgggaggggatggatgttttacttggtaaaagggtatgcataaatttatatccaaaacccttttcttacggctcaagtagagtcttctaaaaaaaagaagaagaactagagtcttctcaatgcccacgaagaaatcaaattgtatatgtgtagttctctaactataacgtacatacagtattgttattttagctattcaaaatatattggtaattaaaaaattatttgattgtttttcttgaatataacaatcactaattaattattctcgaatcaaaaacgttcaaactaacatattctttttagttttaatagtattgattagtattaatatgtacaaatttgtgaaacgtttttagtccatttgtgacgactgcggtattagcattccgattatatattttgggttaaagataaactttaacgatcatatgacaactagttaacaaaaaatgttgattttgtataagtgtaatcttggtagtaatatattaacacaaacgtgtcattttgtgtcgtgtaaaaggagaacaagtgagacaaatagaccaacagctttgaactaacacgtacgctgcacaatttagtagaaaacaagaagaagaaactcttttgagaaaacccaaaagtaaaaagacttgaccacaattggttgactccgcatttacacaattacacctcaacaccccgaaccggttttggtgctctttaatatgatgtcttaatcacatacatatatggttgctttctttgaccatcataaatcatgctagtaatatttatgtttttaattgaatttaaaaatatgtatggaccactgaatatcaatttaatcaaaccttttcagcttttcttaatcatattggctttgcactatcataatcgtgaggatattatttaaattttagtgacccgcactcaccaaactcgaatgttatatatctgatttgatgtgaaaccctctaaccaagccgagatttattttacaagtttttgtttactagtaacaatgttatatactttggacataaaatgatatatatatatatatatatatatatatactcattaacttattgtataggacatgaaatcaatatactttggtattaccgtcacatatttagctgtattcttaacatatgattgtgttgttcttgtaaatttgataggtttcttgattcaataagaaaagcgcacaacccaagagaatttgattatactagtactcgttatcgaagatagatatagaatgaatccgttgaccgaataataaaaacctaaataatcatcgggattaaaaatatgaaatgcatataagctagtaataaaaaacgacgacgtatgcaatgatgtccccacacgctccggacgtaacgccgtgcgtagatcaacaacacggtcacacacatatgtacagtgagattgtatatatgtgtatgcaactcctaatagtgttatcaaaacttaaataagtaatgagtaccgataatataattcctacgacgacgtattcaaagttgccccacacgctagtatgtattggaaaaattaacaaataaatctaaacattgaaatatgaaaatcaagagctcgtgtggtttgattttttatggttttaaatccgaggaaaacgtaaaacctttgaatcaacaagactcgaagaaaaatcttcactgcgtatcttaaggtccaatcccaattttgttctcacggaaaaaaaaatctaaaaaacattcataaatatattctcattaatatatatatagagacgacagatgagcaaagaagagacataaccataaccataattcttcttattgtctttaataagtgtttctgttttcctaaaacattcgacgaaacttcttcagatcgtaatcagtgtaagtaccttcctcaatctttggatttaaaaccatttttctttcttcatcccatgtctgaatcttttctttttaattttaaaggtagctttaatg

SEQ ID NO: 22172 - DNA, 3000 bp, Unknown; identical to SEQ ID NO: 2405
  misc_feature (1)..( 3000): 2750-1469P.txt file - cDNA_ID_2048243; gDNA_ID_1620530; Annot_ID_159700

SEQ ID NO: 22173 - DNA, 3000 bp, Unknown; identical to SEQ ID NO: 2412
  misc_feature (1)..( 3000): 2750-1469P.txt file - cDNA_ID_2048320; gDNA_ID_1620531; Annot_ID_159741

SEQ ID NO: 22174 - DNA, 3003 bp, Unknown
  misc_feature (1)..( 3003): 2750-1469P.txt file - cDNA_ID_2048337; gDNA_ID_1620531; Annot_ID_159735
ctatgacggagccacgaatttcatttataagagtcacaaaacatttatttttctaaacctaaaataaaactaaatattttattttcttatatatatacattttaacctaaaatgtttcatatttcatctttcaaaataaacatactctcaacttatctttttttagttgtatcatcaaattccctttctcatcaacactctttttgttaatatattgtggagattgagtagttgttgtgtttatcttgattcatgatttttagaatatatattttagattttttttttgaaaagaatgtagaaactaaaactggatatctaaaaagaagaaaaaagtattgatttgttaatgaatattacagggtttttaataagatattatagtttttataattagccaaacaaaaatgcaaaaaggcattaagattaaatgacaaaatgaatatgcatggggtcaaagacaagcataaatcacataacatgaggtcattgtgagtactttaacccaaaacatataattatcttagaagatataccctatattttttttttaaactataaattttatgggggtcgactgagcccccttcttgtatgttgcctccggcacacgtatgattggattttatcatctccatgatacttcagagttctgacaatctcgaatataatgccactttgtttttttgctttgtaatggacatcatcgatgcttcaatcttcgaaaactgaaaataacgtccgtctgttttcttccaaggtcgtgtggtagacatgacatcttttcggattatgaacatgagaacagcccttatcaattgtttgaaaacaaatcgaagatactcatatttcggatgatgtctattgatcgtccagaatagattctaaacctctgcttccaatacgacgagaaggatctccgatcgaatatggaaacgtactaccaacgatgatcccgaataattcatgttgcaccacaaagcatgaaacatcttctttatttaattcgtacgacaacattctattagtgacagaaaacaacaattaactttgtagctgttaaaaatactggtaaaagataaaaaaaagattgagccgagtttatctgttgtatatactattctttttgatagatacatacacccaagatattttatcttgacatgtgatgaagagatacggattatcctctgaacaataattttctaaaaaaaaagaagcaaatttttgataacttaacttataaatccacctttttccctaattagaagatggattctggctgattttcttggattagtgttagacagggatactactatttcttaacaatgagatgaggcaatctatcaaggaaagtaaaaaaaaaacgaaacttaaccctctttttttctttttttttttatgttagaccaatcacttcttgaaaagattccgtaactagacgatttttatatatatttttttattttttaatttttaatatttccacttcaaatataaaaagaaagtatatttatttgttatagaattatgattagaatatgaatacaaatgtaaaaaaaaaatgatatagaattctatagaaaaaagaaaaaaccttataagctagtcataccatttcatttcattatattgacaattaaaaaaaactgatcatactatgatcatagtatgatggcggttgagcaagtatgcccccatcgtctagtggttcaggacatctctctttcaaggaggcagcagggattcgacttcccctgggggtagggtactacgaaaggaagttgatcatggattatccataaagttagaatagattcttcctgggtcgatgcccgagcggttaatggggacggactgtaaattcgttggcaatatgtctacgctggttcaaatccagctcggcccaataattagctgtctacataaccattttttttttttgcataaatgacagagaaggggtaagaaaaaaaggtcaaatttcagggtatagggtatagttcgactttacttttttttttatttcttatgtttagttacttttttttccataaaaaattccgatcttgatcttgctaaggattccgatatggatcctttaaagagaaactttaatgaacagagtcgataaaataatctatttgcttctgttcaatatataatgactgaagctaactttggttggttaatccgatcagttcatcgatggtcgtatagtttagttatttaggcaataaaaggtaggggttagaaattcagatgatggtacaaaaattaaaaatagatgccaatacgtatatttttcttattaaaaatattatatcaaataataattaaaaaaaaatatatatatatatatataaatatacatagcacgcaaataagaaaatgcattattgaatattgaagaaactatgattactctttgacaacaaagagaaactataatcaattaaaaactttaattagaataaacttgaaagaaaatatgagtaatacgttttcttagcagaaaaattcgttttggaagagttgagtgtgaatatgaggttttttttgggtgtatttactatttacagtaattgttagaagtcatgcttatcttttgagaatttgtatatacataattcattcataaacgttaaaaaaaatgtgtttatatgatagcttttaatcaattgatgtacaatgaggtaatgaaactcagatgagtcaccaactaagttgagaacttgagatggattcaatagtcaatgatgctaggtgaaataacgtaatcaaccaaaaatattattcaatttttaattcgcattcgcaaacacgaggcacataaaataatattatcagtctcaataaaatcttgattcttgatcttgagcatcccaaagcattattaactaagcatgtatctcccactaaggcacaaattactaaccatataagtctcagtactctctgttctgcaaacttcatacacaaaaccaacattaagagatg

SEQ ID NO: 22175 - DNA, 3003 bp, Unknown
  misc_feature (1)..( 3003): 2750-1469P.txt file - cDNA_ID_2048370; gDNA_ID_1620531; Annot_ID_159726
tgaaatcaatcgcacaagaatatgatgtaagaaaggataacagtgtccataaagttttcaaattcttttctagtagaaactaactatctaagagatgcagggctttcttccatatccatattcaagaccaatcaaagtgcagtggaaggtgttcgagaaactgtttgtagatttccgtgacttgcttgatcattcagagtactgcgacttaataggaattgccaaaaataagtttcaaaccataccttatgtttggttaggctactaaacttagcctgcttcttccagtttccacagccctgtaaagtaatttgaggtccaattctacaacatacttgtacataagacattcaaagtctgcatcttgtaagaaagaaagacgtgtaaaatgcagattcttggccatgtataattcgtggttcgttttaaagcaaaagtcaaacattttgttgactattttaacttcttcgttacttgctaagttcagttatccatccactttattcttcttcttggaaatggctctcatgaaagtaatgacgattctggttctcttcgtctcggtgtcatcgaccttggcgcaatccaacaatggcggtcacatttcgataatcgtctcggaaacaggtcttgaatttgctaaagattacctcatcaagaaagtgatcactacgacgcttccacttcagctaccagacattgagaataaggttaagatccctctaatcgggaaagttcgaatgggtctatcgaatattcagattgatgcagttcatgtccagtcttcgaagatggagactcgaaaagatggaatcattttgagtgttttaggtgctacagcaaatttgagtatggactggtcttatacttacagagcttccttctttgagatttctgatcatggagatgcttctgttgaggtaaaactctgaaattatcgaaaaccaaattgggtctttttagttttgttgtttgtgttcagaacattgtttcatcatcagaagaaaaagcttaacaggtgaatgattatgacgatgaaggttaaaggaatgaatgtgagaatcactgccactttggttaatgataatggaagtctaaagattgcctcacgggaaaatgattgtacagtaaagaacattgatattcatatcaatggtggtgcttcttggctatatcaagggtattattaaatgttccataagttttcgtatctctaaaatctcttattccaagattataatatttgttttcctttttgcagggtggttgatgcatttcaaaaaatgattatatctactgttgaaaaaactgtctctactaaaattgtagaaaaaatgaagaagcttgattctttcttgcaatcacttccaaaacagagaaagattgatgactctgctgcagtgaatctcacttttacaggcaaccctgtcttagggaattcgtcggttgaagttgacatcaatggtttattcatgccaaagggtgatgatattaaagttgcagggtctcgttcttcttccttctttggtggggttaataagagaatggtgacaatttcagtagaagaaggagttttcaactctgcaacacttgtctacttcaacgtaagttctcaaatcttgattagagtatggtggaacaaaacaatttgtaagcttattggattggttttgattcaggctaaggtgatgcatttagttatggaggaaacaaagaacgggtccattctaagcacatctgactggaaactcatccttccagagctgtacaaacattatccagataataaaatggtgcttaacatgtcagtaacatctcctcctgctgttaaaatcacagagaatggaattgatgcgacgattcagctagatatagcgttcgatgttcaagactctggagaaaatctatctgtagcacgcctatcaacagtaagactaatagtaatccaccaaacaatctaacttaagaagcatcttttgatcactaaagttagaatcttgttcttgtttgcagattctgagtgttgcgtgttctacagaaatcgtaaagaataatctaatcggtagcctcagattaaatgatttcaatgcaacaatgaagtggagtaaaattggagagtttcaaacaaactatgttcaggtaagtcaagttaattatcttgagtttaagatttatcttgattagcatcaaactggtggatatgtgttcttgttgttaggctgctacgtctaggattcttgaagccttgtttttgccgtacgtaaacacacgtctcaagagaggattccctttgccgattcccggcgatttcacgatcaaaaacataaagattgtttatgttaatagtggcattttggtatgtaccgatatcggcactagcacaaaccagtaagcaagtattatatagcttcttagattgcatgtacgtaagcctgaagaaatataatgacaaccataattgtgatttgaaccgtttggaacttcccctctaagaagcgttttgacgagatctctttatttctttggctacttgcattatatctggaacttccccccctaagaccaatgcatctttctgagaggttaaggaaaacttccattaggcaattgcaagacacggcccaatgatttatattacaggcctgttaaatatgggcccaacttcgtaaacaatcaaaatattattcatatgtacgcaaaacaacaatagaaaaggataaaattgttattctattatatctctctaggacaaaaaaaagtaaagtcaaaagatcctctctcatcgatctctctctaacatctccgtcttctgcttcgtgtaatttgggtattgttggctccctactctgattcctcaaattccttatttttattaacccgcgaaaataaattataaagagggctttcaaaattttgaacctttctctaacaatggagatctccctccttccctttttcttctttcgcgtttaaggtttctcctcgtctcttctcttttcaatg

SEQ ID NO: 22176 - DNA, 3000 bp, Unknown; identical to SEQ ID NO: 2407
  misc_feature (1)..( 3000): 2750-1469P.txt file - cDNA_ID_2048382; gDNA_ID_1620531; Annot_ID_159724

SEQ ID NO: 22177 - DNA, 3003 bp, Unknown
  misc_feature (1)..( 3003): 2750-1469P.txt file - cDNA_ID_2048407; gDNA_ID_1620538; Annot_ID_159964
aatactatttttatttaaaaaatacaaaaactttcccttgtggccttgtgggtcatatataataatacttgcaaattccttggcaatttctatttaaaccgatttcagtagacttgctattgtcatcatttcatatcttagatcatctctcttctctctctttctcttaagaatattggaaatttctgaagcttttctatagttgatctcgagccatgcctccaatggtacgccttctttttcctatgatatctcttaaaataattatgcgttgaataatcgtttgtatataaatactatttgactatatatagttatgttaatcaggttgaaaatatgtaattaaccatactgatctctgttttgaaataacagaaagctgtgttgcaattgagcattcacgaggaaagaatcaggaagaaagcgtttgtcaccgtttctcgatgtccaggtaactttattagttacatttttcgaaatttataacatgatatattgtttggaaaatgaacttatattcatgtttttttcttttgtctaaataggtgttacttcgataacaatggatgacaaaaccgggaaaatgacagtagttggtgaagttgatgtaccggttatcgtgatgaagctaaggaagctatgtaacacagagcttgtttcggttgaagttgttaaaccacctgagaaaaagcctgaaccagagaaaccggctccacctaaaccagctccagctccagctaaaccggctgaaattgttgcctggccggttcagatgaacaacccttaccaatacaatcctgcctatgcaaattcttactatcaaccatatgggaactctagatttgtaacggacgaatcaaattgtgtgattatgtgataacttatttcaaataatgtgttaagttagttttgatggaagagtgtaattttttagctactgtaatatacatttctcatatgagcttattcagaaaaatttatgttactgtatgataaatttgatctttatacgttttgttaactttaacttttaatcatttagtaatagttgatctttttcctatacagaatattattctctatactttgtcttttgcttatatactaatcaaatggatacaaaaatatcacacacacacacacatagttaagtcgctctcaacttatttatgaatatcaagtaccaagatcgttcacgtaatacattcaattgtccaaaactaaaataattttgaaacaattagagaatgagatattagtaaagatgtgatgtagagagtcaagatctgaaagtctcctttagcaaaacaaatactaatcaataaaattcctacttggagggatccacatgtaaactgaggctttcgaggacatttcctttcttgactatgaaatagcagtattatccgagtcttcttaccatttttcaaatataaatcgcacatttacagattaaaaaaaaaaaaattggattcatgcattgagttgattttgaaatctaacaaaactcttgtgttacttttaagtcatgacttctaaaattttagtttaaatcatgtgttattaaagtaatcgtttaaaatacaaattaaaatttgtgttaatctattagtattttaaaattacaaattaagaattatgttttttttgtctgcgaattttgttttcgttgcgcaaccaaagaattgtgggtaagaaatgtgtaatacaagtatgatgcatatagaatggctcgccatgaaaaaaagctgcataaatgaattgctaggatcatgaatgttaagttgatcaattatactggatataaaagttaaagtatcttcaaatgatactgtatcagacaaaccaaagaaacgtgtgagtatattagaaaatgaaggtatttagtacatttttatatatttaatgagattaacacttctaattatagtataatttatacactaacgcgttaatcaaaaatagacaatttgacgtagtaggagagtcagcttttaatctaaaattcgaaaaaatgaatatactaaatagctcatctctgccaataatgcttctcttgtttattatactctttactcacagataaatatagcgaaatggagagactagctagaaattacaataaaggatcacatacattgttacctaattattattttcttaaaatttgaacaaatacgtgtgtcagcattatgctaatcttctttgtatcgtttcaaaaaatttcaaatattcccggtaacaaaaatttgaccttaagaaacaaacatgtacacaaatattcgttgccatcacaaacacaaaacccatagatcacaaacacgttacaacttgttacctttttgttgttgttgttcttaatgattttgctacttgttactttcctcttgacttctttgatgatctcgggctttcaactgttttttgggcagcttcgaattattttcgtgtggctctgagtaggcattatattgttacgatacctagagacaacaacgataacattgaaacaaacttatctttcctctctcactattcacaacaactttaaaataaaataaaagaacaattgtgacaatctcggttttatttcgagtttatctattagttctgaaatgattcaacttttccaagaacacactgtatagaactttcctgagaatttcttacgtgcccaaagtgccaatagggtcaacatatggacagggtcgtacacgcggcattctgagtgatccgtaatgctttcgtagtttcgttacaaccaaaaatagtaaaatactaaaaaaaaattaattttttttgactactttactctttagtctttacaacaactttttggggtcatcatactcgcaaattcctacgcaatttctatataaacagatatcataagacttgcaatatgtcatcaagaagcttcgatatctcaatctatctctactcattctctcttaaaaaaaaaaaaaaaaatcaaaaatttctggagtagtttctcgagccatg

SEQ ID NO: 22178 - DNA, 56 bp, Unknown; identical to SEQ ID NO: 340
  misc_feature (1)..( 56): 2750-1469P.txt file - cDNA_ID_2048407; gDNA_ID_1564067; Annot_ID_148788

SEQ ID NO: 22179 - DNA, 3000 bp, Unknown; identical to SEQ ID NO: 2500
  misc_feature (1)..( 3000): 2750-1469P.txt file - cDNA_ID_2048538; gDNA_ID_1620548; Annot_ID_160218

SEQ ID NO: 22180 - DNA, 3000 bp, Unknown; identical to SEQ ID NO: 2499
  misc_feature (1)..( 3000): 2750-1469P.txt file - cDNA_ID_2048541; gDNA_ID_1620548; Annot_ID_160217

SEQ ID NO: 22181 - DNA, 3000 bp, Unknown; identical to SEQ ID NO: 2501
  misc_feature (1)..( 3000): 2750-1469P.txt file - cDNA_ID_2048545; gDNA_ID_1620548; Annot_ID_160216

SEQ ID NO: 22182 - DNA, 3000 bp, Unknown; identical to SEQ ID NO: 2503
  misc_feature (1)..( 3000): 2750-1469P.txt file - cDNA_ID_2048579; gDNA_ID_1620548; Annot_ID_160206

SEQ ID NO: 22183 - DNA, 3003 bp, Unknown
  misc_feature (1)..( 3003): 2750-1469P.txt file - cDNA_ID_2048590; gDNA_ID_1620548; Annot_ID_160204
cagtaaatgtttagtgaactaatctgtgatttgacttttcgctcaatgtgaatactttcttatatgatacaatcgtaattgtgtagaaaatacaatattgtagtcgcattatctattatgcctgaccactagaaagtctttagaattttggtcatagtcatacactcttacttgtttagttgtttggaaagagttgacttttgtaatcccttcaataataatcatctatctcctaattctcttttcaacaaaaatatttatataaataatgattcaaataatcaaataaataaacaaaatcataacaataatatagcacagcgggataaacaattaatcaacttagttttgcattttaagtaattttttggataattctttctagaactcaattctcacttttataattcgattttctcttataatcccaaaacttatcattcaagtgaatcttatttttgtgattttcctccttctcttcttttacagagatatactcgaaatcttttttacccttttatataggtcacgaacattctatccatcttttacgtaatagatacacacacaaaaatacagtaaaatattttaaaacgaataatataattaaaatgattacgtacactttgggaccaatccaattacaaaaagggtttcgtcactgctttagtttccaacaccaaaccaaacaaaaaaatggatttaacaaaattaatatcattctctctcttgtttctatctcttctaatcccgacgacgacgacgaccacttccaccgttacatgcactaacgccgtttgtcgccgtgacggcccgatcatccgttttccattccgtctaaaacaccaacaatctcattcttgtggttacgacaaaggcttcgacttaacgtgcgatattaacgccggtaacagaacaaccataacgttaccgttttccggtaacttcaccgtggaagagatcgattacgcagctcaagagatttggatcaacgacccaaacaactgtcttcctcaacggatcttacagctaaacctcaactcgacgccgtttagtggcgtttacatgcgtcagttcacgttctttaactgtcctacttcagagtatctccgttttaggccgttgaatccgataacgtgtttgagtggtaaaaacagcacggtgtttgctactccttcgcctagagtgataaactacttgtcgtctcaatcatgccggttaatgaaaaccgtttatgttccggttcggtggccgttttatgagcaaatcgtgtcgtcttcggatttgagtgataacctctggcttacttggagggttccaagatgtagtaggtgtgagattaaaggtggtaagtgtgggattaagagtaattcttctcgtgaaatcatttgctctcatgttcataaaccaggtaattaatatttctttgttttcaccctaattttttcatttttttaattatatttagttttaaaatttctagaacgttaaacgtatttgtttaaaaaaaaaaacgtatttgtttttataatgtgaagatatgattttgacgattagagtatattagtttgacgtagaccatgacgaaattttgtttgaatgagtcatgtgtttatgtgtgtatacaggtttataaatttcgttgaaagacgagctacatataaccaattatatttgtccgttctggttgtttaaatatgaaaactacatgagactattcaactagatatttttgactaatgaaaccaataggcgaaaaatacatcctactatattatttgggaagtacattttaaatataaccttaatttttgtaagtaattacataggtatgccattagaaataaaattttaaagagtaaattaatttatctctttaacgattaaaaagtcaattactaatttaattaattaaatttaattaaaaaacgaaatacattattaattttcaaaaataataaccaatcaaaatcaacatataagatttaatatctaaattttaattaatttaatttaattagaaaaacgaaatacattattaatttctaaaaaagtaacctattaaaatcaacaaattagatttgatatctaaattatcatattaatttttttattaattattatagttcacttctcatctttatatgattctattttttcaaaaaataatatcatcattataaaaaaataattagagtttttcgcatatgccataatttgaatttttgaaaactaatataaactgttcaatacatgaaaaaatattataacgggtgaaaaatagatttaagaaaactttctactgagtaacgggtcataatttgaaatatttatattcaatttcatacatattatattgaaaatttataatcttatatactacaataattaataacatattagatttttttatgtgtatgatgtgattcaatttttaatacaagctggaaaatcctagaattaacgggtttagatcgatattaatacaagatggtatattacaggtgaaactcttaaattaacaatcaaactacaagtgtataatcttaaacactaaacaatatagataatatcaacaaaatatatacaactcacagtttacttttaatattttatatacaaaatcaattaaatcttaatcacataaaaattagcacaaaaaaaagtattcaacaattaaaattttatcaaatctctgtgttatataagttttgatactatattcgaataaagtgtaatataccttttcaatttgtattctttaactaatttaagctaattaatatatttactaatcttatacctatcaaaaccgactatcgtttcttatttctatagtatttttgcaagacttttttggtggatttgggtaaaagtgcattcggtcatatggtacattcccctattaaataaaaatggtatactcctatgttattagctaaaatgtttagattataattcagagtcatatcattaataaaattaatattaataaaataaatg

SEQ ID NO: 22184 - DNA, 3000 bp, Unknown; identical to SEQ ID NO: 2511
  misc_feature (1)..( 3000): 2750-1469P.txt file - cDNA_ID_2048606; gDNA_ID_1620549; Annot_ID_160263

SEQ ID NO: 22185 - DNA, 3000 bp, Unknown; identical to SEQ ID NO: 2512
  misc_feature (1)..( 3000): 2750-1469P.txt file - cDNA_ID_2048612; gDNA_ID_1620549; Annot_ID_160261

SEQ ID NO: 22186 - DNA, 3000 bp, Unknown
  misc_feature (1)..( 3000): 2750-1469P.txt file - cDNA_ID_2048616; gDNA_ID_1620549; Annot_ID_160260
cgtagaatttagacaggtgatgttaaagaaaacaaaaaaagagaaaactaataattgtatatatatatgtatataaataaatattagaacatcagccattttgtgaataaaccagttataaaagtctaaaaaaggtaaagagaaaaacatttcaccaaaaaaaatcctctggttaatgttttctcactttctctttgttttctttctaacctctttccacgaaaagtcacgatgggagataccgcagaggatcaggacgaccgagctatgatggaagctgaaggagtaacgagcttctccgaacttcttatgttctctgacggcgttctcagctcctcttccgaccaccaacctgagggtaatgtcggcgatggtggagaagacagtttaggttttgtattctccggcaaaactggctcaagaatgctctgttttagtggaggctatcaaaacgacgacgagtcactcttcctagaaccttctgttccaacctccggagtctctgatcttgacccttcatgcattaagattgattgcaggaactcaaacgacgcgtgtacggtcgataaatctactaaatcatcaaccgtaagtctctcattactgattctttatttgcatagttgcatgtaattaaggattacaaatttaaagatgtgttttttattgtgtgtgtcttgtgaagaagaagagaaccggaacgggtaatgggcaagagtcggatcaaaatcgaaaaccgggcaagaaagggaaacgaaatcaagagaaatcatcagttggaattgcaaaggtgtgacatttaatagtatgtatatacacatttctttatgatccatattgttatagattaatattctcttgaccataatgttatagatttactgtttatcttttttcgttttggttgttaaaatattaaaattaggtcaggaaagaaaggttaggggaaagaattgcagcgttgcagcagttggtttctccatacggcaaggtgatttttatatctaactcaaattcttttataatgatgcaatttatgattttgttaagtcaagcaagaaagacctctaatcataacataacaccaaagtaatgaaaaataatttgttttgaatattaatatagtatttcatattgagtttttccaaaaggaagcttaagaagtcgcgatttggggtagtgtagcataaattggcatccaatgtgaacttcaaaaagacatgaaagacaatgaaacttgatcaataaattaaagtatctttgtttttctttattctagtctggtttatgtttaaccatcatcattgtacattagttaaacaatgtgtacctttttagaggggtaaaattaccaaacaaatatctataaatgaccctatttgcaatagtaaaatatctataaatgacactatttgcaatagtaaaatttgacttttctgactgatacaaaaataaaattaaatgacagacagatgcagcttctgtgttgcatgaagcgatgggttacatcaaattcttacaagatcagattcaagtcctttgctctccttatctaatcaaccattctctcgtaagtagaagtctctctctttctctcttaattattttttattaatgaaatgatacttctgacatgtcggcgacgtttattaggacggtggagttgtcaccggagatgtaatggcggcgatgaaagcgaaagacttgagaagcagaggattatgtctagtacctgtctcatccaccgtacacgtggaaaattccaacggtgctgatttctggtcacctgctactatgggtcacactacgtcaccgtcgttacctcaaggattttaattaaacggtcgtaggctgatatatattagtagtattttagtagccttttttcttgggttttgtttttggctgaagaactattactagtaaatgttacacccagacatttttttgggattatctgggtggtataaaaaggttggaatcttttgtgtttgtaaaattagattgtctaagttttcttaaagtttctttgatgtcactgtcacagttgcgacgagtagtgatggtacttactgaaaggctaagcttattcacgctcttaaagtgttgtaatgccaccaagtcaccaacccacataactcactcactcacttgagctaaagacgtgcaaaacgttttttctttgttttcccacattttcacaagcgcggtaacaaagaaagcaagaatactataatattattagaccaaattattaacatttaaaaatagattgaatcttttgtgtttgtaaattttttctggtccaatttttctgaatgtttctcagatgtcagtcacgtcgagcagtggaactgagaggctaagatttactcacacctaaatattgtagtaatgccaccaaaccacatcactcactagtcactatagtagacgtgcacaaattcttatttgtttgtttcttatttcaacaagcaataatcaatgaaaggtttattttgttactagaccaaattagtctaaatgattaagaatagtttaatcccaatcatgtcccaacttaaaaaaagaagacatgaaaatgaattaattagaatttttaagcataatcagattagttagaaattatagtatagttgtttgtgttagtgttatggatgttttttcatcaatcaattagatatgaaatgttattatttatttattttgaaaatagactgaaaatttgaaatttttttaactagttaatgtgctaaaatattatgtaacttttccagtaaaattatattaagcttaaaagtagttgtttttgttttaaagggattagattgtaaaatcccagaatttaagatatttgcaaactacacagacacacttctactttgaccggtaatttcattacatcgccggacggccggagattttatcgctctctctcttcctctccatcttcactacttaaatctctccctccgtatctttctctggtgttcgccaatg

SEQ ID NO: 22187 - DNA, 3003 bp, Unknown
  misc_feature (1)..( 3003): 2750-1469P.txt file - cDNA_ID_2048620; gDNA_ID_1620549; Annot_ID_160259
tcttcaattgttttatatatatcgagaggccgaagaaatctgtaatcacagacagaggaaaaataagaataaggtgcagtttttttgttctttgttgttatttaagaagattaacgtaaatagtttccgacattaactagtttgcgttacattggtcctggttgataatgaagaagatgtacaatcttccaagagatttgccggaggaggtgctctgtagaattccgttgacatctctgaggcctgtccgatctacttgcaaaaagtggagcactttatccaaatgtgggagctttgcaaagaagcaccttgctcaagcaaaagtactagcagacgcaaaggagtttatggtggtcttgatgatgaattttagggtttatttgatgagagtcaatcttcaaaacaacgttgttgaatcatcatcatcatcatcatcatcatcatcatcatgtataaaacgtgaagctaaacttattagcttaggcgatgaagaagctgatatatctcaagtctttcactgtgacggtttattgttatgcatcagcatcaccgaatccaagactaggctcgttgtttggaacccgtattgggggcatacccggttattcgagcccacacatcaattcaacaaattcgatagctattcgtatgctctcggatacgacaagagccgcaaatcccacaaaatcttgaggggtattacttgtttggatcccttcaaaatctacgattttaactctgacttatggagggatcttgatgtaactccggagtggcacttatggcaaatgctccatggcgtgtctctcaagggaaatgcctactggtttgctagagagaattataccgaaacaatggacacagaccattttttcttactctgttttgatttcacaagcgagacatttgggccgcctttgcctcttccgtttgagtttgctgtttctgaagatactatgagtgtatctagtgttagagaagagcagcttgttgtattatatcagccgtgggattatttacagttggacatctgggtgacgtctaagattgagcccaacgctgtgtcgtggaacagcaaggtgttcttatcagtgagtttaaaacaactcgtcagccctcagtttcagttaacttttgggagtttcttcatcgacgaggagaagaaagtcgctgtggtttttgataaagactacgataataagcgcaacatagcttacatctttggagtggatggatcctttaaagcagttgatctcggagattcagaccgaaagtgttttccacttgtgtgctcttatgttccaagtctagtgcaacttaattagtcgaccatctattccttgcttactttttttcttcctcttttgtcatcttctttgaacaagatcattatttgttagtcaataacatattaacttgtttctcatacttgtttttgtttgccatatatatttgaattcgtttccaaatggtgcacacgctccttcccctgcagctaatcgtttgttactttcagtccccttaagttggagcaaactgtatgcttcttggttggcattctccgcgaaagcatgcatcgtttcttccaagagtctttaggtattgatagttcatcgttttctttttctattgtaacacagtagcagttaaagataagtcgaacgggtgatctttttgttcattagacaaaactagagaggtttctcttctctttcttctagtaaggaacaaggctaaggttaatagatagctagctatctgagatatctcacaaaagctttcactatggccctgtactatatcaacttcatattttaggtgtttcatatttcagataaaatgtgctcatatcttcttcctctttgttcagcgtcttctgcaaaagtgatatagatcttgacatgctgctaaaatacctcttgatatatttagtttttcttaccaatttaagttatagcataatccttttatcatgttagttattgttctatcctaattgtctagcatggagtagaatgattttgaagcagggacttgtagaacgatttttcgtgtgccacaggtttactcccttccttaatgtggtgaccagcgcttgtccttgtggtctgtccactcattctgctatctttcaacgaatatcacaaaataatagtggttagtatgtctcatatgattaccttaaatttagcggctactgactgatgaatcatgaggctttacgctactactatttctcttgtgttccacaaggcgtttccaatacttggtgatatcctccaacgacatctgcctagtattttgaccttgccagttgccaaatcaattaataaacccttcaccagaagattcttactacatcaaacaataaataaaactaaagtttgactggaagaagagttttggaacgttagacaaattttcagcatttgacgatatgaaagatgtctaaatctaaagaaacagagatacaattctttcaatattatatacttgctaactatcaagaacaggcatgaaaaaataaaaatattaaaaaaaaatacatattactatatagaattcatatgtcatcgataacttttacattattttttacaatccgccttacttaaacgcgccttatctaatagatatataaatgtatctctatttatattataatttaatttaaaatcaatataaaaaaatgtgttttttcaatttttaaaccacataacctaatagtataatatttgatatattattattttgttttaagaatgtagtatatttgtattttattagcaaaaccattattaaattgtaacttttttttcttctatataaagtttcaaaatccacttaagaagtgaagatataagtgaacaaaggatgtagcgtaatctagcacaacatatttaaacctcacaaaacccacccgaaagatgaacccatatctctctactctgttgctgacgatacatacacctttacttacattatattcccgccatcgcgatg

SEQ ID NO: 22188 - DNA, 3003 bp, Unknown
  misc_feature (1)..( 3003): 2750-1469P.txt file - cDNA_ID_2048633; gDNA_ID_1620549; Annot_ID_160254
gcggtggtgaaactggcggagggggacttggcataggatcagtaggaactggtggagtgggacttggcacagaaggtgtaggagtcggaggtggtggtgaaactggtggggtgggacttggcacggaaggtgtaggagtcggaggtggtggtgaaactggtggagtgggacttggcacagacggtgtaggagttggaggtggtggtgaaactggtggagtgggacttggcacagatggtgtaggagttggaggcggtggtgaaactggtggagtagggcttggcacggaaggtgtaggaggtggtggtgaaactggtggaacaggagcaggaggagtgtatccaccgtcatcaccaccactgtcatcgccgccaccatcgtcgccaggggaaggaggaccacatatgggtttgcaagaagcacattcgacatggcaagagtcagggcaaaacttgggacaaacatgttccaagttgtaacaatgtttgtacttcttgatcttacatgttgcgtggcttgggttcttggctatgcccgggggtgtatcggccattgttaatgcaagtgatgccaggagtatgcatcccaatatttgaagtcttgtgtgtttagctagatccattgccaaaccaaacaaagaagatagaaaggtgtttgttttttcagttgttgtgtgctttaggatttgatggtatgaatgatgatgatgcagtacaagtgctctgatatggtttatatagataaatatgttgggtttattaaatatcatgttggagtctttttaatcttttaaacaagggttccttcttaaatctatatggagcttgtaatttaagattattaacacctttatgcataacttagttatattctgtatatacatgcttcaagtttttatttgatcgcaaaacggattctcgagtgttaactagtagtaggttaaaactttcacaatataattaagatgaattaaaagatttctcgaaattttgattaaaaggataaaaactaattagcctaccattgaaaaaaggcttggccatgatcattattttggttcgaatttttttattaaaaatgagaaatggggttgttaaaattttagagattaatactgataaaaatatcatcaccttagttgacaattaacttgacatgtaaacaattttagcgtaaagtcaacctcatatttaactaggcaatatatacaattagccattagatatgaaatatataatatctagcaaaactgttagaatgagtttcgattccactttatgcaattctacgtaatacataatgtataaatgtgatattagtaattatatgtataatcatgtaaaggctacatgaaagtttatggggaatcactttgcgatgaagtgatccgcatgctacttgaatttcgtgtggtagcacattttgacattttggaggtcacatgatagaaaacaacaatgataagttaagctatgataaacacctgctttacagctatatgttttcatttttctactttgtcttctatttgaagaaacatcaaaatactgccattttctctgttagcgttaacaattcatcaaaattaattttgtcgaacgatactttgtttcttattcacttaactacatgcatgctttggactttatgcgactcaaggaggcaccgactatatgtgttattatcaaaattctcttctttagttacatatgtgttattatgttccctctctgtggttatttggtcctctttattttaaggactactgttagtccatagtatatcagatatttgataaattgatcggcctgaaccagacctggcttgctcaaagaatatgcagaacaaaagccataaagagagctctgtaaagaatatacagtaaacatgttttatgaattaagaaagcttgaagttgaaaataaaacataactcttctttatgtaaggaaatcaaatttgatcataaaaaacttaacaaactgtgtcaattaaaagcaaggaatactatataccaccacttgttattgaaatatatcagtttattgaattattcaagattacagtgaagtaaatccaaaaaaaggtacaaagggtttgccctgtggtttaatcactagctcgcctcttcttcttgctggaattgagttaaacttggaacataattaaacaaaaatggccagtttgaaaagaatcctaaatccacttttctgacttgattgtcctctccaacaatgtatagcacgtttttgaagttggttccatcatatctagaatatttatcacaacacacgaggactttcttctcctcatcgaccaaaaagcttttaccataccaacacctcaaataattcaaatccaatgctacgaccatgctccaagacaaaacgttggtcatctcatcaatcttataattatgacccatatctctgtccttgatgtagcataaagttgtaataacaccgaaagtttctcttctttaacaaccaatagagacgcaattgcataaaaaggatactgacacggaagtagcagacttctaaatctctctgttttataatcaaaactcactaagaatgtgcaaagatcaacttcctttttatcaaatatttatctttttcgcaagcaaaccaatgagtatttctcttcaaattttttggttactatatctcttttttatcacctaagcgccgtcgtttctcttcaaatctctctgttttataatcaaaattcagttatttttaacaactgattttttgtgattatttagaaagtgaagacaaaatgttaatcctcacctcatggaggatttaccaaaataacagagaaattaacgctaaattaacagttacagtattacttttgtcagaattaccaattaattataagcaaaaatatgaattatttgattaatgagtaatgactatcggttccatctttcccaagttcctctgctccaaaacctcttaaaccctaattcgaatttagcctaaaccctaaaatg

SEQ ID NO: 22189 - DNA, 3003 bp, Unknown
  misc_feature (1)..( 3003): 2750-1469P.txt file - cDNA_ID_2048645; gDNA_ID_1620549; Annot_ID_160251
aaaaaaatattatactaataaatgatacctcattaataaaaataaataattattaaaaggcactttacaaatgttaagagatttgcttaagatatatatatactagattttaacccgcggtataccgcgggaataatttattttttaatgttagtatatataaaagtttacaaattgcatctatctataaaatatttttattttatagtttacaattgttattaagtaacgtcctgccaaacccgtcccgtcaacccatcccgtaaaaaaacccatttattttattaatgttgatcttatttatgatatgtttatgaatcattgtctaaatattttgtaattttgtagtaattaaatgctatcaaattatatctatgcgctttgatgattataatccaattgttatagtcatggagaaaagtaatatcaaaaatgataattttgtagtaattaaatgatattaaatattttggaagttttattttagtaaataatcgtgtaatcgtgtagttaatgtgaagagattttgggaagattgttaaatgtcaaatatttaattcgaaattttttttctaattatcaaaaacaaacatcaaaatctagtggcagccattgtaaataagtcccaactacaggatttatttcacaaaatggctgcaaaaatgtatatataggtacacaatagtgaataaagaaaatagtttaaaagcaaaaccctaaataaaataaaagattgagaggcacgttttcctcaaagatcaatgacgatacccgagctgccaaaggatttgatagaggagatactctgttacgttccggcgacatatctgaaacgattacgttctacttgcaaaggatggaaccgtttattcaaagatgatcgaagattcgccaaaaagcattatgacaaagccgcaaagcagtttctacccctcatgtcaaccaacgaagagctttgtgcgatgagcgtcaatctccatggaacgataccatctttagaggtaaaagataagccttggctattcgtttcagattctaagcattgtgatatcgaaatatctcgaatctttcacagtggcggcttgttgttatgcttctcccgagacggcgaaatttcaatcatagtttggaacccgttaactagtgaaaccaggttgattcgaacccggaatcgtcgcgataaaggacgcaactttgttcttggatactatcaagaagacaaaaaaacctactacaaaatcttgagcttttatcttgatagcaaagatttcgaaatcttcgagtttaactctgattcatggaggtttattgatgatatctgtccaggcttgtccttgctatactctgatcaatgcgtgtctttgaagggaaatacatacatgtttgctatagatgacttaagtgtatccttgctcaaatatgatttttcaacagagacatctgttcctgtacctcttccctataaaagtcgttcttttgaagctattagtctttccgtggttagagaagagaagctctctgtgttattacagcgagataaaagttcgaaaactgagatatgggtgacaaatgtgattgatgaaaccaccaccaaagtgatggtggtgtcgtggagcaaggtcttatcattggatttgagccctgatcttaaaattaggtatggagaaagtttcttgctggacgaagagaagaaagtgatcatgatttttaataaccggatggaagaagagaacaaatccgaagacaaactatacattattggggacgacgataataaagccacacaagtatatacaatccatggatatggaccagctgtttttaactattttccaagtttggttcaaatcgagcaaagctctaggcaagaggaaaagagttgactgaataaacatgtaatctccattttttgttctcttaacgtaaacatgttcaaaacaaagatttaaatccatactacaaggtgtttttggtgtttttaataaatattatggtgtttttttaatttatatatttgacctttgaattatgaaattcagagtatagataccaaattaatttatatatataacaccacaatatttataaaaagaatttgtggtctattttgtgatatatttttttatataccaaaataaataaataaaataaataaaaagtattgttcttctagataacacatcttttaagttaaaattgagttaaaatagtcaaaatttaattaattttagttaaattatgggtaaggcaaacttgatgaatttctattagttaactgatcgattcaattagaaacgtagttttagaataaaacaaaaatatatgtagctttatctagattaaaaatttttttgataaatttttcagtgataaaaagtttggaatggaaaactgaaattataacaaaaaattcaggcaaccctcttcacaagtttattttagtaagctcttggaattttatttaacgttaaaataaattttggagagatcacgtgcaacgttggattcagatctaaaaaccatcaagatctaacggcaaggattaattgttgactgaaactccccacgtgacttgagatcaccgatacactgtgtttttgtttttccccaatctaaaaatgtatctctctcccgaaaatttaaatccctagctattaccttactcgtcgttctcttttgattttcatttcccgaagaagcgttttctcaggatatgcttctcgatctctgaggttttccccttcaacttctattggatgttccttttttggatttggtcattattatgtgattccttttttcctgatctgaattcgagatttttattcctttgattaaatcctcaaattttgcatgttttattaatttcctgattcagaacatgttttatttgatttagatgtataaagaatcttttactcaaatgtattttgattgatgcttacagaagaaagggatttgcaaatttgagaattcacattttggattaagatagaaacgatg

SEQ ID NO: 22190 - DNA, 3003 bp, Unknown
  misc_feature (1)..( 3003): 2750-1469P.txt file - cDNA_ID_2048658; gDNA_ID_1620549; Annot_ID_160248
aagaaatgaaaaaggaatatttttcattagttagtgtacattttaatagtaataccgtgtatgaccacgacatcatcaaataataataatatgatatcgtatgtaatttttatatagtagtgtgttatttaaaagtttccaaagtgcgtgtaacatatgggttcctagtaccttccgggaatggttagcgtcgtcaagaaactactctgtaaaaagttagaattaggttttccaaactaagaaacatgcttgtaaccaaaatttaaacaatggacaaaatacgaatggaattatcttgcccatgtgatgtgacgtgttttttattttcaatttgtttttattccagaaaataaaataatgacacgttggagccaatacgaagaacacatctatccatcccaatcgctctccacttttctgctcttcgacgacaaaagtttcaaactctataaatacttgaacgcaacagttacaaaaatgtcaaatcgaaaacaaacacaaaaagcaaacaaatatggctacttcaatcaaatctataaccctagctctcttgatattctcagtgttactaatctccttgtctctcggctccgtcacagcgacggagactacacgaaacgaggcggaggcacgacggatgtatgaaaggtggcttgttgagaatcggaagaactataatggtctcggagagaaagagagacgctttgagatcttcaaagacaacttgaagttcgtcgaagagcacagttccatcccgaatcggacttacgaagtcgggttgacccggttcgctgatttgactaacgatgagtttcgtgcgatttacttgaggagcaagatggagagaactagggttccggtgaagggagagaagtatttgtataaggttggagatagcttacctgatgctatcgattggagagctaaaggtgctgttaatccagtcaaagatcaaggatcctgtggtaagtccaattgcgtttgcgttttaatcgcttattttttggcgtttctattttttggttttgagctaatcagggattttttttgggttggttgatataacaggaagttgttgggcgttttccgcgattggagcggttgaaggtataaatcagattaagacaggagagttgatatctttgtctgagcaagaacttgttgattgtgacacaagttacaatgatggatgtggtggaggtcttatggattatgcttttaagttcattattgaaaacggtggtattgatacagaggaagattatccttatattgcaactgatgttaacgtgtgcaattctgataaggtaaagaaccactgatcagtgataacaacgacattgtttgtactttatttatttatggtgtatagtacttatctgttatgttctgttttttctttcaactcatgcagaagaacactcgtgttgttaccatcgatggttatgaggatgttcctcaaaacgatgagaagtctttgaagaaggctcttgctaatcaacctattagtgttgccattgaagctggtggcagagctttccagctttacacatctgtaattttctatgaaccttactttggtttctcttaatccaagatttgtttcgagttcataaaataatcccttttgttgttgttttcagggtgtgtttacaggaacatgtggaacatctttggaccatggtgttgtagctgtgggatacggatcagaaggtggtcaagactactggattgttcgtaactcatggggatcaaactggggagaaagcggatactttaagctcgaacgtaacatcaaagagtcatcagggaaatgcggtgtggcgatgatggcttcttaccctaccaaatcatcaggctcaaacccaccaaaaccgccagcgccttcaccggttgtttgtgacaagtctaacacttgtccagctaagtccacttgttgttgcctatatgagtacaatggtaaatgctatagctggggatgttgtccgtatgagtcagccacttgttgcgatgatggttctagctgctgcccccagtcataccctgtctgcgatttaaaggccaatacttgtagaatggttagtttcttgttctctcttatggcttaaagactttgcttttgtttgtttacttgactgattcgtttatgaaatttggtgtccacagaagggaaacagtccgttaagcataaaagctttgacacgaggaccagcgattgcgaccacaaagtctacaaacatgctagtgggcagcgcttgaggagagataatacaaacgaagaaccgatttgttttcagcccacgttatcaagattcagtcttttgtctttagacacttccaagttggatcatagtttgattactcttgtcaaatttaatgttatcttggatttgattttacttgatgtaaatgtttaagaagtaatctgatatttgcttccataacattgtgtcatcttcatttgataagtttgtaacagagtatcatcattcacatgatgtaagatagattctagtttaaaacataacgtgttaagctataggaaaacagtttggtgatttaaccaaaataaccaaggaaaagctgatccactttaatcaactacaaaatttgttctcttaaccttccagtaagatagtaaaaaacatctgtacaataatgccagacattagcgttaccatacttcctttggcgatcatcatagaatccatacacctagatagcataaatgattttgtgttagagcatccacattggtgggctctcaaaaatataatctctcacgtttgatgaaaagattataaattgtaattttctagaattaaatacgtgacagaatcatatgattttgatatttaaaaatatttattggtctgaccaataaaatatacaaaaataataaagaaaaatcccaaaaacacaactaataattcatctgcctcttcttgtcttgacgtcaactgtttgcagaaatctcactgaaactagagagaaaaccaaatg

SEQ ID NO: 22191 - DNA, 3000 bp, Unknown; identical to SEQ ID NO: 2505
  misc_feature (1)..( 3000): 2750-1469P.txt file - cDNA_ID_2048687; gDNA_ID_1620549; Annot_ID_160236

SEQ ID NO: 22192 - DNA, 3003 bp, Unknown
  misc_feature (1)..( 3003): 2750-1469P.txt file - cDNA_ID_2048691; gDNA_ID_1620549; Annot_ID_160235
agagcattgtaagataccggtggcgaagcctgaccgtctgatccttcttgatccggtttaatccggtggggatctttgccacaagggagataaaagaaagacttaaagttaggacaactctgtttccgcaagaaaaacttggcgcattcccatggtgttctttgattcgtaagatctagaatacaattcatacccacatcaagaatcttcctcttgatgagtgttcgacattttggaccgacctgtgtgaagtaattgtacgagagagaaaggttcttgagggctgagagctcgcagacaatctccggtatagtaccgtagaaattgtttctagccaaattcagctgctccatcttctttaggcatccgaaagagtacggaatcggaccggttaactggtttaactcaacatcgaaaaccgtagctcggttaaggttcccaatttggtacggtaagcaaccagttaacttgttattcaagaaaaggacttcttgtagggacttgatgtcaccaatgcttcccggaataggacctgtgaatctgcatcacatcacatgtaattccccccaaaaaaataactttagaaccttaaaaatacaagatacaattcacaaatatctcgtgacatcataataccaaacttgaaataaaaacagagtaaataactctgtaatttgaaacagagtaaataattccctgataacaaaacgagaatgaaagtgtggagcttttgagacctgttattagcgaatgtgaggtaaagagcggtgatcgatccaagattttcagggagtctctgaacaagattgttgttgttgatgaacaatacgtcgaggtctagattgaaaacctgaggagggacagaaccggagaaagaattgaatctgagatcgagaaacgtgaggttcgttgcttttaacacagagcttgggaactctccagagagcttattgttgctgagatcaagctcgaaaaggtacttcaatttgctgaagtttggaacagagcccacaaaattgttactgtttgcgtgaaagatggtgacttcttctaacttgttgaggaagttatctagccggagtttcttgccacccaagttaaaattgttgaactgaatgctggcaagtgcgaggtcgtttgttcccggtaacttggcgcactcgagtcctatgtatttgtcctgagcgcaaatgtcggtgcctacccatgttttaagtatgctctttggatcatcttcgattagcgtctggaaattcttgatgactggataaactttctttattaatgggcttgagaaatgtagcggcggtggcggtggaggaggaagtggccgtggtggcggtggtgatggtgttatataatgatgataaggagggggaggatagtgttcaggctccggagatggggatggaggagggagtgactgtggtggcggcgggggtggtggcgtttgaggaggaggaggcagcggaagatagtcttctggctccggagatggcgcaggagaattgtaattggtgctatcactgccaccgccgatgatgatttcgagagattttctgtaggtgttgtggttgtttccggtggctagaattgaaagaaagtgaacagacagaatcaagaaaatggaaggataataatttggggccattgctgatagattgatgagagccttgaggattggcttaggcagagctacatatagagaaagtgactgaaaatgatgagaagtcaatgcacatgtcttcttgtgggctggttttaggttacaacttacaatgcaattagctaaatttacatttgaattattggtaagaaaaaatattaattaagatcttcatattataatgccaaagggtggttggatacatgtgtagctatagcttcgttggtgtatgatttttttccgtcaacggcttccacgaaaaatcttggtaatagaaaaagagtaacataaattctttagtgtgtgattagcaaaaaataataaccaattagtatttgcaacaaactattttctaatagaatctgatcaaggactctaccatagattttggtgctttggatccattcttagagtcaaaggagcgaatgcctctggtgagtcaaagggcattggctttgtacagtacaacactgaagaatcagctcacaaagccatagaacatatgaaacgaatgtttcttaacgataggaaagtatatacgttggaccttttcttcagagagatttccaagcgaaaaggagatttaatttcacggatatttatgtcaagaatctctccaagtccttgactgataaagatctgaacacaatttttcaagagtttggaccaacgaaaagttggtgtgatcattagggatggttttggatttgtcaattttaagaatccagaggatgcagagaaagctgttgatgctttaaacggaaagaagtttgaggacaaggagtggattcttacaaaatcgaaaaagaagtatcagagtgaatctgaagtgaagcgaggtttgaaacaggctatcaaaaacagatcacagggttcgagtaacttgtgtgttaagaaattggatacacgagtaacagatgagagcctcaaagacattttttcttcctatggaactataacatcatgcaaggtttgaaactctatacacagaaaaatttgaggtcgttgttggattcaagatttttacatttttgaatgtaaacaggtcactcatgagcgacaatagtggagtaagtcaaagatcaggctttgtttcatttttgaagccagagggcggacgcttttaaagttgtcagtgataccctatgggtttctcaaaaaaaaaaaaaagtattttaataagagagtataaaagactaaactaaaaagtaaaaagaaaaagaattaagacattgaattgagtagcaagttagaactaaattaagccccaaaactgatcagctgttatgtatgattcagtagctttccattgatgaatcaagttcatcttctagatg

SEQ ID NO: 22193 - DNA, 362 bp, Unknown; identical to SEQ ID NO: 2504
  misc_feature (1)..( 362): 2750-1469P.txt file - cDNA_ID_2048705; gDNA_ID_1620549; Annot_ID_160230

SEQ ID NO: 22194 - DNA, 511 bp, Unknown; identical to SEQ ID NO: 2617
  misc_feature (1)..( 511): 2750-1469P.txt file - cDNA_ID_2048793; gDNA_ID_1620566; Annot_ID_160719

SEQ ID NO: 22195 - DNA, 3003 bp, Unknown
  misc_feature (1)..( 3003): 2750-1469P.txt file - cDNA_ID_2048860; gDNA_ID_1620566; Annot_ID_160702
catatttgtagattactgcataagctagtggtttttaatcggtttatttgttccggtttaggaggaacaagggccattacggtttaggatgagcaagggccagtttcaatgaatgtgaatggcggagaagtaaatatagtcgaggaagcagcggtaaaagtaagaatctagtttatttacctatctaagagtaataaagctgctgcatttcacgaacccttatgttctatgatctttaatggatgatatcatttttaatcttcgtcctgtaataattcaccttcaaaacgcggattatacatgtcgttttcctgacaaaagacaaaaattagtaaattactgaataggctctaacttactccatgctatttcaatggttaacgacccaaattgtctctcaaatttaaagattcaactagaaattgccgataatattggtccagttttgggctaataaattttgtttattgggccgactcgatgaccattttaaagaggactcaatagatttttattgatacgaaaatattattaaatcagaccgaattaaaatgccttgaactccggtttagccgacatgtttggcaccctaatgagaatagcttagttagttttgtgttagtctaaagattaaaagtaaaaagtttgattctgccgacaatttcttagatttggtgctatttaaaagatttccctcttcaattttatcgaattccaaccttcaaataggcttttccatacatttattgaagaatttatcattatcagtcacaattatgtgtcttcatctttatacgtacataattactagtaataattaaattctactactaatagaggacggccaaagtgtcagtaatgatgcatgaatggttagttgataaacatctctttcttatgaattcaatttttcaattttttttttttttttttatatttatttcgtatacttgtattttgttgaatattattaatacatagctacataaaatgtgataaaagattaggtaaagtaacaattggtaagaaaatatcacaaagaagcaaatgacaaggatagtctcataagtcataatcaatacagtttacctatgtcaaaaaaagagtctcatatacagtacctataatgttaaaaaattaaaatacttaaaccttttctctctttttttttggtcaacaaaaatagtaaaactttcatatgaacatttgtctgccaaattctattatctagttgaagtaaacatatccaaaatattaaactgagtaggcgcatcatattaacgtttgtaaaaaaaacaactatacatggtgtatctctaaattctaaaactacatatatgattggttatgttgacagtaaacatgtaatttgcttaccgacgagaaatcatgataatatataattgcacatgtacatctatatctctatatttaataattttgaaaaattggacgtacctcaccagatacatgtttaattgataataaataaaaatttgacatgtgtcttcccagatttttgaacatccaactaatagcacatgtgcatgtaaccttcatcacaaacgaaatcgtgataattaaattcagaattcgaattaaactatactaaaccatagttaattagtaaatacttcaattattacacgatattttcatatataactcttgacatttctccagtttatttatcagcgactagtcgattacatcattagaatgcaaacataaaagatagcttgacaaaacgaatttcgacatccaatttacagttacaaatgatgtactgtatgttaatttcttaagaaagcaaaaaaaaaaaaatgataataaattccatgtgcctaatcaagtgtaggagtcagattccgacctatatgaaagaccttagcatgtgctacttcattcactagcaccacaaattcaactctctctttttttatccctttctaataaaggagaatagttctagtattatagacatgaaagttcataaaagttaaatcacataattgaacttgtgtgatatatcaaggttttagtagtgacatataagtgaaaactctccattattgttagattatatatgtactgcacctagctataatttccactattggagaaaaatataaagatataaaaagtgtctacctgaattcagatatataaaccaatgaaacatttaagagttgaatgtctactcgaattatattagtataagttgttttcattgaaatcaggacatatatatatatatatataataggggtaaaagaacaataataattttgtaatatgaataaatatcaatattaacgaataagaatataaaataggtacatttaatgattaaaggagagatattaattgttgaaaatatgaatcctatgttttgttttctaaacgatattgttaaaaagtctaatcatcatgagtcatgattaagtgaaccaaaacaagtttaaaatcttctgaaaacgacaaaacaacacaaaggaaaaaaagaagagaaagttaatttcaagggacttttaatttcaacttctttatatagcaaatatgaaagagtgataactcaccaaacaaacaaatttaaattttatttcatctttacacgaaaaaaaaaaagagaaataaaaacatgaaagagtggtcactcaccaaacaaacaacctaaatttagataaaataccattaatgcttaaaaataataattaaattaggaacggttacacattcaaatatgtgttttgactgtagaatacaaaaacaaatacatacaaatatcattatctaatgttatgcatgagacactatatatgtatgctccacataagaatcatacaaagcttcactgtgattgctcaacggtctagattctgtcagagcctctctcttcttattctcatgttacattaatctttgaaccaaagtctttttgtaaccgtctctgtttcttcttcactctgctcgtaaaaaaacattgaaatcttcgcatcaatg

SEQ ID NO: 22196 - DNA, 3003 bp, Unknown
  misc_feature (1)..( 3003): 2750-1469P.txt file - cDNA_ID_2048914; gDNA_ID_1620567; Annot_ID_160746
atatataatcgaaacttgtcttcaatgacaagagctagtaattagtttactaaaacatagtaatgtatatagattacggctttgttatatatatagcatggtttaggcatatcgatacttttaaaatttaaatggttaaacctcttaaaagtatacgtacttgtagattcctttacggacatggacaataatccaattagagttaccaacagggacagcatcgatggctttctgaaccgaagtgtagtctcctttgccttcgatatctacaattatcgatctatttgtcgcgattttttcagtcaaaagtggggcgtcgaatttcgtcttttgcattgctgatgcgtccgaaccccatatggacattacaactagggttaggacaaggatcattcttgttcgatgacccattattttttttattttttcttggggtttctacttttcttttggaatggggttatgagaaagagattatattggtgaagggagaggtttaatttaagaaaacaggtttttaaatttagggtgctttgttgtgtttgtttagttttgggaggtaagggattttggaggaagaaatggtttttacttggaatgttttgttttttatttttagacatttattaaggattaatggacgataaatactttgaagtatatttctatctttggtaactaattacaaaaacaaattgtgaatgttgtgtaaatgatacactgtataagccgcttattcattaatcaacggtaatcaaagaagtaccttagtcgggggccattagaatctcgtgaagcccaatccaccaatagaacgtcaattattgtcataattaatttcttataccctacaaaaacattactgaaaatcaaaatcttgattaaaaaaattcaatggatttatgcattctccataatatacgataaaagttgtctcaaaacttcaatttgggagtgatatatcatcttatatgattcaatctgtatatggttcacaacttcttctctcatgttttttctttttattggttcacaacttcacattcgatgtacgtattactagttttcaacgtattaatgtaattaagttagcaaaatatttattgtgtttagctgtaataagggtaggaccaatatattcgtttatagaaaggctatattttgtccttaacgaatccacaaacctcaaacttgacgaggaacataggaaaagaaacctataactttgatcagtttgatgctactttattagtatccaacaaaaaaaaaaaaactatgcttgtggaagtttaccagttaccactacactctacactctagttgacattaaattaaattaaagtaatttttcgtattatagttaaattactgctgcatatattttcacaagaaagctttacgttttcttaccaacaaaaaaaagctttacgtttactaatatcaccacatttattactcttaacggagactctagctcctcaacttgtggacctttgtatgttattgcggatctaaaagaacacagagaattaagagaaagcaatagagagagttttaggatgacgaagggaaatagtgaagtcacagtgttgattccacatttggaaaacagctagggacattaatttcaccgcaaattcgtattaatgacttccaccaatattactcactggagtctctagaatctctactcgtctttttctactaaccctacacctttgggtcattgggtgtatatatttcttctgttggactctgttttctcaatatattgataactatattccaattatttatatcttatagcctatagactatagataatgcttatctgattttttattttattttctgaaatatgaaccctccattgacgattgtaacaatgaatgtttttttttgggtctagctaggccaatttctttttgctattttctcacgttttaggccaatgattgatgataaaaaaaaatatatatatatatatatatattcacgtttcacttaaattttagaatattttttcttttctacttcttttaattcaatttaaccaagcattcacatcatcatatatatatatatatatatatatatatgtatgttgttgaaatatttaatcaagcattattagtttatgataaattaaaatgcagaaaattgaaatgttattttatagtataagaacagtaattaaaagagaaggctaaaaaatccaaaatttgataatacattaatagacatcatgtggatagataatatatgtgtgtagtatatggatgcaaacgtgaaaatcaacctaactgtttcacattatccatgcatgttgcttttacccattctctgtcttgtcttctccatcaactgttacctataaccatttattgaaccaaaccggtccaccggttcgctacttttatgtaagcaaatgcgtgatttcaattcccatgtaccgcaactatactgaaacaaaacaaaacacgaattttttttggctatttctctacaatataattgaaaacatatactttatccaacatcatattaatacagatatattcggttcagaaactgttaaccaactttaaccggaaatatagtagtctttaaattagtattggttgactttttaataactaatgtcacatctctttagcaaaattttataaataacgcatataacattagccacattagtaaacctagcaatctggtttcgtttcgtataatgagtcgagaggatgactaaactcaacccaaaaaaatcaataacctatcggttaaaactaggtgggatctcaaaccaatttcatgttttaaaaattcttttcggttgggattattaatgtcacgaattcacggggactttcttcagcttcctatttatacatacacttccaattgcaaatacacaagtcatcttctctctctttttttagtgtgtgcaaagtcatcttctcttttaatatttacctaaaattccaaacaaaagagaaagttatg

SEQ ID NO: 22197 - DNA, 3000 bp, Unknown; identical to SEQ ID NO: 2622
  misc_feature (1)..( 3000): 2750-1469P.txt file - cDNA_ID_2048928; gDNA_ID_1620567; Annot_ID_160740

SEQ ID NO: 22198 - DNA, 3003 bp, Unknown
  misc_feature (1)..( 3003): 2750-1469P.txt file - cDNA_ID_2048936; gDNA_ID_1620567; Annot_ID_160738
tatggtgttaagcccaataagctttataaaagcccaataacattttcaaaagcccgagaaaacccgtgaaactacgtccgatccgaagatcgatcacgcgactctgttatttagaacgacgatcgcattatttttctcctaataaacaaaacgagcccgccagatttctctgagacagtgattcagttttggttttggaacctaattctctctcaagagattcagctaagatgagtactatgaaattttgccgcgaatggtaagagctctcttatgctaattctgttcctagtttctggaattgcacctctctgctcgtctaggttttttcaaagtttcgaaatttgcatgaattttttagtttttgttgtttacttttgatgtatttcttccgtggttgaaccatctatggttgataaggtgacaattcgctaaaagtgagtaccttttttcgaattttgtttttgggtcctttcttaattgcattgttgtttctgtttgattttggttcagtaataacattctgtatcctaaggaggacaaagaacagaagatcctcctctatgcttgccgtaattgtgatcaccaggtatagcttttggtcattttgtaccttttttttgtgtggaaaaagggtttttagtgttcaatgtagtgcacaaaattgcgagtgggacttagtttcattgcaattaagagactttaatgaaactgtttcctgcttttatctctcttttaatgctcctagtttccttagttttaccaacctctctatttactaactccttcaattaaggcttagcaagttcttatggtttatctttctagtgttgtgtttatgagatctatatgaatacttgaagggcctcttttagcttattgatttacacaaactgagtagttatttgcaattttttaagctgcattatcaatcttgttgttacaaattgacagattagattagatcatgtaaatgggtttgttgtcctcatctcagaatttatactttttgtggcactgacttgcaggaggtagctgataacagctgtgtgtacagaaacgaggttcatcactctgtaagtgagcgaactcagatcttaacagacgtggcttctgaccctactcttccccgaaccaaggctgtgcgttgctctaagtgtcagcatagggaggccgttttcttccaggtataactctcttaagctccattatttatttaactacttggttatgctgtatcttcactgtttgcttccccaaaacattatgctcaaattctgtacaccgcttgaggatttaatgtagctatcattgaatgtgcaggctacggctagaggtgaagaaggaatgacactgttctttgtctgttgcaacccgaattgtggtcatcgctggagagaataaagagcttttcggtttcaattggtgagttcttaagagttttaggagttgatgtagttaccagtaagtgtaatatgtggaatgacgggaacaaccttctgccccagtcagagacaaatccgtattcatgtaatctgttatgaaaccataatctcaacttgtgtttcaccaaacataaagattggaacttgtttctctttggcatttagaggaaatgagaaattcaaacccaaacattagctactgtcctccacggctcatctcccagaaggcaacctctagttcaagaactcgtacaagtacatcttcagcttcaccgagcacctcaccggaggcattctccagacaacgttcggcaatgttcttgacagacgaacaatactgtttaaacccgtcattcccccaacgatgacaagcaccggtaagctccaccggagttttgttcccgtcttctaaacaatgagcaaagctctcttgatacactgcttcaattgcccagaaagctgtcataatcaccggatacttcacctcactgctcatcagatcttccaaaaacctgaattaaccagaaactccggtttatttgctggttcctaatttcattttcgagtgtgagaaatctattcaatcagcatatatgaaatcaataacctgccatattcttgattagctctttgaggcacaacggtcgagaaatcaacatcccatttcgatccttctcttttaaaccattctatttcatcattcaacgatgctataccaccaagcaccacttccatatcggaactctcgccggaatctttgcaagctctgatcaacacactcgctacaaacggcacaaacctcctcacgaacagataatcttgcccctacaaggaaacaacgtcgtttaaaagtcatcgagtgagatttcatattttgccttgttttcatcagtaattactaattacagtaccagccaagttctgaaggacgagagatcaacggatccgtcacggatcgagacgacaaaagcatgacgtgtagccgccgtatagatcgaacggtgcttatcaatccatgtgtcgatcacccctctcttctccattgaaattgcttcttcttcctttctctcaagactcaagactcaagactcttcttcttcaccgattcactgtcaacgctttgattttctgttgtctgtgacgtgcacgtttcattgggctttaaattaatgggccaaggcctattaaagtctcgccacgatagcttaatgattctcccaaatcgacggctgtaaagaggcgcttaaatttctcagattacgtgacagtttctgaaccgttgagatgtttggatgactaaagtttattaattacgtggcacttactcagaagctctctcacgtcacgtatccgtcgttaaagagtgtgacgtggaaaatgttttggaattaattttgtgtgtttgtattatatcaccgtactaattagctcatctcccgaagccatgtggtaattctaattttgtgtatttattattttctgttaagacgaatcggacagagagaactccggcggcggattgcacttccggcaagatctcgtggggataaataagatg

SEQ ID NO: 22199 - DNA, 3000 bp, Unknown
  misc_feature (1)..( 3000): 2750-1469P.txt file - cDNA_ID_2048940; gDNA_ID_1620567; Annot_ID_160737
aaatctattgatttaaaaatttggatacattttagacatcatgtactcaaaacgggaaatagttatgaacatagtggaggtaatcaacaattctattaacaaagcatcaatgtattgataaaacggtcgtcagtgttcaattccaaaatacatattgttaacttggtcacaagctataatccaatctatcaactaagttgcaagacaatgtcacacagaaattatttacgccattatgcactttaattatatttataaaatattaaacaacacaaccccatttcttaaacgcagcattgactttcatcagagttcaagactgatcatccataaacccagtactgtaaccatttgattttatgaacttcttcagaagaagaaccatgatagcgattgtgagcccaaccgccgcccacgtgaagagtctgtcatcgactggcttctgagccgctcttctggccatcctttgctcaccacttacagaagctttgaccacaacttcaaccgctggtaaaggtgctgcagcgggaaccacactagctgctgtattgactgcttcagctgtctcttctatgatttgatcatcaactatggtgtctgttgtagcgatggaccgctcttctactacagttatcgcttcctgtggctcaacttgggagtgagcttctgatacgatggaaggtgcttggctacattccagaggaagaggttttggaaccacggttgctttgctaaggatgtactgatgaatctgcgcttgttaaaaggtcatggttactaaaagttttttccaaaattgaagatgaatcagaggtatgaaactaaagtcataacaaaaatcatgaagaaagggacgagagtttagaccaaaaggagattgttaacactactattgtctttttttttatatttgtgcaactgactactttttaaaaacgacaataatcagtaaaatggtgtgttaggacttgagcagcaaattttactgtatggagagaataataacagctgtgattgcagttaaaacaaagcagatactcttagagcaaacattaaatcataaccgctagagatatgcaagcctaatatataatatattgcgatcccgttttgaccaccagctagtcctatggtttataatgatgcaatgcaatggtatggcacatactctacaggttcagcaagcatctagctaaattcatatattttcatcaggatattatgcatagtggttcaacacccaagggtattctagtggggaactatacctcatcaataattttttgccgttcaggagagccatacttaggtggtgtctcacgtgatttaatggctagtgtacgtctctcatcctttggataatctactgagcccagtgctccattgggacttgtgggcataaatgcaatgagagccaccaaagcagtccgaactgaaaagaaacaaagctcaatcataatacaaaagagctgatatagttcaacctcatgtaaattacaagtgtctgagtaatcttttaggaaacaacataaaagtcaagagataaggtctcttgagatccatgactttaccactccatgaaggttgccaatgctcagggtggtagtttgaaatgctcaagcaaatcttggtgttagtttcaaagcgcccgttaggctgaaacaaaagtacagagattctttagatacatactctcttatggaacttgcaacatctgtgtgtttttatatatgaaataagagtaagatccttacggtcaataacatgaatgaaggaggtttgaatggataatctgcaggcaactgaattctcccatgataaatcccgccctcgaattcagtatcaccaggacctcggatggcgaattgccactcaaagatattctcctgaagttaaaagatagataagagtaatcatgtaaactatttggtatcacacaagaacttgtaaaaaacagctataacatcgcgcgcaatctatttggaccatgacatgttggaaaaagtcttcacagttaaaaaaattagaaacgaagaactagtatgacagctgagtggatcaaggaatcgttcgtaatcttccccacttgactcagttattccaataaaaacacaaaaatccaaactttatctgttgcacgagtgttgaaagtagagagacttagtaaattcagtgtatacaagaagatatatcgatcctccctaatcatgatcgcctaaaatcaaacaccatcactcagaacagatacacaattacaacacaacacaacataacacaacaacataagacaaggggattttctcaaaaaaggaaatttcaaatatagattcgaatcaaaattcccgatctaaaaagctagaatcggagatgttacctcaagaggaagagacataaaatcatcagacggattagcttgcatctccttaacctcctgcaaaatcctcttcaccgccggattcttccgattatacctctcatccgccatcttatttatccccacgagatcttgccggaagtgcaatccgccgccggagttctctctgtccgattcgtcttaacagaaaataataaatacacaaaattagaattaccacatggcttcgggagatgagctaattagtacggtgatataatacaaacacacaaaattaattccaaaacattttccacgtcacactctttaacgacggatacgtgacgtgagagagcttctgagtaagtgccacgtaattaataaactttagtcatccaaacatctcaacggttcagaaactgtcacgtaatctgagaaatttaagcgcctctttacagccgtcgatttgggagaatcattaagctatcgtggcgagactttaataggccttggcccattaatttaaagcccaatgaaacgtgcacgtcacagacaacagaaaatcaaagcgttgacagtgaatcggtgaagaagaagagtcttgagtcttgagtcttgagagaaaggaagaagaagcaatttcaatg

SEQ ID NO: 22200 - DNA, 3000 bp, Unknown; identical to SEQ ID NO: 2633
  misc_feature (1)..( 3000): 2750-1469P.txt file - cDNA_ID_2048968; gDNA_ID_1620567; Annot_ID_160731

SEQ ID NO: 22201 - DNA, 3003 bp, Unknown
  misc_feature (1)..( 3003): 2750-1469P.txt file - cDNA_ID_2048974; gDNA_ID_1620567; Annot_ID_160728
tacacttgatagaagcccgtcaacacccatttgtttcagataccggtcaccttcagagaacctctgagcattcaacagagcttgaactaacacaagataaccattgaatcctggcttaactccacggctgacaaaaccgtcaaatatcctacaagtctcaacaagatcatgcccttttaggagacaactcatcgcagcattgaatgttgagctatccggaatataacctctctcacctatcttcctcaagaattgaccagtctctttagccattgagttgtttgaaagacaatacaacacagcatcgtaaccaactctttgcaagtttgagtctttctccataaacccaaccaaaacctcaaacgctttacacggcggcaagcaacggaaaatcccgtgtacgaaagttctgattgtagcttcattaggattcaactttctcacccgcatcatctccaattgcttcaacgcctcatcaaccctccctgctatcaaaaacccgtcgatcaaaatcgtgtatgtgaacacattgggtctattcccttcctgttccatctgtttaaccaatcgaatagcttcatcaaccacacccttcttgcaaacaccatgtataagtatattataggtaaaccgatccggtttacagccatcactacgcatctgctgaaacttgaggtaagccaaatcaagtgaattagacttcaccaacgcatcaatcacagcattataaagccttgtacttggtttcattccaagaaaagatatctgagcaaaaacatcattacagtacttagctaaacctaatcttccccagcttccgatcaaaacacacatcaattcatcactaatccgataccctgaatctctaatctctttaagcaattccatagacaacaataaggggcctttacgaaaaagtgcgttccctagaacactcttcagagactgatccttagcgtaaaccgggtcgaagttggagacccagaggtaaaatcgcagggagtgtaatgggttgtcttgattctgcaaaacgctgatgacgaatcgagtgttgagaccaattcgatgagtggtgaattcttgattcagtatcaaaaaccaatcttttctctctatgacttgcgaaatgtaacgctggttcagaggattggtgggtttacctgaagagtttagggtttttgagagcttagggtttacggatgtggaagcgtttagtgatttggaagctgctgccgccgtcgctattctagatgctgaagaagcaaagcctctcatgtcgtgaccagaacggagctgagtgcaagtgaaacattgatttggtctctaacctcaagacgatgtttcctaaacgacgctgtttaatacaccaatatcaatatgtgttcgaatttaataattttttttttagtttcagaataaattaagaaaaagtcatgaccaaaaagatcatctcctttgaaacaaacaaaaacaaaagaattttggttgatcctaatgactcttccattgccaccatgaaaatgagggttttcattatagtttatccatctcttgattactatgaattttaattttcttgtaataattatatttctaagtgataattttctaatttctatcttaaattgtagcattgactaaatatttccatcttcatcttcaaaaatatattatgataatattaagttattgctaatgagagatgtaataaaaagagttgtgatgaagtcattattatgctatttatgtatgattaataatatgttataaaaattactattgcaatatatatagttttcttatatcattgcatttatttataagaataagatacaaatcaagtccaataacttagagaaaataaaggcaacgctagaatcatcaattttgagagaaaatggatttataagtttgtattacttttgacaacaacatttcactggacatggaatacaaggagaaccacactgtccacctttttgaaagccagctctaagacagtccttattacattcatcattccagtaatcttcggaacacctaatattgcagttgtcaaaagagaagccttcgatccttgcatctacacaagtccacatatatatcaaacatcatcaataccaacatgtgtaaattttatatcattccaataaaaaatagttatataacatgtccaaataaaagtttttaacgaaacttttgaattcatgtataatatatatataaacaaaaacgtgatcataacgaattccaaatatttagatatatagcctttgaaatgatcactactaaattgcaaaatagctaaaccaaactttgaaaatacctgaagccaaaacgttgttgttaggcaacgaaactgcaagtattattacaaggaaacatgtcaccaaagttttcgtactacccataataaatttttctatgaactcttttgaggtattcaaatgtttttattgtttaggatcttaaggattgactatttatatataacttttggtcttcagtttgttttattacaattaattgatgatccatttttgtttctcaaagttttttatttttggcaaaaaaaatcatttacatttatgaatatataattatttacaattaataatcctaaatgagaacttaaaaattgaaaaaagtgtgtgacacttgtgaatatggtcaaaggtaatttgttggatatgttgtcattatgttcaatcaatatctcaagttaaatgcgagattttaatttcataattcaatattggaaattttttttttataattaggtatattataaattttaactgatttcaaaattgatattgacaaaacaaattgaaaggaaaattaaatattatctgtaaagtcattattgtttttgttaataaatattttttagtttcataataaattaggaaaaagtcatgatgaccaaaaagatcaataagttgaaagttgataaatgtcttgttttttttttaatcatcttctttgaaacaaacaacaatg

SEQ ID NO: 22202 - DNA, 3003 bp, Unknown
  misc_feature (1)..( 3003): 2750-1469P.txt file - cDNA_ID_2048988; gDNA_ID_1620575; Annot_ID_160973
atcaacaagttaataatatatttatatatttttcctttttcactaaaaggaggtctaaattggccagcatgtttgacaaatgtcacatgtcactatgtcagatttagattgatattagctacatataaatacttgttcactactatataatgtgttagatttatcgtgttcataagatacatcgaaagcacatatacacgttgaaatatcatttcatataacaaagctatggagaatgatatggaagagaagtttgaagattggaaaggtaaagaggcaatcccagggaaacatggtgggatcagagctgcatctattgtttgtggtaaatatttaaaactcaaaacttcatatttttattttgttccattttcaatgtcttaatatatggtgtggtaaatgtagttgtggtgatgatggagaacatagtgttcatagctaatggattcaatttcgtgaaatatttcatgggatcaatgcattatacaccagccacagcagcaaacatggtcactaatttcatgggaacatcgtttttactcactctttttggtggttttatcgctgactctttcgtcactcatttcacaactttcatcgtcttctgttgcattgaactcatggtaattaaaaacttcataaaatgttatctaccatttagataattgtactttaatgatgaaatgaataatcacattaactttaaggtttaatcattttatagggattgatcttgttgacgttccaagctcataaccctaagttactgcctgaaaaagataaaacaccttcaactcttcaatcagcgattcttttcacaggactctacgcaatggctattggtacgggcggtttaaaggcatcgttgcctagtcatggaggcgatcaaattgatagaagaaatccaagactgatctcaagattcttcgattggttatacttctctatatgctctggatgcctcttggccgtaaccgttgtgttgtggatcgaggaaaagaaagggtggatatggagcttcaatatatccgttggaattctagcgacggcgctgtgtatttttactgtagggctaccgttttatcggttcaagcgtcctaatggaagtccgttgaaaaagattgcaattgtgattatttctgccgcaagaaaccgaaataaatctgatttggatgaagagatgatgcgaggtcttatctctatctacaagaacaatagtcacaacaagttaaagtaagtattgaaaattgcattgaaacataatctaatttataactgaactcaagatacaaacactcatttggtccaagataaatgtgctaaaataccttattttttaggtggatagataaagcaacgttgaacaaaaacatctcagaaacagaagttgaagaaacaagaacgtttttgggtcttctaccaatctttggtagcacaattgtcatgagctgctgcgtggcacaactctctaccttctccgcacaacaaggaatgctcatgaacaagaaactctttcactctttcgagatccccgtaccttctctcaccgccattcctctcatcttcatgctcttatctatacctttatacgaattctttggaaaaaagatctcatcaggcaacaacaatagatcatccagtttcaatttgaaacgcattggactcggcctagctctctcttcggtttcaatggcggtttctgccatcgtagaggccaagaggaaacatgaagtggttcataacaacttcagaatctctgttttgtggctagtgtttcagtatctgatgctaagtgtctctgatatgttgactttaggagggatgctagagttcttttatagagaagctccgtcgaacatgaagagcataagcacggctttgggatggtgttcaaccgcattaggtttctttcttagcacaactcttgtagaggttacaaatgccgtcacgggaaggcttggccatcaatggcttggtggggaagatctcaacaagacaaggcttgaacttttttatgtgctcttgtgtgttcttaatactcttaatcttctgaactatattttttgggcaaagagatattaagtgaaagaacaaagtatacggatattgtgttttcgtaacttcgaggcactttatgcttatagtgttcaatctgaagataatataaacagtaagtacaaatatcctcatgttatgtgtagtatcactttgttaaagtgtatctacaaacaaacaaacaaacaaaatatagaaaaatggtggaaagagtaaaaaaccccaatttattatgtcatgtgtactaataacattttctagtttgtcttaccaaaataaaaaaataatattttcaagatttgccacttaaaatgatgatattagttagaaacaattatgtgattctaatgatggtgataagcatgttggcgatgatgttttatgatgacatgatgatgatgatgatgatgatgatgatgatgataagtattagataatatggctgcttaacatttcaaaatttaagaaactaatctctttttttttttgttaaaagaaactaatctcttaaagagtaaattataagaaaatttatgtcatattattggttttttgttaacatattatatatttttttcccaaacgtttacacaatttacaatcaatatttttaattgttatggaaatatctaattttattttagacgaaaaaaaacttagaaaaccaagaatttatccttcttggtatgaacaaagtccttctttggtgtaatgtataactatcaaaacgtacttactctgaaattgttctctttagattccttacatcattctgatgtattctcaaaatgcaaaaaataaaaataaaataactaaaaccgaaaaaaataatcaattattggctagtccatgttaaatttcacacaccaaaacacatgctagttttatctccaccttctatttattccgccaaaagcctttacggttactacaagccatccaacaatg

SEQ ID NO: 22203 - DNA, 3003 bp, Unknown
  misc_feature (1)..( 3003): 2750-1469P.txt file - cDNA_ID_2048995; gDNA_ID_1620575; Annot_ID_160971
caaaacaaaaaagcaacaaaaatatgtttaatcaattgagatcacaataatcttcataatatattaagcctattaaaatttcctaatctaaggaattaatcaagatgtgaagaaatttcaaagtatatttacgttggtaatttcctaggttcagtccaaaaaaaattgaactcatttttctagttaattaggtctgactgatatggatttaattaaaagagctgagttcgatattatcgaattctaaacttcaaattatttgctacaagttatataacatagttattgatattttgaaaattaatgtagtattacaaactcttttcttcggaaaaagatatatgtaagaaattaagaaaatatgaaatgtcaatacaaacctagtataagaaccgtgaagacaataagaacagtaaacgagagttgaaaggatttgatcatcgtaaatgatagaaatgaattgatagtactttgaaagttacaaaagaaaaccaattgtagttatatataataaggaatatgtatctcacattcaaacacatatatctattttaagatttttactactttgtactccgaattaaaagatctaccttgactcaggttccaggttttttgcttatatgataagtaaaagtgtcaaactcttatttcattttttattaaaaggttgtaacttgtaagccaaaaggctcgataataacatgtgatattattattattttttaacgacttcatttcattgatagaatcaatgatcataatacaaagttgatgttatgaaagcgggtacatagtagtgaaatttaaaactctgatttggttgaagatgatgctttgcgaggatatctgcaggttggttgtttgttcttggaacccatttgaagacagcctcctcaaatcgtttttgccaaaatctgccttctcttatccagttgaatcttccaaagtttagcttttcgttgttcataagctcttccacttgtttactgtccccttcaaagataactttgcgatagccttggctccaagcatgttgcattgctataatcaaagcctgaaattcactctccaatgagtctgatgttgttgatcctattgcttgacccgaacccatgtatactccattctcatctctcattagccagccagctttcgcatttcgtgtttggtggttgaaagctccatcataattgtactttatccaagtgcttggcggccgttgccacttcgtacgtgccatagttggttgttgatgtcttgatgaatgcacttgttggttgagactctgaacataagtgtttgtgtcttcccactcttgaacatcattccgtgcacgttgtagggtgttttgccatgatatgcttttttgttgaaacaccaattgatttctgctcttccatagtctccataagatccagatggccaaattaaaaagttgtggttgtctgttggctaaacaactcgataacagcagctccatctttgtctccattgtaattcctgtagttcgtaactcttggtgtggtatccctgaagctcgccaaacctgttgggcataaaaacaatcaaagaataagtgttgagacgtttcgtcctcttggcagcaccggtgacattgcgggtgattccgtatatgtcttcgttttagattgtctcctgtggctaaggctcctgagagtagcttccagaggaagtgtttgatttttggcgccgttttgagtttccatatcttagctttaatctctgcttttcctgggggtggttgaatttctggatccatgaacacttggtttgctaaccagtaagccgacttgactgaatagatcccatcttcagtgtaatgccagcctagaaagtcttgagtagccgctgtacataacttgagagacaaaatgatttccgcatcttcttctgtaactagatcgcgaactaagtctctgttccattgatttccatgaagaatccaattgttgagaagacagtgttccacttggttattctttggtttcggtggtcttggagggtgagttggcaaccaagggtcgatccaagtactgactgttgaaccgttccctacatgtgatattatttatcatcgaaaatttgaagcagtacaaagaaataacaacttggtattaaaaaaagtggaaagaaaaataaaaattaatataaaataataagatataactatttttgaaaataggtgtaagaaattaaatgtatattaattagtcagatcatgtaacaaaaatataaattaaatataatatatttacctaataatagagaagaaaatattatgtaaaattaggtatctatagatttgtattcattaaattatgcttaagagattgatcgataagtaattctaaacaatttcacaaaagtaaagtgttataccaaattaatagatatcttctaggtaatgcattcatgtataacgttatatctattttatatgatatttacattttagcgcaaaaaaaaaaagaagaagaaaggaagcataaaatgtaaaaagaacaatcgaaatcagtttttaattatctgtattttgaaagttttggcatatgagtaaacaagttttatcatatactaatttaagatattatgttaaatatatggttcatttatttacatatatgaattcgagatatcttaaaccatatatatacttttctaaaatctataataaatgtaaaaatcttgataacttttgtaagattagtttataattttttatattataaaataattatttgtatatttatcaacaagttaataatatatttatatatttttcctttttcactaaaaggaggtctaaattggccagcatgtttgacaaatgtcacatgtcactatgtcagatttagattgatattagctacatataaatacttgttcactactatataatgtgttagatttatcgtgttcataagatacatcgaaagcacatatacacgttgaaatatcatttcatataacaaagctatg

SEQ ID NO: 22204 - DNA, 3000 bp, Unknown; identical to SEQ ID NO: 2681
  misc_feature (1)..( 3000): 2750-1469P.txt file - cDNA_ID_2049052; gDNA_ID_1620575; Annot_ID_160953

SEQ ID NO: 22205 - DNA, 3000 bp, Unknown; identical to SEQ ID NO: 2680
  misc_feature (1)..( 3000): 2750-1469P.txt file - cDNA_ID_2049062; gDNA_ID_1620575; Annot_ID_160949

SEQ ID NO: 22206 - DNA, 3000 bp, Unknown
  misc_feature (1)..( 3000): 2750-1469P.txt file - cDNA_ID_2049066; gDNA_ID_1620575; Annot_ID_160948
ctccaaatgattccgataatcttacaaaacaggcaataaaatagtcaaaatacataactttatttcctaataaaaagatctttaaaaaccaaagatttgcaatgaagatttgataccacaaacaaaaaaccattactcacaagtgtcttaatacgattagttgatcagatcagaaaaatacgaccgccacgtcatcgaccgcatgccctcgtcgtgtcttcgctcactcaacaaaacgtatccttcgctttcacgaacgtcgcataaaagctctgcaaaacacacacaacacaactgagagagatcagagaaagagagatttgtaataatcaaatcatggggaagagaagaggtgtctccgccgtgaacgttgttttcgggtggctgcgacaacaatcgaacaaggttaaaatagctttaggaattatcatctctttgatcctcgtcgttcttctgaaattcaccgttaggaatcacaatcactttttcatcgcctccgagctcatccacgccgccggaatcttgatcctcatctacaaactcactcgccaaaagacttgctccggtaacaataaaaatcccaccaccttatcataattcataagattttgactttaaatcatagacctttgtttcttggtaatgtgattagaagtgaaaacatttatatgtttatattgtgacaatgttgtggaatcttataagctcttttggttttgctagtgaacatttatgtttatattgtatcaatgttgtgtggaactttataagctcattttggttttgtctcatagaatatgtgtatggtttgaattattaggtctttctttaaaatctcaagaagtgacagcaatatttctagcggtgagattgatatgcagcataaacatggaaggtgatatccatacagttctcgatttcgccaccttggtttcgactctatgggtcatttatatgattcgatacaagctgaaagcatcttatataaagtctctcgacacttgctacaattactatgtggtaatgctttgatttaaagagtgtaaatatgttgtttgccttttcattctctcgaaatgatttaagtaaaatgtttctcgctttttcgccaaccagcttgtaccatctgctatccttgcgttgattattaacccgagtacgagttattcttacttccaccgtatattgtgggcgttttgcgtctacacagaatctgtctctgttctacctcaacttcgattaatgcaaaatgctcaggtcagacacttttgacatatctatgtatctttagatttattttatgtcaatgtagagactagagttagcactttaacaaactatgatatgatctagtggttgatcagtattcgtcatgttggtctcgcggatgagtatcatccagtacacttatatattggtcaatgtagacatatttatagtggcaagaaaatttggttttcttaggtccaaaacttaggccaatgtagacaatctaaatggttattagagattctggttgtctacaagtctcgtgattagtctagacttaggtccaaaacctatctcgtggttagtctagacttaacaatttctcgaacaaccatttcagatcatagagcctttcacagctcattatgtgtttgcactcggaatagctagattcctggcatgcgctcattggattatccaggtaaagatcctttcttaatccactaattaagctttcatgaataagctcaagagactaaatggtctgaagatgtaggtcgttgagactcgtggacattacctatggctactcggggctggttacttctggtttccggtggctctactagccgagatcgttcaaactttcatcctcgccgacttttgctactactatgtcaaaaggtaatcgttttacgcataaatgatcaacttcgttgtaacaatttggaggactagacaatgttattgacctgtttttatcacttctttcagtgttatggagggtcagcttgtactgaagatgccggtttaagatcatctagtataaaatgaaccaataaattttgcttgttttatctttcaacttaaactacaacttttaaccaaagtagattgctcaaaataatctagaatggtttctttcttcttctctatttcctgctttttgtttaagaatctttagagaaagttaatcactatacaattgcttttgttcttacccattttcaactattttgagctatataatacacattgttgagattatacaacgacgttttaaccaccagattgattaacctcgttaaaactaaagaaatgaatttctctgtattactttgtaaatgtcaaaattttataacagatttaacgaaaattaattacagtaatcatgtggaagattagaagaagaatttatctgatacacgtacaagtacaatcatacagatataaactctaaagccacttttttttcttcttcttccatttttttgttctcacgtcgctctctctttttttcgagattcagctgtaaaaccctaactagcgccatagccaaggaagctttcctcagatcgtctctccgaaattttccggttaatcgtcagttaaggtaaactctaattgtatttccaccgttgttttcttcatcggaaacttctccgagcaacggcatacttacttactccactctttttcttcttttacttgatcgatttgaattctagactgttccagttcttagatcggttcttcataacttcgatttgtgcttatcttcttcgcgaatcttcgtcgcatttggcgtttgaattggatactgatactcatactgttataacttgttgaattggatcttcattgatttttgtatctagatcagagatctgtagtattactgtttcgttttgcgtttctaatttgctagaatagatgagattgaagtggaattagtgattgtcacaaggtgatgatgattgattttgaattgcaggggaaaattaggctatg

SEQ ID NO: 22207 - DNA, 3003 bp, Unknown
  misc_feature (1)..( 3003): 2750-1469P.txt file - cDNA_ID_2049070; gDNA_ID_1620575; Annot_ID_160947
gtaaaaagttaagtttttaaggacaaaagagattgaaaaagtaagaaccattatgggtccatttagaagaagtagaaaagataaagtgaagagacaaaagaactaataatgatctgcacttgagtacccattatgttttatttcccatatgcaaccactaagagtactctctttggtttgaggtattagtatgaactaactagctccgtgattgtaggtgttttaggataagataattgaatgttgttagtacactcataacatgaattgggacagtttggttaggctcttgcatatgacattatcagtttggttctaattaaggagataaacatgctaaaactttgatgatctatgtttcttaggacttgatcacaattcacaatcactgcaaattgttgtaattgttctgatcaatctgtttatggttttgatttttggtcaaggtaaggaacatttagactgatcaaaagaaaaaggcaatggatggtggtggttattgaaatggccaaacagatgaaaagaaaggtaactttcaaaagttgctttctttttttcttgtcactgtttctttatctttctctttctcacacatctctttcttatacccacaccactcttgagagagcagatcaatagagaaaaaaacttggctagtttttctccacaaggttttttctgcaaacatgtctgaacttgcattgtcatctcaagaagagtctccaagtagtaataagattggtttatcttctcttcttctctctgactttcatctcttttgctcatttatcctcactcaccctttctatttttcttacttgctcttcttttcaccttacatcttcaagattctctcttttctttcaccactctttgtcaccaccacactcttgcttcttgccttattgagtactttacatgttcaagacacttgtctcgactctgaatcactagaaacacaaccaagcttccttttctccttttgtagtaagcttggaagtgtcttggaacacaagtttgatgtcaacaatgagggttttaagtcattggaggagttggaagcgtataagatggtcgtcgaggcttgctcgatggaatgtgcgtccgagaatgagatatgttcggatgaattgacgtttgttgacaaattctgtagccatgagagcacggtgtcggaatctttgaccgatgagacccttgaggagcaagttgagatccaaccgttgaagtttgaggatgtgattgttttggagaaagaagaagaaaccaagaaatgtgaaaaggaagaagtagaagaacaaaaagtcaagcataaaagtgacgttgtcctcgataacagagaagagccgacaaaagaagaatccaaagctcaaaaagttgaccttgtcggagatagtaataatgaaagttatgatctcccaaaactgagcaattttctcggagaaggagaaggtaaaagaaatgtagtgactaagaacgaagaagaagataatgtttctctccaaagctttggatcaatgagaaaagagaaagaatggaggagaacattggcttgcaagctatttgaagaacgacacaatgctgacgttggacaaggcatggatcagctgtgggagacttacgagacacaaacagagaagaagcagcaaaccgaagaagagaagaagaagctcaagaagaagacgaagtcgatgatgaagacaaagagtatagagaaggaagttatagtggaggaggaagatgatgatgggattgatcatcagcaactttgttgtttacaagctttgaagttctcaacagggaagatgcatttgggaattgcgaggcctaaccttttgaagctatctaaggctttcaaaggcattggacgtttttacaatgctaacaaacattccaagaaagcttgaaaaggagatgaataataaaactttgtattaattgggatctataaacaatgtaacttgtaagtttccattgttttgggcaagttctatgaacaatgtaagggaaaataaaaggtaaaggctaggattttgccatatgtgtttagctttgatcttaactttctttcctatccttgtatattttgggacggataacccgtaatggcccgtatcgattgagaattacttgtcccataaggcatgttaccgttgaaatatttaccttttttaaaatgtaaatttttgtttaacaagtaagggattgggtaaaaaattcaaagatatccgcattttctatattttccgcttgagtaatataatatttacaaagtgtataaaaattatccaaaatttcttcatatacttcataaaaactatttttttcaaaatttcaaaaaaacaaaaaattccgtcttgccgtagagttttacctctttcgaaatcgacactcacccaaattaatgagagtttgagaattgaatttagatacccgaatttcacattctctatacattacccaaaatatttgtcccgtattttatcaaaaatagttctgatcatgtttttcaattactacctgaactatttttcgttctgatatccgaaataaacatgtctattcattatatctcttctaatgatctaatcccacaataattttttccttaaactgtaattttaagtcatatatttcattaccattcattctattaataaaaatattgtaacattttatggttgcataaattaaatccggcaatggaatgtctaaaagtagtataatcggtcttgttcccacttttgtttcctagttgaacagatttgaatctcagatctgatataaaaattcactaatcgacaacattttactacaaaatttaatagaaagtcaaaatatgattgttacacttcaattaacttaaaaaaagttgaaaaaatggttaccgacatatttcatagtttggccgcgtacgattagtgagacactccattaaatagcttataattgaaaattgaatgacactgtgagattcaagtgtaaagtgctctctccccaatg

SEQ ID NO: 22208 - DNA, 465 bp, Unknown; identical to SEQ ID NO: 2719
  misc_feature (1)..( 465): 2750-1469P.txt file - cDNA_ID_2049105; gDNA_ID_1620581; Annot_ID_161168

SEQ ID NO: 22209 - DNA, 3000 bp, Unknown; identical to SEQ ID NO: 2721
  misc_feature (1)..( 3000): 2750-1469P.txt file - cDNA_ID_2049142; gDNA_ID_1620581; Annot_ID_161153

SEQ ID NO: 22210 - DNA, 3003 bp, Unknown
  misc_feature (1)..( 3003): 2750-1469P.txt file - cDNA_ID_2049263; gDNA_ID_1620605; Annot_ID_161753
gttcattgttatagcctcatgccttagctgtactttctgtatatagcaaaaaccattttcttcccgtctcaatgagtttgacataatctttattcaatgttgaacagttgaagtcggcgaatatctaagaagattttcataactatcgacttactaaattatatcatgtgcagtaactatctttgaaatcaaagaagatcttccattaaagatacataagcaaatattctttttagtgaatatggtttttaatttcactatactagggtaatatatttttcggttcatgcaatattcattcaattaaactatcatgcctttaccattacaattcacttggttccggttagatcaactttgtttttggctttggtcgattattaacttggcccaagtcatgcattccacgcatgaagcaccctccgaagttcctttcctatgttctctctaatcttgaacctgagggattgattgagagtgacaactctttcggttgagagcaataaactcatttgatgaataaggttttcgacctttgcatccattttttttttcctttaatctagagggttgtcgattcagaagcaagagtcaaaactaaatttggaagtttagttccacctaattcaaacaatgatatatatgttaaaccaaggttaataatgttaaacatagtttcttacactattatgtctattatatgtaggaattgattgattattatttttaattattatgaaaatgtctactgaaaaaaattaagagttttggctaattaaaaagctagacaaaaaaagtttttggccattttctctatagaatttgctctttctgttgttacttacattaaatgctgtcttgcacctatatggcctgaatgtgaggaaggcccatatctattggtgaaagagcccaaaggttaggccattcagtatttttctgttcttgaacctgatatggatcttcttgagtttatttgcctcactattcctgagcctattatcatcacattatatcatacagttgcatcaattcaaagcctaaacaattgcattaacgtgtttctaataaaaaaggatcggaggattattgatagttatatcttattttaagcccaaaagataaacacatttgtggtggttgtttacttcgcgtatgtgtccttaccattcagacacaaagttatactgtattatttaatgtatcttatgagccacttggcagagagatatggaacgtatgaactcgtacttaccacacgtctacgataaaagcttagttttgtctatcgataaatataaattattcgatttgtaacgttttggattttaatatatcatcggaacatcatcctcatctcgaccacacttcccaagaccaaccacatcatggtttttgacacttgacatacgataattcgtcatttcatttttctttgttttaacatgtacaaactatacaagttgttattttgttcctatagtcaaatttactaaagaatatatagaacgatcctttgaaattttagtattatgcggagaagataatttatttgagatgaaaatttattatagaagttgtactgcattaattgttaccattcacaaaaacttaattataaatgttataaatttttttacttgtaattttattgtacaactcttttctaccgctttccactattccaaaaaaattacaacttcaactaacaactaaaaatttaaatttttgtacagttttatgtaatcaaactggatttagagttttttttgtttatctcatgattgagtgggtgattggttgggctgtaactgtaaagtttttgctgtagagattttggtgtagctgtgttagctgtaactgtaacttttattgttgtagaattattgctgtaagtttttttattttaaataatttataaaaaagaactaataaaatataatagttgtaatacactttttttatatagtaaataaaatgccttgcattactaatttaaataaatatattatgatgatataaaagtaaaatatagtaaatattttttttgttatatatttatgttgataattttaatttcttagatttatttaatgaattaaaatttctacaccaaaaaaaatttggctttgagaatttactctcctacaaccttaaaaataaaattaaaaaaaattgggctgtaggtttaaaaataaagctacaacatgattagtacgtaatcaatacttttaaaaaaattaaggatgtaagttagacttatacgccaaccaatcatgcactgaataacatcaactcttatcatttctacacaaattattctaaagtatttgattgaatataatttcagttaaatttgatcattattctttatcatctaaaatatatatacttttaaaaagatgaaagcatatgcatcagcagagaaaaaaaaagatgttcaatgcagaaaaaaatatttaattttcggaattaaatttaaaaaataaaacaaatttaaataaaccccattaaagcttcctaccaaaataaaaacctttaaagcttattttatttatcactaaaatcataaaaccactaattattacctaaatcgttgaatatttcaatttgatgtaattttacttttaacgaattaaataataattataccaatgatgatgggccaagcaagtcgtgcaagcaaagagttaagctaggtcccactctcataataagtccagaaaatggacgatctagatctagtgtagtctctatccaactctaatcttcaccgtttgttattacacaagtcaaataaggataaaactgtaaattcacaacaaaatcgtcgaaatatcatatcattcactggtggaggaaactgaagaaaacgatccgataacagcattttctattttcttctgtgcctcaaaaaatcataattttctcggaaaattaaaaatcatgtttaagattttctcgagaaagtaaaaaaaggaagaagaagaagaagaaaccatg

SEQ ID NO: 22211 - DNA, 60 bp, Unknown; identical to SEQ ID NO: 2829
  misc_feature (1)..( 60): 2750-1469P.txt file - cDNA_ID_2049270; gDNA_ID_1620605; Annot_ID_161752

SEQ ID NO: 22212 - DNA, 3003 bp, Unknown
  misc_feature (1)..( 3003): 2750-1469P.txt file - cDNA_ID_2049313; gDNA_ID_1620612; Annot_ID_161944
cttatgatggtatactttttcacttgggttcttttcgcatgtagcatcgtctctggtaccaccctcttcatcctcagaacaaacgaaatcactatcagagctctctacatcagaagaatctgaactttcccccacgtaatcagatgagtcagaatcattagcatcttcatccatatcactctcaccagaatctctatcttcgccactaacttcctctcttgaatcagtccctaattcctctaaagggtcttcctcatcatcagaactagaacttagacttacaacctcatcagacacataagtcttctcctcacccctcaaattagcatcatccagaagaatatcacaaacctcagaaccagcattgacatcctcgacatgctgattctctcccgcgatagttccaaggaaaacaacatcatcatcatcatccggagataaagggttctctttaccactcactttagcatcatcctcatcaaaatcacaaaccctaggagaaatcaccgaagcagaaccaacattgtcatcatcctctacatgatcattctctctctgaacagttccaacgaaaacaacatcatcatcatcatctatagggttaaaattagaagctttctcttcacatcccaaattacgatcatcagcatcaaaatcacaaaccctatcaccaaaatcaaacgatttcgattgtaaattcccagaagtagaaccaacattctcatcatctcgcttaccttcaggatattcagttctaacaaatacaacatcgtcgtcatcatccttcctccgccgtcgtttcttcttcctcggagaaggtgaacaagcatcacgcatgttaactctcctcttctcagtcctcgaatttacacaacccagagactgatcttcttcttctccagaaatcccctttgatttattgagaatcgagttcaagtaagattcagtcctcgaacgagttcttctagcaacacaactagtcatatccatggctgaagagagaaatcgaaaaccctagaatagtggatttgacgaagaaggaagaaagctcatgtcctctctcctctgttgtctctgcaaatttttttttttttgcctttggcggtaacgattcaactttctcgaaacattcaataaaaaaggtttttttttgtttgtttctttattagggtaaattgtaatatttgaaaagatgaggggctaagtgaaaattaatagataagtttgcttcatttctattggtgggaattgattgacatgagagtttcaaagttaaaggtggatgttactggttctgtcagtagatagaggtatttaataggggtcaaaatattagtggaaaaatgaaaagcttttagtatttcaaatatattttacaaattggttactaattttttttgttgtaatggtgctggtaaggacaaaaattctattatttgcttaggattctctcctttatgttttgatgtgagtatgtgactaatatttctgcaaacgatttagtgttgggttattagagaaagatatcttctggagaacgaaaatctggaggtgagatcattgctgatttgaattgtaaattttttatgaaaattttgtggtaatcaaatctaatggcgaaaattcatagacagagtcactcacagagatatgcaatttatacaacttttacgattatatattttttgcggtttaatctatcaaaacatgtattataacttaaatagaagattattattatttgtttgtttcaaaaataaaaagagtttgcggaataattagtagaacatgttagagttaatataaatatgatagagaatgagttaaatagaatgttaactttgacacttctaaatttataattacagtaataaattatacataccagaggctatatataaaaatactaaaaaaataaattatatcactttaatacttatttaaaatgtgtaacaatctaaaaaaatggtctggtagtatattacgaattaaattttattagttatataaaaaaaaatatgatgaagaggctcaattcctcaaagcaatttatgtgagagttcaattattattagatttctaaaattatatttttgagattggatttctaaagttctatttttgagtttgaactttcaacgagttataaaattggaaatacaaaatcttatggaatcgaattatctaaccgggtttaggttccaccgatcagactaatcggatcagctcaagttctaaaatatgtaaaagctcgtaacgagaactttcaaatttggggcaaaaaaacatgaactttctaaatgtcatttaaatctcaaagtttggtttgactttataataaaatggttaagttttgttgaccgagtcattttaggcatgtcgttaaatttttgttaattaaaagatgaccgagttaacttttcataatgtttgggtttagaacgataccttatatgtatttagaaagatacctcataagctttctgataccctacgttgtgatggtttttctctttaatgacatcatatatgtatataagatttatttatttcccaaacgaaaaattaactctgtcgtctttttattaacggaaatttatcgatatgcctataatgattcaatcaacgaaatttactattttattataaagtcaaaccaaaatttaagattttattaacattttgaaaattcatgtttttatgtcccaaatttgaaagtttgcaaaaaaattttgacatttttcccgatctaaatttaccatttaaacaataaaaagtaaaaggtcaaaatgtaacattttagaaacacaaaggacaaaatgataaatatcatgccaacgcgttgatcggtttttagctcttttcttccgatttcgttttttctttcttcatctctaagattaagcacaccttggcatccattttcgtttgaatctcaacgttttttgcttgattttagcttctgagagagtccagatccaaggaattggaggaagaataatg

SEQ ID NO: 22213 - DNA, 2042 bp, Unknown; identical to SEQ ID NO: 2875
  misc_feature (1)..( 2042): 2750-1469P.txt file - cDNA_ID_2049353; gDNA_ID_1620612; Annot_ID_161930

SEQ ID NO: 22214 - DNA, 3003 bp, Unknown; identical to SEQ ID NO: 18700
  misc_feature (1)..( 3003): 2750-1469P.txt file - cDNA_ID_2049387; gDNA_ID_1620619; Annot_ID_162203

SEQ ID NO: 22215 - DNA, 3003 bp, Unknown; identical to SEQ ID NO: 18700
  misc_feature (1)..( 3003): 2750-1469P.txt file - cDNA_ID_2049387; gDNA_ID_2926207; Annot_ID_202304

SEQ ID NO: 22216 - DNA, 3003 bp, Unknown; identical to SEQ ID NO: 18704
  misc_feature (1)..( 3003): 2750-1469P.txt file - cDNA_ID_2049420; gDNA_ID_1620619; Annot_ID_162187

SEQ ID NO: 22217 - DNA, 3003 bp, Unknown; identical to SEQ ID NO: 18704
  misc_feature (1)..( 3003): 2750-1469P.txt file - cDNA_ID_2049420; gDNA_ID_2926207; Annot_ID_202289

SEQ ID NO: 22218 - DNA, 3000 bp, Unknown; identical to SEQ ID NO: 2981
  misc_feature (1)..( 3000): 2750-1469P.txt file - cDNA_ID_2049430; gDNA_ID_2926207; Annot_ID_202280

SEQ ID NO: 22219 - DNA, 3000 bp, Unknown; identical to SEQ ID NO: 2981
  misc_feature (1)..( 3000): 2750-1469P.txt file - cDNA_ID_2049430; gDNA_ID_2926238; Annot_ID_203958

SEQ ID NO: 22220 - DNA, 3003 bp, Unknown
  misc_feature (1)..( 3003): 2750-1469P.txt file - cDNA_ID_2049449; gDNA_ID_1620628; Annot_ID_162568
ttctcggtaacttccttgtcttctttgatctcttgcttttggttaatttgtgtaactgtcactgttgttattacaagttttttttttttttgttcttgttccatgagttctctgtttgttgattggaaaataaactgacaaaagtatagtatgataggagactgaaactgttctaaatttggaaactttaagcatatggtttcttattgaaagatctgtctcgttgatcctgaactctctcccagtgagcatagcgtatgctaaacttgtctactgtttgcagacacggagaagttttacacggaggtccaggaaaagatacttgctagatacaataaaacatttgattggtctttgaaagcaaagatgatggggagaaaagccatagaagctgcaaggcttttcgttgacgaaagtggaatcagtgactctctttctgctgaagatttcattgtagaaagagagtcaatgttgcaagacctcttccccacaagtgacctaatgccaggtacacaatccgcattgattaggccattctttcttttcatatatatatatatatatgtctttaaattctgtttgtttagtttcatttgaatcagcctctgatttattctctttgagtcactaatcactgaaagagacaagctcttagctcttctacttttcgctgtatccaatattcttcctctaatgcaggagctagccggcttcttagacatctccatgggaaaggaattccaatatgtatagccacagggtatctctttctgtattagcacatgctcttcttatagatcactgagagtgcaaatggctttttcagcttctttttataaatttatggtttatggcatatgttatctgatttagctactttttaatgcagtacacatacacgacattttgatcttaaaacacaaagacaccgtgagcttttttcgcttatgcatcacgtagtacggggggatgacccagaggtgaaggaagggaagcccgcgccagacggctttcttgctgcatccaggagatttgaggtacagatggtcactaaaactgtacttatcaaactaaagcaccagctattagcatgtgtttccacctttgagaagtttgtaaaccaatgttttccctcttctttgcggatttcataggacggtcctgtagatccacgcaaggttctcgtgtttgaagatgcgccttctggagtccaggcagctaaaaacgccggaatgtaagtggatttcgtgtaacattttccaagttctcttagctgatgagctattagtggttcagttctgactggtgtgtgtgcaggaatgtaataatggtaccggattcaaggttagataagtcctactgcaatgttgcagaccaagttctggcctctctgctagatttcaaaccagaggaatggggcttaccttccttccaggattcacacaactaaaacaacaaagctttcagggcaacgttatcctcaagctaacgatacttgactcgttaactttgattctttaagcctcttacgctatacgagaaagattattgcaaattatagattcttattggggtaatttaaaacaatatatttatgttcgtgatttgttttcttgattcatgaatttgtaattgttatccagaccgttaagtgtgactttggtgagaatgatattagaatgattgttgtgagtgtgggttacattcgaaggtcataggcttagattttgcgggatgtcgttaacagaacttgaggtcaactttatagtcggtagccaagttcataagcaagtctttgctactattattgtagaaaccgacatgattggtacatgacattgaatgttaaaatcaaaaccaatcacatatctctattctctaccaaaccaaattgcaacttatctcttgtaagaaacttcaatgattgcaacgggcgaaaatattgtctcacttttttattttatttgtgtcgtccgcaattaacttactcacataatcggaatccaagttagcactaatacaaagtatgtctttatgtagcaatgttgcatcgttttcaaagaagtgttattcattgcttactttcgtaatgatgattttttcccactcgtttgtcgttactatttactatcaatgatttataaatcatcgttaatgaaaatttagatctattttagtaatagatttgtttggtttagtacaagggattgtgaaaaagataaatttgatgattaaagaggacgcaaagtttggcgagtctttactctatatagagatagggtctaagcattcacatgcacttatgaaccgtccaacatcaacgttaataacgtgtgattcgtatcaaagtttacatatatttggcaaactttaatttattatcttgaaaactatatgtttcatttttgccgttttgagtaaagaatcgtacacccatcaattttcagatatatatgagccaatccataattaatctgattgattagagagaacgttataaacatctttaagatcaacagtatattattggttgaccaaaaaaaaattattttgatggtgaaagtcacataaatcaagtataagttcttgtcaaatttaaagtaatctctacgaataataatattggatacatgaatcataatttgtgatggtataatatatggtacctttcccgtgcaaaagaaattgagtcattgaagtgttaagcaatagtttgaagtttttatattgaatattacaaagtcaaaagcccttaattacatcatacacatcaagtcatgaaatacatataatatcacacatcaacttgatcattcataaagtcttacgttccatcttctctacaggacaagagtctcccaagatatatatacccactaatacccaaatccatagacacaatctccctctatatatccatttctccaaacgaaaacaaaaaaaacattaagccaagaaccgcatatacgaaccaagaacacatcatcgttagttctaattatg

SEQ ID NO: 22221 - DNA, 3000 bp, Unknown; identical to SEQ ID NO: 3158
  misc_feature (1)..( 3000): 2750-1469P.txt file - cDNA_ID_2049474; gDNA_ID_1620693; Annot_ID_164858

SEQ ID NO: 22222 - DNA, 3000 bp, Unknown; identical to SEQ ID NO: 3158
  misc_feature (1)..( 3000): 2750-1469P.txt file - cDNA_ID_2049474; gDNA_ID_1620628; Annot_ID_162554

SEQ ID NO: 22223 - DNA, 3000 bp, Unknown; identical to SEQ ID NO: 3158
  misc_feature (1)..( 3000): 2750-1469P.txt file - cDNA_ID_2049474; gDNA_ID_2926187; Annot_ID_200751

SEQ ID NO: 22224 - DNA, 3000 bp, Unknown; identical to SEQ ID NO: 3462
  misc_feature (1)..( 3000): 2750-1469P.txt file - cDNA_ID_2049485; gDNA_ID_1620647; Annot_ID_163277

SEQ ID NO: 22225 - DNA, 302 bp, Unknown
  misc_feature (1)..( 302): 2750-1469P.txt file - cDNA_ID_2049485; gDNA_ID_1620628; Annot_ID_162585
ttcttacttccatgacctctctgcctctctctaatcttaaatgttctcttcttttttctgtaggagtttcctttttagtatactgaatcttaccttttccccatttaagttttaacctttttgctatatttagtaaacaagattttgtcatagggtttagggtttaacaatagacttcatacgaaaactttctgactttatatttttccttttcttaaaaaacacacactaactttaacctcaaattcaacagtcatcaagatttttctcggattctaatcaaacgtccacaggtgaaaatg

SEQ ID NO: 22226 - DNA, 3000 bp, Unknown; identical to SEQ ID NO: 3462
  misc_feature (1)..( 3000): 2750-1469P.txt file - cDNA_ID_2049485; gDNA_ID_2926188; Annot_ID_200794

SEQ ID NO: 22227 - DNA, 3003 bp, Unknown; identical to SEQ ID NO: 19155
  misc_feature (1)..( 3003): 2750-1469P.txt file - cDNA_ID_2049489; gDNA_ID_1620628; Annot_ID_162583

SEQ ID NO: 22228 - DNA, 3003 bp, Unknown
  misc_feature (1)..( 3003): 2750-1469P.txt file - cDNA_ID_2049531; gDNA_ID_1620634; Annot_ID_162819
tgtgtagaaccagtgccgcttgaatggtttgagccagagctgcttccccaaccccagtttgtatctgttccgtcggagctccatccccaaccccagcttgaaccacccgagttggagtctgaaccacctgaacccgagccagaagaaccgccagagttgccggatctccatccccaacccccgttcgaaccggactggccagaaccccaactccagctccatgcttcagcactcccggagaacacgaacgcagtaaccatgaggacgacgagtaacttacgtccacaataaagaaccatcatcgtgtcttcttcttcgttttttttctctctcttttttttttatggcttttgtgagctcttcagagtttagagtttcggtatttatagagtaatgagagtcggttcccattatttagtgaatataattttatttgtttttttagtaacagtaataggatttttttctttttcttggatcaaatagtaataggattttaaaagtggataaatctagctttagttattattgtttgaattttgatgagtcttttttttttttttttttgcatatacgattaacattgcttaaggatattgtatatatctttaacacacaaaaaaaaagatatagtatacatagttttgtttgatattctttttattttcgcacaaaaaaaaaaaaaaaatcttatttatactataatgaatctaaacatctgtccacctttaatccaagtacctctcccaactactgcgactaaatgacccatttgcctaaatgtagtcctttaccttactgaaaatagcgaggacaaatcagtcattcaccgccctaaaacacgctttgacatgtatttatccatttactgttattttatctgtaagaaatccaaataaactcatttctgtaaattaggaaacttctgagaaagtgacgaaagcgaagaaggtttcggaagtaaatatgtcttccttggggagcagcaaatccctgagggatgagatggaggtaacaaccgccgatgtttttccggaggttaacgccgccgctgtgacggaaaatcttgatcggaacgagcttgtgcttgctgacggagtcgtgtcggctgaggaaaggaatattgagccagacaatcgtggagagaggaagatagagagcgagtcgcctccagaggatgatgtttgcccgatctgtttcggctcctttacggttccgtgtcgtggaaattgtggtcattggtattgcggttagtcttttcatctttcttcttcttcttgattctcttgagccatttcatctacattgaagtatcaagcttgtgtctttttgggatatttctgttcgtcagaggtaaatttggagaattgtttgggttggaattggtttagggttccttttggtagccaagaatgatttatcacaactgattaacttttgaaagtgttgatttttaaaccatgctctgttactatggagtgttgtttgcaatgtcataaaaagatctgaaagtttcttaaaccggttgctgattttgttacaggaaattgcatcttgcagtactggaactatgctgcaatatctaggccttgcaagtgtcccatgtgtgttaggcacatcacgaagctgtcaccagaaccatctttgcaagagcgtcaggagcaagaggtgaaggaggttcttgataaagtccgtaggtataaccgtctctttgttggaggtctaactggctttgttcaggtacggtctttttgattcatgattttgttttgcttctctttactgtttcatgcatttcttatctatgtatatacttatttctcctttttatgacttggcaaaaccaccatctttcgaataattcagaaggtgcatgagcttccgtttctagtgaagagaatggtgtggcatatgatggatacagatgtgaacaatctgtattttcacgaagtgcgcatctttgcagttaagaacatcttaccctgaaatttacatttcatagtttagtgtttagttatatctctacccacttattcttgttgtcatttgttgtctgtactaatggccaagcaagacaatctttgtaatcatcataggagcaactagtttgtatttattcttgtttttaaaggccattgaaagatgagaaactaagtttctgtcggtgtttgcagatgttcatgagtaccctttacactgccgcagagtttaacttcattccaacgggtaagttgcctcacaaatcaaaaaccagcaatgaagggttaaacaatctcaatgtggtgtgtttaaggcttttaagctttccaagattgattttgccctcttttgtacaggcgggttcagaatagtgacagtttttgactacgctgcgattgctatgatcctgattctacgcttagtagggatatatcggaggagacgcctagctcagcaggttagacatctagcagctgcagcaattgagccggaattagagcaaagggaattgtaacagacacgtgaatctattaagtcttgtgcagtttgatccttgtggataagtttggtagtagatcatagaaacctcgagagtcgtgtgcagttttacagacaatgatattgcagactttaaaagtatatacatatctccttttctaacagtggaaataaaatattgattggaaaagatctctctggaaaaggatcttaatctttgattagatgatcaaagggttgaacaaatgttcgaagagtagaagtggatattctaaaagacgagtgatgagtgatttaaagattcaaaaatttcataattatctgaaataaaatgatggtagaagaaagaaacagtgcctgtggtctcgaaacagtgaaacgacatcgttttaatttcaaaaagacaccgtttctgttttaattaattgctttcaaatcagtagaagaagaaacatcgattgagctttctacttgaaaaccatcttttccgatctatcgaatcggagcggcgaaggaaggagaatg

SEQ ID NO: 22229 - DNA, 3003 bp, Unknown; identical to SEQ ID NO: 22228
  misc_feature (1)..( 3003): 2750-1469P.txt file - cDNA_ID_2049531; gDNA_ID_2926206; Annot_ID_202215

SEQ ID NO: 22230 - DNA, 2812 bp, Unknown
  misc_feature (1)..( 2812): 2750-1469P.txt file - cDNA_ID_2049603; gDNA_ID_1620636; Annot_ID_162922
ttctttttaacaaaaattgaacatttgtttttatgtatgttcttgcagttggacaaacttacttctgaatgaccaggagtgtgtataagttcgacatcttcatagatactccatggtccacttccttccagctttaactccacatcagaggtcgaaggttcaacctaacaaaaaaaaaattcccttaatggtcgatcagagatgggtttagtaacaaaattgtttgcgtggctagtttactttttacttttatccaacctcataatctttttctattttctacagagcatataagcagcccaaggttcttgtaactatgtaagcaagctttttcatttttcacgaaatctagatgttgaaaaaacctatcaagaatgtgcagagaggtgtgaaaaattcaaggacatacatcatcagaatgcagaattctggtagacttgaatctgtctgcccatttcttgtgatctgcaacatcatccctgaacaatgaaatcgcttatcctgattaacagagattacaagagaaaacacggattttctcctttaggtgttatcaattctacctgtgtgtcaaaaacatgtagcgaacaccacccttcatctcgatctttccagcaagtttctccacgtacctaggactgcagcaaacagcaaaaccttggtttaatcagttgtgtagagttaatagccacaacgaagtatatcaagaaatacattgcatcaacaatgtataagatactaaacaacaaagaaaataagaattcatgatgcctcctcccaagggtatatacctatcaacaagtatatttccctcacgatgaaggatcaggtaagaagttgctccatacgatttcttggaatgaaatccacaatgaaaaacgccctgagcataatgcaaatctcaaactttataaacctcaaggacagcagacaacatataagaacaaggtagtaagagtcctcagtggagctaaatcagttaagaacttaaggtcattgtatctaaatctattcaaaacctacgtatgcttacaatgatctaatcagagttagttgacttgttaataaccatcctaaaaaaatgaaagcttaagggattaaaaagtacaggaagtgtgtctttgtccactacaagtggaaaggtctcttgagcttcccctatgtcagcaggtggagtttgagtgcgaatagagcccgtcggacaagatagtaaggcctgaaagaatcaagaaaccatgagtaatcaggacaacctcagaaattttactcactaaaatatttttcttcataagaaatttctcagtctatgacatcctagcagacatttccacaaaatttgtctatctgttttataaggtaacaataaaagctatcaaagacaaaaaaacaaggagattcaaaaacatcctcaatgaaatgtcatcagatattaaatagaaagaaaactaaaatcgacgtagttaaggcacctgaagagcattcagtctttcctccttacaagttggttgctttgtaaccgcagacatgttgtccactcgagtgaataaatcctgtgaagataaatcagagaaaagctgtttacgaattggctgaaaaaaatgtaaagggaaagtaaaatcctgctctcacagctgcattggcctgctaacaaacaactataacatgaacattctaacttcttgttctcatataatgactgtgatcaaatcagattatattctaatgttagtatatccttcttcgagatcaatcctaaggcatcaacttcccaatacccaaaatgaaaaccccccaactactttaccctaccaaccaatagacccaaaatgcttaaatcaattcatcaatttcaaaggaccaccaaaagggtccacaagacaggggaaagagcagaaaaatttaggagctttacagatttcagagaagaaaagcttaccggaaccatccaacgacatgtatcacaatcaatacaagtattgtctgcaaaaaaatccattgaaagatagacagagagagggcgttaatgatctctctttgttttcaatttgcaataaaaagtaaccagactttatttaccaacaaatatatctccttcgacgttctgagttcgtcttctaggattctcatggcttgtcacttgagctgctttgatagatccaaacactctccttcctgataaagccgtcgagctaaaacaggaagctttcgatgaaaagatcgcttcttttgaacggaattgatacgagagcgaagaaaccgcagagaaagaagctgaagccatgagaatggtgattgatcctcgtctcttctcttctctttttgtgagctttgatgagtgtagtaactcatcttgaacttcgcccctatgaaaattatttgactattaaaaaatctatatttgactacttgtggacccagctaaaatccggtttacatacggttaagcttgattaaatcgttcaatcctgattggacacgtgtaagcttcttctcattcgtgccgggtcctgtcctcctttgtagatcgtctctctcaatctttcaaaacgagaacccggttttttagcggttaagcctaatttggtctggtttgtttttccttaaaccgtgagtctcgaatccaatcatgattggacacgtgtaagcttctttctcattcgtgccaggtcctctccagtgtatgtagatcaatctctctcttccatctctcaatctctcaaaaacaccaattccaatcctgtttccttggatcagagatacgaatctgaatcacaatctcgagatcttcagtgttttccaacggtgattgatg

SEQ ID NO: 22231 - DNA, 3000 bp, Unknown; identical to SEQ ID NO: 4398
  misc_feature (1)..( 3000): 2750-1469P.txt file - cDNA_ID_2049603; gDNA_ID_2926204; Annot_ID_202072

SEQ ID NO: 22232 - DNA, 3000 bp, Unknown; identical to SEQ ID NO: 3299
  misc_feature (1)..( 3000): 2750-1469P.txt file - cDNA_ID_2049607; gDNA_ID_1620636; Annot_ID_162919

SEQ ID NO: 22233 - DNA, 3000 bp, Unknown; identical to SEQ ID NO: 3299
  misc_feature (1)..( 3000): 2750-1469P.txt file - cDNA_ID_2049607; gDNA_ID_2926204; Annot_ID_202069

SEQ ID NO: 22234 - DNA, 3000 bp, Unknown; identical to SEQ ID NO: 3290
  misc_feature (1)..( 3000): 2750-1469P.txt file - cDNA_ID_2049619; gDNA_ID_1620636; Annot_ID_162915

SEQ ID NO: 22235 - DNA, 3000 bp, Unknown; identical to SEQ ID NO: 3290
  misc_feature (1)..( 3000): 2750-1469P.txt file - cDNA_ID_2049619; gDNA_ID_2926204; Annot_ID_202065

SEQ ID NO: 22236 - DNA, 3003 bp, Unknown; identical to SEQ ID NO: 18969
  misc_feature (1)..( 3003): 2750-1469P.txt file - cDNA_ID_2049627; gDNA_ID_1620636; Annot_ID_162911

SEQ ID NO: 22237 - DNA, 3003 bp, Unknown; identical to SEQ ID NO: 18969
  misc_feature (1)..( 3003): 2750-1469P.txt file - cDNA_ID_2049627; gDNA_ID_2926204; Annot_ID_202061

SEQ ID NO: 22238 - DNA, 3003 bp, Unknown
  misc_feature (1)..( 3003): 2750-1469P.txt file - cDNA_ID_2049633; gDNA_ID_1620636; Annot_ID_47377
accgcgtttacagccatcgcctctgtttcttctctcttctattggttatcaccatatgcggtatatatgaagacgcagcttggtctatctgatccctttctttcacgctgctgctccaaatcgtttacaagaatccaaggattgctacttgtggcttgtgctatgacagttgtggcatggctcatctctggccattgggtgttgaacaatttgctcggaatctccatttgtattgcgtttgttagccatgttcgtcttcctaatatcaaaatctgtgcaatgctcctcgtgtgtctctttgtatatgacatattctgggttttcttctctgagagattctttggtgctaacgttatggtggccgtggcaacccagcaagcatcaaacccagttcacacagtggctaacagtttgaatcttcctggactgcaattgatcacaaagaaactggaactacctgttaaaattgtgtttcctcggaacctattgggcggtgtggtgcccggtgtgagtgcctcagatttcatgatgcttggtcttggtgacatggtacagactaatcccttctttgattttaagattggtatgtcgttatatgtgtactaactgtaagaaatgttctctctcagactatagtgacgaggagataaaaaaaacatgttgtattgattaactgttttgttgttccaggctatccctgcaatgcttttggctttggtcctctgctttgaccatcgaaaaactagagatgtggtgaatatttttgatctaaaatcttccaagggacacaaatacatttggtatgcacttcccggatatgccattggcttggtggcggctctagctgcaggtgtcttgacccactcacctcagccagctctactttatctggtaatattctcctcatgtgacttctttgttcctcttggtctaacatcaaaagtatatattctactacgtgtatttgtgcacaaccgatatcaacacttgattcaactgaaattttgttgatagaatctttgtagtctcaatccaatgattttaagagcttgatcagtgtgaagtatagtgagattatgatgtataatctgttttcgatgtggatatataggtaccatctacgttaggaccggtgatcttcatgtcatggcggagaaaggatcttgcggagctgtgggaaggacctgcattatctaatcccattgagaaatctcatgaaatagagatctgagtttattatatcaatcaagatgattcagaaatctaaaacatattacataaaacaaagacgcttagtaggaaaacatcagatcaagaattcttgtattcttaagttcccaaaaaaagaaaaaaaaaaaaaaaattggtcagaaagagagatgatgtcttatatccctcattttttttgcgttactcaaagggaggaaaaataaacaattaacaagttctttaattttttcttatgaatagagataccaatactaaaaaacgttggcttttgtaatgaagaagttttagtgataatataagttaaaattaaaagtgtgtaaccaattagtcttttttttttccgtcaaaaaaaagaaaaaaaaaaaaaagactaattggttacacacttttaattttaacatatattatcactaaaaccaattagtcaattacacaaatttagtaataatacatagggtctctaatatatattaagctttatataaactaatgaggaaatctgtaaaaatatacaaataagaatttccaaagtagatcctatgtaatttcgaagcgtattactgtgcataagacagtgttaaccaaaaaaaaaaaaaaacatttccgagatgaactgtgttttgtcctcaccggataagaaagtggaagaatgaaccactacaaagtccgcgtcgaaagcactcagttataaaagtaaaattgacatgcgattacattaaaaataccaaactcgcttgtccatttttattgatattgcttgctaatggaagccagctacatgtccgctttcttgtttgactttctttcttttctctttgagttctcttcaatattaatagatgcattttatgttttgcttcttctgagtagcatcgtgaatcaagtcgccattatcttattcagcactaatataattatatatagccagaatttctaaatttcaagaatgtagacaagttctagaaacgccgtccacagttccataaattctagctagttttctgtaatatttcacataacgattcatagacttttctgttcagacaaatatatactttgcaaaacagaacatcaagctcagtagctcacaaccaaaattctctgtccaaatttgaagtaacggaacctagtgtcttgctgggtttgagacttctcaatcaccatatagtcagaaatacctatgaataagattatcttgatgattttttaaaaaaagattttcttcgttaagcttttcttttgtaattagttataaaccttctcactttcaatgaaattcacattcatataagtttaaattttaaattaaaatattggtcagctatagactatagtaagtatattaaataataataacattttttgtggacaaagagaattcgggttttggggttttggcaaaggaaagaaatggtcatatgtggaacactacgtgccacttttcatgcaataacatgcaaatattaggtcagccactaggaatagaataagttgaatagttttttacgatgataagagtaagcgggaagccataatagaccactatcccaaaactttaatctgcttccaactcattatgggaccaactaatacaaaatgatatgtattccatgttccaaccactccaatacgaattacgaagcaagcgtgtctcagtgtctgagtgcgactgccttctctctatatataagagatatacatagtgaattaaacatcttaattatactgatctttatcatgttgactagatttaagaaacaaaataataagatg

SEQ ID NO: 22239 - DNA, 3003 bp, Unknown; identical to SEQ ID NO: 22238
  misc_feature (1)..( 3003): 2750-1469P.txt file - cDNA_ID_2049633; gDNA_ID_1620636; Annot_ID_162909

SEQ ID NO: 22240 - DNA, 3003 bp, Unknown; identical to SEQ ID NO: 22238
  misc_feature (1)..( 3003): 2750-1469P.txt file - cDNA_ID_2049633; gDNA_ID_2926204; Annot_ID_141650

SEQ ID NO: 22241 - DNA, 3003 bp, Unknown; identical to SEQ ID NO: 22238
  misc_feature (1)..( 3003): 2750-1469P.txt file - cDNA_ID_2049633; gDNA_ID_2926204; Annot_ID_202059

SEQ ID NO: 22242 - DNA, 3003 bp, Unknown; identical to SEQ ID NO: 17236
  misc_feature (1)..( 3003): 2750-1469P.txt file - cDNA_ID_2049637; gDNA_ID_1620636; Annot_ID_162908

SEQ ID NO: 22243 - DNA, 3003 bp, Unknown; identical to SEQ ID NO: 17236
  misc_feature (1)..( 3003): 2750-1469P.txt file - cDNA_ID_2049637; gDNA_ID_2926204; Annot_ID_202058

SEQ ID NO: 22244 - DNA, 3000 bp, Unknown; identical to SEQ ID NO: 3273
  misc_feature (1)..( 3000): 2750-1469P.txt file - cDNA_ID_2049665; gDNA_ID_1620636; Annot_ID_162896

SEQ ID NO: 22245 - DNA, 3000 bp, Unknown; identical to SEQ ID NO: 3273
  misc_feature (1)..( 3000): 2750-1469P.txt file - cDNA_ID_2049665; gDNA_ID_2926204; Annot_ID_202046

SEQ ID NO: 22246 - DNA, 3003 bp, Unknown; identical to SEQ ID NO: 17101
  misc_feature (1)..( 3003): 2750-1469P.txt file - cDNA_ID_2049708; gDNA_ID_1620642; Annot_ID_163070

SEQ ID NO: 22247 - DNA, 3003 bp, Unknown; identical to SEQ ID NO: 17101
  misc_feature (1)..( 3003): 2750-1469P.txt file - cDNA_ID_2049708; gDNA_ID_2926195; Annot_ID_201368

SEQ ID NO: 22248 - DNA, 3003 bp, Unknown; identical to SEQ ID NO: 19061
  misc_feature (1)..( 3003): 2750-1469P.txt file - cDNA_ID_2049714; gDNA_ID_1620642; Annot_ID_163065

SEQ ID NO: 22249 - DNA, 3003 bp, Unknown; identical to SEQ ID NO: 19061
  misc_feature (1)..( 3003): 2750-1469P.txt file - cDNA_ID_2049714; gDNA_ID_2926195; Annot_ID_201365

SEQ ID NO: 22250 - DNA, 3000 bp, Unknown; identical to SEQ ID NO: 3349
  misc_feature (1)..( 3000): 2750-1469P.txt file - cDNA_ID_2049722; gDNA_ID_1620642; Annot_ID_163054

SEQ ID NO: 22251 - DNA, 3000 bp, Unknown; identical to SEQ ID NO: 3349
  misc_feature (1)..( 3000): 2750-1469P.txt file - cDNA_ID_2049722; gDNA_ID_2926195; Annot_ID_201358

SEQ ID NO: 22252 - DNA, 3000 bp, Unknown; identical to SEQ ID NO: 3441
  misc_feature (1)..( 3000): 2750-1469P.txt file - cDNA_ID_2049737; gDNA_ID_1620646; Annot_ID_163254

SEQ ID NO: 22253 - DNA, 3003 bp, Unknown; identical to SEQ ID NO: 19129
  misc_feature (1)..( 3003): 2750-1469P.txt file - cDNA_ID_2049766; gDNA_ID_1620646; Annot_ID_163242

SEQ ID NO: 22254 - DNA, 3003 bp, Unknown; identical to SEQ ID NO: 19129
  misc_feature (1)..( 3003): 2750-1469P.txt file - cDNA_ID_2049766; gDNA_ID_2926179; Annot_ID_200086

SEQ ID NO: 22255 - DNA, 3000 bp, Unknown
  misc_feature (1)..( 3000): 2750-1469P.txt file - cDNA_ID_2049786; gDNA_ID_1620646; Annot_ID_163234
ctcgaatgttatcaaaatcatcaaatttatttggttatattattttcaagtaatttacacttataaacttttggttgaatttcgagcttgatttgcattattaacaatatgttttaactaaaactgaagagactttttcctaaagtcaacgtcatttttaaatcctttcacactttagaatattgtttgggaaatttcgtttacatgtaccaaattttttttcaaatattcaagtaaacataatgatatttttatttatcctaacgaaatacatttttcttattagctctagctattagattgagcaagctagtatttagttatttaccgattcggtgtaacaccttggattgcaaactatgtcataatagttggttatatacaatagcaaaacaaatattaaatttatcataagattctctgtctttttactctttttagatctcactcatcaaaaagtttacaattaattttatttaaagatgtttgggccttctttgggtcaagagtacatcgaccattgctccgtattgtccgcaagtgaaggtgttttgaaacgcggcgtgtgagctgtcaggaggtaagaatcacatgcttctgttaaatcttgaattgaatagttggaccgccggattaaatattgagctgaagtcaatgctattggacggtggagatcacagatcggagttatgaaggtgagggtgtaccgtggaaatgaagcggatgatacgagtttctgcgttttcacgtgcttgagtaccattctgcaccattagcaaagattgaagaaaaagacaaacaagaaaaagtctgttatttgaagtgtgatattatatatcataatggaaataaccaaaactcatgtatgtgtgaatgtataatgtgtcatgttttgtaatcataggtacattcgacaaaagcaagtctggttatgtcatcaatgagttccgataatttcggtagaaggaagtcagtcctttgaaaagtttgtgatttatgggttttaagcttaattagttgtaatggtgattattggttttttctttaagaatatgacaccaaccgaaacattttgttaaaaaataattataataatactaacaatttttgaaattattttagtttctttttttcacaactcatgaatgaacatttatccaacattttggactaactaggaatattattgtatattcgttacgtgtaggaaagttcctcattcctcaatgaatattaataatatacatattgccatgcaccgctttagttattacgacggaatcgacgggatcttcgttactaaatgcaattttagatctcaatcaatgctatctacttacgtgtttcttttccaacatcatcattctaacatgatttgatgaatccgtcatatgacaccaaaaacacatgtaatgatcatcaactgcttaatttctaaggatgttagcgtttgtttgggtgagttggcaacttttcctatggataaatcgtgatttgtcggaataaaaaagtggcaaaacatgtaaaagttattctagaatttgctatttggggggcttagcacttagcaatgtagtagtaatgtataagaatgaacgaaacattctttggaatgggccaattgattacctaatatataaggccacaattcacaaagaggccatgaaggccagtaatactctttttttgtctctctccacctattcctaataatgtatcctttggttctgtagtagcccaaatgcaatacaaacttacttatggatgaaataagttatcagatttacagtgatttactgtattagtgatctattaaaaattaaccatttatcgtgacccgtctagaaaaaagaaagttggttatttttcaatttcgtttaagataatactttagactatgcaatcacaatactatatacacaatggacggtcctatttgtaattaagcttattaatttatatatatttacattttttcaaaaactcaaatatgtaatttaatgattttacgctatatctagcatagtatatataagttatttcagtaaaagtttaaggcgtggtaaatacattgcatttgtatattaaaaaatcaaaatcaaaattaagcaaaaaaaattttgaagatggaattgtataaattaaatataaatactacactagtttagaattgtatagtgagaatgtgagagtaacctgtactatttatactttttttgtcttctgaattttatttggaaatatacatgatttttaaaatatttatactaagtaattacaaataatttgggtgagaaaacaaaaaagaaataggaaaagggtttactaacgccaaaaaacccaacccttgtctgcgttcttcatcagcgccgcgttctcaaagttgctctcacagtctccgatctccaattttatgtaagttctttctctcattccgattccaagtttcgtatcgatctctaagtagattcgtattaagctataagagattgatgaacctagttgctcccgtactcgagaggcttagatttggaatcgaaatcgattgtgatgatgtttagttaacgaaacccagtcactaaatccttgcgttgagcttatcaaaccctaattttagaggatttagatccatttgcatcacatttctgcgtagtaaatcaagaattagtctccaaagactcttcttttaacaacatttcaaccaatctgcgtttgatttgtaagaaatgttgtgtcaagttcactctcactatgatctctctttggattcaaagtttgtatctttttgcttctatgcatcaccaaatctctctttggattcaaagtttgtatctttttgcttctatgcatcactatcatataataccttccttcaattgatctcctctgcttttagctagcaagtttataggtttcttaacttattgtgagctaattggattacaatgagatattatcatctttaaagaattgtggttttgggcatatgcagaagttatg

SEQ ID NO: 22256 - DNA, 3003 bp, Unknown
  misc_feature (1)..( 3003): 2750-1469P.txt file - cDNA_ID_2049808; gDNA_ID_1620647; Annot_ID_163305
ttcttcttctccttttaccaatctttgtacagttgaagctgaagctcaatgaaggaagaagaagaagaagatattaaaattgagagagcgaaaaaacgaattgttcttttgtgatcaatcaaaagacttggtttctgtctgattctcaccttctcctccaagttatgcaaatattattctccattaattagtggaagttaattaattagtatgattttaattttaatttctgctttcgctttattttatttgtcttgaagattcgaagttaggttcctttttaaatgtgacgattagactctgaattgataatgtatttttgaacgagtaaacaatcaacgacaaattacaaatctgaatctaaaaatgtatcgacgctggtctcttcgaaacacgagatacaatatcaattaagatgtaaagtgagctgaattacacttccaacaggaacttcatctgtgtgtgcatcaacacttgcttgttgtgagctctagagagtcgacagcatttacataacagtaaaaactcctgttgaggaattacttatgtgcttcgacggccttagagtaaaactcccatgactcgtgtgtctcagttatggcagtttgaccgaatggattctccgctacaaacttctgaacgttctccgcatccgctaatctttctagatacttccttagctcaccctcaggccctgtctcaagaaataaaacatcagtgtgctattatgcttaccattttattgaaagagaatgatgagtgatttaagactaacccaatgcagaatcttgacggtttgtgtactggtacgggctagggaagattccagtgtgtggctaaaagagaggaagagcaataccaacggatgttgaggttaaaagtgacacattcaatgcataagcctattcaaaggtgctcgagtacacttacaggattacacaaggccttgtcgggtgaatcgtcaactagcaaagtgtttgtctcatcatactttcgctttccacaactgatgcatgtcccaatatggtcccatactcttcgtaggtccttgaggaacaaaggtttatccttcttctcctgagttttaaacttcgttgtagtgcatatattctgatcctgtgtccataagattcattagctagctggtttttggaccaactattagaatgagttctgctcatacgtaagctacatatctcatagtcaaagaaatgcaaagttcacaaagattgtagactgtgtttctacaatctcaatctcaactgcatttctcataatacagtccttctcatataggaactgcatttctcataatctactctcaaagtcaagaaaatagctcatagaggttgcagggatcacttacaaaacagaacaacagattcctcgcatggtttttcatgacaatgttgatcatataatccaacccactagtaagagaaaaaggagagacagagttaattgaggaattaaacttcgtatatgtataagacacctaactaagaagagtcaaagacaatgcattttgggttttgaatcagttcaagaagctcacacacgtctggaagaccatatcgcaacatcaaatctctcaaagcaaaagtcgagaaaactaggaagaaaaggcctcctgaagactataaaaggacaaagaaattactctgcagtaaaagaaacataaaacaacttacaagtagcgacgttgaaattgattctttcttacctgatctgtatgatactttaccatctggaagaaatgtacctgtaaaaccctgaacaatatctgcaaggattccatttaaatcaaatataaccaactttctggtacgttgagctttacatgtgcatctaggtacatctccagtttctgatgaaataactccttgagctacgttatcattttgtattaagacagaacttgacaatgacgtttcaagcttttccctgtcaaattctggttcttcatctttcctaggtaatgaaacatcatccttcccctccatatcatcagttttatgatctaaagaattttttttcctcttgctcttctttgttttgacctcaaccttgctaacaccttctgctcccaaatcattctgatcaacttcttcctttttttcatttttctttatactatcctcctccatattgtcagttttatgatctaacaaatttttcttcttcttgcttttctttgttgtcacctcaaccgtactaacaccttctgctcccttggcatcctgatcaacttctccctttctatcctttttcctttttttggtatttttatcatcttgaacgctttcccccttagttgcagaatcttcaatgttactagccaaatccttactggcaatctccccatcagcattcccttcataatttttcacaccttctccattcgattgatacaacaaagactgtactgactcactatccatggtggcaactgattcgcagtttgttttgttttttatcttcctcttctctcttttgtgaccatcatcactaacaccttctgcgtcgagtgcatcctgattagattcaatatttttatcttttgtcatttctttacgttttccagatttctgaactccacttttctctctcgttgcagatttttcaattttaattgtcatatcctctcccccgaactcttgtccagcattcccatcaaaattttgcatgtctttttcgtttgactgattcaacaaacactctactgatcctgatggctcaaagacctccatatctgcagatgaagttttcttcttctttcccttccgttttttgctccttacatcacatacacctgctccaagaacgtcctctttaacttcagtgttttcatctgtttccttctctttagtttttccgagattctgaataccgttttcctccccatttacataattttccgtctgacttgccgaataactaattaactctcggccaccattcccatcattattttccacacgctctactggcccgcttttcatg

SEQ ID NO: 22257 - DNA, 3000 bp, Unknown; identical to SEQ ID NO: 3147
  misc_feature (1)..( 3000): 2750-1469P.txt file - cDNA_ID_2049863; gDNA_ID_1620647; Annot_ID_163271

SEQ ID NO: 22258 - DNA, 3000 bp, Unknown; identical to SEQ ID NO: 3147
  misc_feature (1)..( 3000): 2750-1469P.txt file - cDNA_ID_2049863; gDNA_ID_1620628; Annot_ID_162579

SEQ ID NO: 22259 - DNA, 3000 bp, Unknown; identical to SEQ ID NO: 3147
  misc_feature (1)..( 3000): 2750-1469P.txt file - cDNA_ID_2049863; gDNA_ID_2926188; Annot_ID_200788

SEQ ID NO: 22260 - DNA, 1600 bp, Unknown
  misc_feature (1)..( 1600): 2750-1469P.txt file - cDNA_ID_2049871; gDNA_ID_1620699; Annot_ID_165018
cttaaagctctgttttccccaaagctatatgtgatgggtattacaaatagcaagcatacttttcatttccatacatctaaattgagaatataccaattattgtccttttgggtggtcattggagtttattcattaagattttgcagttttttttttccaaacctttgatcattttttaaatgatactattatattattttctcaatcaaattattttaagataaatatcaacttatcgtttaatagtaatgtgtatataatgtaataattgattttaatgttgaaaaatagtatttctaggtttccaaactaaattaaaatgaaagtacaaatgtttgataattttacggtgtattttctgtaggattttggtgttatatccacataatctatctataattaataaaatatatacaagtaaaccgttgaaagtttggaagcttaatccatattttgaccatgttttgtagtactaggctagccgtctttattaaaaaaagtaccgcgtaactacatctagttcaaatttggtaatctctaatatgaggttctaaattagcaaaatcatattttaaagaatttataacatttagccatatttgtcttaggttccaaataatacatagttccaaaggcaaataaactgtcttttatggtttagaaagatttctgccttgagagtaaacttcttaaaataaggttaattccaagagatttgattccagtttatttctaggaataacacaaagaaataatcatttttggtaaacaagataatcagaactcaaacggaaagaaatatgtcagtctgtcaaatccattaagaaaattgatattcacttctactctatttagaaggcacgtcaataattcagaaaaataaaccaagtgcatgcgataatgcaaaagaacacataaatccaaaatatcacaaggttacaaagtcaacttctaaaacttcatattttcttcacacgcttctctttacatttatacacaaagtacgaattaccttttgaaataagttgctaggtacttaatatttataagaaaaacaaaacaaaaaactttgggttgaaatgggaatgttcgttgaataaataagaaaaaaatcgagaaagcaaaagtaggaatggttgatgataagtcactccattcacaaacaatttgagctgtcaataatgtgattttccaaaatctcttttggtaccacaatgttttaaatcattggacatcggaatcaatttattgtattatagtatcgtagtatacaaaagaagttggcttcttctgtttttttttggctctgcagttttcaaatccattgttttaaaataaaacataattcgacttcataattataatcaaagtgttaatctttgaattttaataatctaatattagtggtaccatattgacaagaaggagacaatgtcacagaaacttacctcaggagtcaaaacagaagaattgaaaagaaaaaagaagaaataaaaattggatttttatatttgtttcgaccactatcaactctttctctctcttacaaggagcgaaagagaaacactttccgacttgggtaaggaaaaagagtttgatg

SEQ ID NO: 22261 - DNA, 3003 bp, Unknown; identical to SEQ ID NO: 19306
  misc_feature (1)..( 3003): 2750-1469P.txt file - cDNA_ID_2049871; gDNA_ID_1620655; Annot_ID_163646

SEQ ID NO: 22262 - DNA, 3000 bp, Unknown; identical to SEQ ID NO: 19307
  misc_feature (1)..( 3000): 2750-1469P.txt file - cDNA_ID_2049871; gDNA_ID_2926209; Annot_ID_202452

SEQ ID NO: 22263 - DNA, 3003 bp, Unknown
  misc_feature (1)..( 3003): 2750-1469P.txt file - cDNA_ID_2049893; gDNA_ID_1620655; Annot_ID_163639
aatcttttcagattcaacccaaaattgaagacaaaaatgtctcgcagatcgctaactctcctcaagaatctagctagaaacgcgaatggatcaggtattcaaacccgatccgtgacttacatgcccagacccggtgacggagcaccacgcgcagtgacgctgatccccggagatggaatcggtcctctggtgacgaacgccgtggaacaggtgatggaagcgatgcacgctccgatcttcttcgagaagtacgatgttcacggagaaatgagccgtgtgccgccggaagtgatggagtcgataaggaagaataaggtttgtttgaaaggtgggcttaagactcctgttggtggtggtgttagttctcttaacgtccagcttaggaaagagcttgacctctttgcttctctggtcaactgttttaatttgcctggtttacctactcgccatgagaatgttgacatcgttgtcatcagagagaacactgaaggtgagtacgcggggcttgagcacgaggttgttcctggtgtcgttgagagtctgaaggtgagaattccgatttctgctcctcgttttggattcaatctgtatttgtggaatcatcttcgtttgcaagtggtctttgtatgttatgtgtgattgttctgatcctatttctatgcttaggtgatcacgaagttctgttcggagcgtattgcaaagtatgcttttgagtatgcctacctgaacaacaggaagaaagttacagcggtgcataaggctaacatcatgaaacttgcggatggtttgttcttggaatcttgtcgcgaggttgcgaaaaagtatcccagcatcacctacaatgaaatcattgttgataactgctgtatgcaacttgtagccaaaccagagcaattcgatgtcatggtatgtttcagagttatatacatatgaattttcatgacgttctttaagtcttcgatgttttactttgagaaaaagataccagtcatctctccctagtttggtatccctctagattgcctgttttagagtcatattatcttattggtatgagactgatgttgtgttgccatatactatagttaatcgccccatttgcatactatttaatctcgtcatttgcatatcatgctttcagggaatcttttaaattgtacttctgtgaccttgtctatgtatacttactactttgcatacactattgttcgttagagcagtaacttcactgttgctaagtattaacctttcattactgtatgtagtagcgtcttttggcttttccccccttttataacagcaatttatgaaatgttttgcaggtaacgccgaatctctatgggaatttagttgcaaacactgctgctggtattgctggaggcacaggagtcatgcctggaggtaaaaaaacatcctgtattgatattctctcgagctatacattagtggataaagaatagttctaaaatttatacatctgcgacattaaatacaaaaacaggaaatgttggggctgaccatgcggtattcgagcaaggtgcatcagcaggaaatgttgggaaagacaagatagtattggaaaacaaagcaaacccagtggcattgcttctctcatcagcgatgatgcttagacaccttcagtttccttcatttgctgaccggctcgaaacagcagtgaagaaagtcatcgctgaaggaaagtgccggacgaaagatcttggtggaacaagcacgactcaagaggtcgttgatgcggtcattgcaaaactagactgactttgacaaattacgtgttcccgctctgcataaatcatcaaattcctgatacagattttgtgttgccaaaatatggggtatgatccaagcacaacggttatctggttttgtacctcgagttttattatattctttagccgtggaatatttcgataagaaaaaaaaacatgttccaaataattcatgttgctacgtttgttggcgccttttgtcatgtcaaagtttcttaaacacttgttcgtggaatatgcaaacttttatggattcgtaatttcaagaatatgaatgaaaaattgatggtatctttgatcacctcgaatggtggtttcttaagagcatccacattggttaatttttgatggatgtttttaaatataaaactttattttaagaggtttttgagtagttaagaaactctaacgtgtcattgtgtgtgtggttgaacattgtgacaacatcatttatttatttttcttttcgcgtttttctctcttttttagtccatatgatttttaatatatatatcatatttgtttaaaattttaatatttgtattatttattaagttttataaaataaaatataaataatttttattttaataataatatatttttttaaaagacccacttaaacattagaccaaaaaaaattaatggtccaacaaaaacactttaattttttataatttaaaattttaaaaaacccttttaagggctcaaccattggggttgctcttactccaagtctttaatttaatttgtgaattaacattgactaattttaaaatcacttgaaattgtttcatcggatttgggatgtcacatttggtacccggcaagttcgaaaatgacttttaaactttgacacctcttgcctcttggtagagttttggatgaggcttgaaacttttgtattgcagcccataactgaaaatagtttattagtataatatatcttctcaacaaacattgcaaatattttgaaaatccagctaaaactatacccgatcagaattagaaaatttgagcccaagcccggcccgtaagtattattatagaaaccgatataaagtttcctttttcttaataatatttattccgtggcagcaaatgcaagccaatccaatgtcaaaacaccagctgacgtggccaaacgcacatcaactgtcgtctctctatctctctctccctcacttgtctctctctcttctcttcgacactgatg

SEQ ID NO: 22264 - DNA, 3000 bp, Unknown; identical to SEQ ID NO: 3661
  misc_feature (1)..( 3000): 2750-1469P.txt file - cDNA_ID_2049939; gDNA_ID_1620655; Annot_ID_163620

SEQ ID NO: 22265 - DNA, 3003 bp, Unknown; identical to SEQ ID NO: 19321
  misc_feature (1)..( 3003): 2750-1469P.txt file - cDNA_ID_2049939; gDNA_ID_2926209; Annot_ID_202470

SEQ ID NO: 22266 - DNA, 3000 bp, Unknown; identical to SEQ ID NO: 3694
  misc_feature (1)..( 3000): 2750-1469P.txt file - cDNA_ID_2049986; gDNA_ID_1620656; Annot_ID_163673

SEQ ID NO: 22267 - DNA, 3000 bp, Unknown; identical to SEQ ID NO: 3694
  misc_feature (1)..( 3000): 2750-1469P.txt file - cDNA_ID_2049986; gDNA_ID_2926211; Annot_ID_202614

SEQ ID NO: 22268 - DNA, 3003 bp, Unknown; identical to SEQ ID NO: 19333
  misc_feature (1)..( 3003): 2750-1469P.txt file - cDNA_ID_2049991; gDNA_ID_1620656; Annot_ID_163672

SEQ ID NO: 22269 - DNA, 3003 bp, Unknown; identical to SEQ ID NO: 19333
  misc_feature (1)..( 3003): 2750-1469P.txt file - cDNA_ID_2049991; gDNA_ID_2926211; Annot_ID_202613

SEQ ID NO: 22270 - DNA, 3003 bp, Unknown
  misc_feature (1)..( 3003): 2750-1469P.txt file - cDNA_ID_2050038; gDNA_ID_1971822; Annot_ID_58346
acaaaagaaagaagtaggtccattatcaaactccgagtgaatattgatgatgccaccgccaaaacagttcactaatacatcttctgttgcttcactttccttcttttaataccttctctaaaccacccaattttctttcttttttcatattccaagatttggatttgagtttctctttttggaaattcctcttaaatcgaatatataataatgtcacaaaattaggactagatacaaaaaaaaaatcattgtgaaaactaaaaaagcaaagcatatcaaatatatctcttgaagctagttggcataatattctctgagttatcgaatattctatatatgtaaatggccagtttgacaattacctaaaatcatatgatagacataaataattctacaaatttttaaaataaatttaaactaaaagacaataaaattaccattatgttcacatttagtaaatatttcatggacgaatttctccacgtcgattttcgaaatctcataattttccggcgccggaatatacggtggtcgtgataccttaagcaccaaatcccaatccaaccctttaaagaaatcatgtcccttgattccttcaacattaatcctacggctaggatctttctccaacagttttcttaccaagtctcttaacgatgtcgtttctccgaccaaactcggcggttcagttaatatctttaaaaaagtctctttacggttggaccccctaaacggcgtcgctccgtacaacatctcatacaaaaccactcccaacgaccaccaatccacggcgaagtcatggccacttccggtgattacctccggcgcaacatattcctctgttccaacaaacgagttcgacttctctcctgaaaactccgactcggaggatctcgaaaccgagtcgtccggggagattccggagttacataaaccggaaaatgcgaagatagacctttctttcttcgtcgccgtcgaaagtctcggtgacgacgaaaaagaagattgtggagttctaggaggtagattcgtcgaaagatcaaaatcaacaagcatcagatgaccattctcttgaatcatcacattatcaggcttcaaatctctgtacacaattccttgattatgcaaatactcaagtgcaatcacaagctccgccgcgtaaaatctaatgatctcatcggaaaacatttcttccgactgttttttccttaaagagttgagatctcttccaggacagtaatcaatcgcgtaaccgataactttatcggtggatataacaccatgaagacgtggaaacagaggatggtcgaatcgagacaacactccttgttcgaaacttatgcgtttgtactcatctttggccttctttgactcgattgattctcttagtatgacttttaaagcaagccatttgttatcggcttttactaagaacacaactcctttagatccacgtccaagggctgagaaaatctctagatggtcgaagttgagagtcgggatcttgttctccggtggtaagaggtggttgctcatcgctcaagagtttatttttgatttttttttatggttcaatattcttttggttgtctttaaagcagtttttataagagagaaggggttaagcttttctaaaggtaggtccgtatagattttgtttccttgccgggaaagacttgaataaacgttttaaccaaaaaagaaaaatgcaaaagatttacgtagtaagacacggattacttttaccattttactccttctcgaatcaccattactaagcatcaaatattttcagtcatttcaaacatcagtttttgcgtttatatttgagtaaaattgaaaattttccatagagatacacaactatttagcgcaacatacaataacattttccaaatagaagaaaaaagaaaaaatttacttgtttcttaacgttcctactcaatacacaaactaacaaacaagttaaaacgagtaaagattcttggcgaaaacaacaacaaataatgattcaatattttaaaataacacataaacagttggtctaaatttataaataatctctaaaaaatatcataaaaatcacatggtttcattctcatatacaaagacagtaagaagattttctttttttccgaagtggtcttcaatgaatatcgagttagaaaatggatttttttttcctactaattacttacaaaattttgatgaaaaaatagagtagacgaaatttggtagaaaatttcttgcgaaaagatacaagaaattcactaccaatttatgtaacatttggtaggcaattcagaagaatcaaactagattcatgacatatggggagaaatgcaagaaacaaaaacaaccgaggatgagtcttatgctcttagctaaaaacatttatttagattttaggtgtggttgcgacaaccaaaaaaaaaaatacattacaaacgattgacgtgctgagcgagaaattaagaagtcgagtccctaaacccgtaggaaccaaccatatatggtgagaccactgtggaatctgccagacaacacccaagcatattaaccataaccacagtggctgagcaggaaactgtttgactggtaatgactcattaacagaaaaattaacattgcagaaaaaaaagttataataaggtaaatggatcgtcccaagatcattattggataattaaaatcactggccagtggaattaaagcccaaacaagcccatgataactcaaaactagatcaaccagtaatggcccatgatgtcgtacttgaggtgacgtggcaaattctgaattcgcgcaccggtagattcttttctttttccgtataacacctttcaatacttgaggtgacgtggcaaattcacaaccactttttatatgatataccgcttttaccccttaagcctctccgcgtaaaaccgagaacaaaatcttaagcaccgttgttccgattcagagatcatcgtcgtcgtcgttcagaaaccttcaaaaatg

SEQ ID NO: 22271 - DNA, 3003 bp, Unknown; identical to SEQ ID NO: 22270
  misc_feature (1)..( 3003): 2750-1469P.txt file - cDNA_ID_2050038; gDNA_ID_1971822; Annot_ID_176216

SEQ ID NO: 22272 - DNA, 3003 bp, Unknown; identical to SEQ ID NO: 22270
  misc_feature (1)..( 3003): 2750-1469P.txt file - cDNA_ID_2050038; gDNA_ID_2926156; Annot_ID_139527

SEQ ID NO: 22273 - DNA, 3003 bp, Unknown; identical to SEQ ID NO: 22270
  misc_feature (1)..( 3003): 2750-1469P.txt file - cDNA_ID_2050038; gDNA_ID_2926156; Annot_ID_198422

SEQ ID NO: 22274 - DNA, 3003 bp, Unknown; identical to SEQ ID NO: 19459
  misc_feature (1)..( 3003): 2750-1469P.txt file - cDNA_ID_2050088; gDNA_ID_1620665; Annot_ID_163911

SEQ ID NO: 22275 - DNA, 3003 bp, Unknown; identical to SEQ ID NO: 19459
  misc_feature (1)..( 3003): 2750-1469P.txt file - cDNA_ID_2050088; gDNA_ID_2926196; Annot_ID_201494

SEQ ID NO: 22276 - DNA, 301 bp, Unknown
  misc_feature (1)..( 301): 2750-1469P.txt file - cDNA_ID_2050137; gDNA_ID_1620665; Annot_ID_163890
gaattcataattggatttgctcatagtttagtgagttcttctatatagattacacaataatgattgtattatccgtgtttaccaatataattttagtgaaaaatgcaatgtaaagttttactgagaaatgagaagaattgagtcaccaagctgatggtacatactacataagatagactactaagaattttacattgaccagtagaaatcttcaaatctctataaagtggcccaaaataaaaacgatttaaaattgcataaacgatgttgttgtttaagccttcaacattggcaaatgatg

SEQ ID NO: 22277 - DNA, 3000 bp, Unknown; identical to SEQ ID NO: 3835
  misc_feature (1)..( 3000): 2750-1469P.txt file - cDNA_ID_2050294; gDNA_ID_1620669; Annot_ID_164025

SEQ ID NO: 22278 - DNA, 3000 bp, Unknown; identical to SEQ ID NO: 3835
  misc_feature (1)..( 3000): 2750-1469P.txt file - cDNA_ID_2050294; gDNA_ID_2926170; Annot_ID_199452

SEQ ID NO: 22279 - DNA, 3000 bp, Unknown; identical to SEQ ID NO: 3834
  misc_feature (1)..( 3000): 2750-1469P.txt file - cDNA_ID_2050298; gDNA_ID_1620669; Annot_ID_164024

SEQ ID NO: 22280 - DNA, 3003 bp, Unknown
  misc_feature (1)..( 3003): 2750-1469P.txt file - cDNA_ID_2050324; gDNA_ID_1620669; Annot_ID_164012
attgtaagctcaaactcgtctcttagcatttgtagcatcttcctaactcccgcttctccatccgctgcaagcgagaacaagctcggcctcccgacctaacggaacaagtaattaatcacatgtcctttggatatttatatgatcagtgataatactcatatgcagcaacgggacacacatttgtttcattgtttggcttcatttcgacaaattaaaaacaacttaataaaacagaggatatatttgggtttgttttgaaaatttagaagtttggtgcaaaatgttaacaatttgtaaaaatcaagaagagataatcaaggttattgcaatgaaactgaaaatgaaaggagcgatttgaaaaccgtgagagaaaacaggggaaatgacaagagctaagtgtatatgatgaatgaacttacaaagacacctgaagcgccaagagccaatgccttaaagacatcggttccacggcgaaccccaccgtcaagaaaaaccggaatccgaccctccacggctttaaccacctgcgatttgtgtttgcttgattaatcaatgaagaaagctgaaactttttgttttaacagttttaaatcttgatccatttaaaagtttacctcttctaaggccactatagttgcaggaacataatctagctgacgagctccgtggttagagactattatccctgcagctccatattcaacagcaattcttgctgccaaaaatttgaatgatcatagaaattatcttaaaacataatgaaaacttcaagcaaaaggttgatgcatattctcattcttagtatatttgttttaccatcctcagctgtaataacacccttgacaagaattggcaagcttgtgatagattggagccattttatatcctgtaagaagaaaacaaacagcgaaaagaagcgagtttactatgtttctgaatcttggtatgcaaaaacaaagaattgatcatgttacattttctgaccttccagctaagtgattgatcaacttgaccagcaacatatgaagctagccctgagtcattcgtctgcaattatccaccaaaaaaggttagttaactattgagcttttaggtcaattgaagactttgttatatgtcttttgaccttgtctattttcccaagatccaacccttcgaagttcttcaacgttagacctcgaggaagcgcgaatctgcaagagaataactatcaagaaaaccaaaagatctaacaatctggtttatgtgatggtggagtagtttcatatcacctgtttttgatgtcagattctctgcgtccaagccttggagtatctacagtaagagcaatagctttgaatccagcttcttcagctcgtttcacaagctgtataaccacatttctatccttataaacctgaatcaagagagcaaatagtcaacacagagccaaaaaatcaataagaaacaagtaaatcttctgaaacatacataaagttggaaaaaacgaatccctggtccggttgaagcaacttcctcaacactacaagtagcccatgaagataaagtctgaaaacatcaaacaatacagataatgaaaacacaacaataagagaatatccaatcaagtaaaagagacagagagaatgaatcaaaaccatgattgttccagcagcagaagtagctctcgcggttgcaagctcgcctacaacaataacaaaaacattctccatagtgaaactaaagttttcttcttgacaagaaacctcaagattgtgttttggttacactgatcattacataacactaaagacttaccatcaggatgagccattttctgcattgcagtaggagcaatcataattggcatagaaatattaaaccctaaaaccgttgtgctcacatcaatcttgcttacatcgataagaatccgaggcctaaatctgtttccagctcataacacaagcacatcaataaaaagacagagaaaggataaaaacacattttgagtccttgttgtgaatagtttcacttacagaatcctagagaaagcgtttcgattctcttgaagagtccattgatcttcagcaccagatgcatagtaatcataaaccatctttggtaatttctcctttgcgatcttctcatattccatcacgtttgttatctccatttttatttactcaacactcaaaaaaattcctgtgacagataaatacacattttcatcatcaaaatcactttttaaaacccttgaattcaagaatgaagaatcaggaacaaaaaacgacactgacactaaaaaaagtcaattagcagactaataaaatctgccccggctcagattctataatcacaggatcgtcactcgttgagtttgatattgatgaaaatctaacaatcagataaacaagcatcgacgagaaaagtaacagagagcttcttacctagaggcctagagagacttggtcttctcgggaaggtggcgaagaataagaatataagaacaaaacaaaatgttgatcgagtactcttaatataatatagacactcataactaagtcacaaagaaacatacgtctctgtgactgtgtaaataattgtcagtgattgtcacgtgatggatcacgtgaaacacaagctcaccagacaccagggcttttcatttgttacaacaacatgcatagtttaagacccattattctcaaataagatggaccagattagtcatttgtgatttggctccaattttatgatttataaaagagttgggagtccacaaaatattggttatattgtgagtgggtaatggatgttgttcagaggatcaggtagttagtactctgctgttttaaaatccaatagactttggttaacaaattgtttaaatcacaaaaccatttacggttcgaccgaaagaaccgaattttattctctctgccttatcacctctgagtggaaaaaattgagtgagcgccattgtaggagagcttcgggaaagaagaagaagaagaagaagccatg

SEQ ID NO: 22281 - DNA, 3003 bp, Unknown; identical to SEQ ID NO: 22280
  misc_feature (1)..( 3003): 2750-1469P.txt file - cDNA_ID_2050324; gDNA_ID_2926170; Annot_ID_199439

SEQ ID NO: 22282 - DNA, 3000 bp, Unknown; identical to SEQ ID NO: 3858
  misc_feature (1)..( 3000): 2750-1469P.txt file - cDNA_ID_2050395; gDNA_ID_1620670; Annot_ID_164068

SEQ ID NO: 22283 - DNA, 3003 bp, Unknown; identical to SEQ ID NO: 19620
  misc_feature (1)..( 3003): 2750-1469P.txt file - cDNA_ID_2050425; gDNA_ID_1620679; Annot_ID_164371

SEQ ID NO: 22284 - DNA, 3003 bp, Unknown; identical to SEQ ID NO: 19631
  misc_feature (1)..( 3003): 2750-1469P.txt file - cDNA_ID_2050441; gDNA_ID_1620679; Annot_ID_164364

SEQ ID NO: 22285 - DNA, 3000 bp, Unknown; identical to SEQ ID NO: 1165
  misc_feature (1)..( 3000): 2750-1469P.txt file - cDNA_ID_2050499; gDNA_ID_1620366; Annot_ID_154838

SEQ ID NO: 22286 - DNA, 3003 bp, Unknown
  misc_feature (1)..( 3003): 2750-1469P.txt file - cDNA_ID_2050499; gDNA_ID_1620680; Annot_ID_164416
atgttctgaacattatatttattaccactcgtaagtcactttccatttgcaggatttacttatacctaatggtgtcagattgagtttgtgtctcttttacaacagtatcgcaccttctacatccaatagacaactaatgaaagctagaatcaatcaaaacagatttacactagaaagaaaaggatgataccacattgaaaaattgatgaatgtatgaacaggatggtaacaatttaacttagaatcgaaattttggtatgaaatcctctgaagtctgaagagttttaggtttagttgaaaattagagtactgtagtagtttgagatcctctagacgaagcagaaggttccatcaaattctatttgtttcgcgggccaacccgcaagcccgatattttatggacatatgtagagttcaagcccgccctgtgatgatgcttattggggcaagctggtgggtttgtgggccgcttgacaaaagaacattaaaaaaagacaaatttgatggacaatcatgattgttgtggttagtatacatacttttgaggatcggatcatgcaatgagtgaattcttcactttaattaaactcatcagattctctcacagtaacaactaacaaacaaaggaaacaaactcatgaaaagccatccaaggaaaaaaggaaatctttatgtgaccgttaagtgtttcttgtcaaatattatgtgaccgttaagtttatcttgtcaaatattatgtgattgtgaccgttgttaattgtgattagcaatttccttgtttcttttgaacctctttgctccccttataaataaatagatgagagacgctctcacgcagtctcaacaacgcttcttctaattcttccttgagagacaaatcaaaactctctctatttctttctttctcatcttcttccttcagagacaaatcaaaactctctctttatacataaactctgtggattccgatcgatgatgatgatccaagtagaagccgacgacgatgatccaagcaaaagccgatgcaacatccgtaagatttcagactgatcggagccgaaattaaagcatatcatcgtttcatagattgaatgataatctccttcaatccacggccgtcgtctaccgtccaaaacaaaatagatttcagttcaccggataatgatctagccaccgagatgctttcaccggagacaacgaggaactaagaggatggcgaaagaaaacacgaagacgctctcgtttgtggtttcaagtttcagaacaagcacgagtcgccgcctgagtatatcacgacttttaggtatattactttactaccctttttcttttttaataaagattatgattttgattttaaaaagaaaaaaaagattttatgtttttccgttctgatttttctgatttaaaactaatcacaaggttttcacaaatatttttttaaataaattgttttaatttttgtttttaatagattttttagtgttaaattttaaatatgtgtaaactattagatacattatcccgtccataatatgaggtctttaagaggtgttttaggtttaatatgttttgcacatataaatttttaacacttattctttttatttaaaattgtttttaaatttgtattttatgcactatttaatttttgttttgatttttaagtaatattttagataaaatgttttattttttaaaatatacataatatttttgtttttaagtgttaaattttaaatatgtgtaaactaattggacacaacatcccgtccatagtatgaggtcttttagaggtgttctaggttcaatatgttttacacatataaatttttaacacttatgtttttatttaaaaattaaattactactattttaaggttttcgattttttaactaatattttagataaaaatattttttatttttaaatatataatatttttgcttttaaatgttaaaatttaaatatgtgtaaactagttggacataacatcttgtccatagtaagaggtacttaagaggtgttctaggttcaataaattttatacatatataaattttaacacttatgattttatttaaaaatatatatattttttttaataccactattttaaggtttttgatttttaaagtaatattttaaatatatattatatttatgtttttaagtattaaaatttaaatactgtatgtgtaaactaattggacataacatcccgtcgatagtatgaggtccttaagaggtgttttaggttcaacatgttttacacataaataaatattgtaacacttatatttttattgatttgttttttaaaaatttgtatatttttaatacacattgtgttctaggttcatagtaaaaggtgattaaaaggtgttctaggttcaacatgttttacacatataaattttaaacacttataattttatttaaacatattttaaaatttatattttataccactattttaaggtttttgattttttaagtaaaattttatatttttaaatatataatattttaaaacaaaaatattaaaatttaaatatatgtaaactagttgaacataatattcggttcatagtatgaggtctttaaacacttaagaaaattaacttactatgttttttttatgtatttttgggttacttttatttaataaattatggggtcttccctctctcgaccaaaaaaaaaaaacattgtaaggtgagttttgagagtaacaataatattggggtatatttttaaaaatattgtagtggtaaataccgaatttccatatagtttctgtgtggcttatatttgtccttttatagggtgcaattttagagtaaagatagtatctaggtttaatgttaaagattctaataatgatggggcgttttcgtgttttctatttatttaagctccatttattattaccggctgttttctattttgtcgttcccggtaaattttgccggcgaagattgaaacttttccaaacgatg

SEQ ID NO: 22287 - DNA, 3000 bp, Unknown; identical to SEQ ID NO: 4035
  misc_feature (1)..( 3000): 2750-1469P.txt file - cDNA_ID_2050510; gDNA_ID_1620680; Annot_ID_164403

SEQ ID NO: 22288 - DNA, 3000 bp, Unknown; identical to SEQ ID NO: 3725
  misc_feature (1)..( 3000): 2750-1469P.txt file - cDNA_ID_2050676; gDNA_ID_2926149; Annot_ID_197923

SEQ ID NO: 22289 - DNA, 3000 bp, Unknown; identical to SEQ ID NO: 3725
  misc_feature (1)..( 3000): 2750-1469P.txt file - cDNA_ID_2050676; gDNA_ID_2926149; Annot_ID_139219

SEQ ID NO: 22290 - DNA, 3000 bp, Unknown; identical to SEQ ID NO: 3725
  misc_feature (1)..( 3000): 2750-1469P.txt file - cDNA_ID_2050676; gDNA_ID_1620659; Annot_ID_47931

SEQ ID NO: 22291 - DNA, 3000 bp, Unknown; identical to SEQ ID NO: 3725
  misc_feature (1)..( 3000): 2750-1469P.txt file - cDNA_ID_2050676; gDNA_ID_1620685; Annot_ID_164564

SEQ ID NO: 22292 - DNA, 3000 bp, Unknown; identical to SEQ ID NO: 3725
  misc_feature (1)..( 3000): 2750-1469P.txt file - cDNA_ID_2050676; gDNA_ID_1620659; Annot_ID_163760

SEQ ID NO: 22293 - DNA, 3003 bp, Unknown
  misc_feature (1)..( 3003): 2750-1469P.txt file - cDNA_ID_2050748; gDNA_ID_1620689; Annot_ID_164715
tatatgaaaatgataatcctaagcggcgtggtctaacccacacatttctcttgcgatccagtgaaaaaaaaataaaagtttcgattatcacgtaaaatttacattgtgaaatatatcgagtttctatgaacttatcgttgtctcaagaactgatgattaatgattgtgtaatgattattatttcgtggaccaacaaatttttcattatcttaataattagtgcctattattatactgatttatttccggaaacgaaattttatttgtttcgaaatgagacatatgaaaataatgttatgggattcctgaattacgtggctcgaagtaaattttgctcatctagggtttgatgcttaattatactgtagtgatttagaataatctatttcacatttttcactcagctctattgtctgagaaattttataccacatttattacaactatatatatttatcaacttaaatctaaaatctatacatcaatgttgtccggaatataacatatacataatacatgatgaattatagtattatactatagttgtttgttatgcatgtattattcaaagattcgaaattagtgatactatatatatgtacatcagtacatggtcgagagtttgttagatgatattcactgcaaatctacactaaatattcatgtgaaaataattttacaaaacgcaggtagagtgttacatgttaaacgagtacgcttaaactagtgcgtacattgcagagtaaagaagttggacaaaaactgcatagcataaaggaagcaaataaaaaatgaagggaaagacaagacataacaaacgggtacatggttcacataccctgcgatcagattgtttcgttctttggtaatgtagcatgggcttccaatatcttctctatgcaaattatattattatatcagtacgtttttaaacatttctgtaatcaaaactcaaaaataataattcaatatatatgaaaactagttgtacgaaatacaaagtgttacccgatcgtgtcaaaatcaaaaacatttcaatcatgattaggaaacttaactcaaccatacgttacataggaaagtagatgctgcatagttgaccattggtcaaagtgtttaacacttttaaagatttttaacttaatagagaaagtaaatttttattctctaattaattagaaatgccaaatatgcttgtctttaaaaattgtcagtaaattaaagtcactctgttattatacattttatagtcacataaaatctgcaagcaaataacagaaaattatcaagtactcctaatcataattaagaagtagtaatacaatgattccaaaaaaaattactgtacttttttttaatgtgtgtgtgtggcgcaacgtcctagattgttgtctgccacgttagccagcaccagctgtaataactaaaaagtggcaaggttatgactggtaaaggttaaaacagtaaagaactacgagccgtaacggtctcttgtctttcttctttttcacaacgcaacttgcttaggtgaaagtacgatactatccctgtggtgaaaaagagaacttcgcacggaggttatgagattaatcacctgctgttaattataaattattggttctggtcaaaagtaagactggaccgtgtctccggtgtcacgtgacctgaatctccaattacgaggaaattttaaaaaatgattatagaagtaattagtattagtaatacatatgtttttctctttgtcagctgccccatggaaaggcacgtcccagccgttggattggacccaattctgtaattacacgtgtcgatatctcaatcgtttgacttatgcggcattttggttttgccaagctcgttttttccggctataattagtttttgctaaaaatcagtcaaaaattaagatttcattctaattttaaaaagacaaatttccttggtcggcactaatatctaattatcgaccattaatgtcatgattcttatttgcgttacaataattactgtcgacacttgttgtagttcttagtttttgttttttatctagttttgtctctaaatttcaatttcaattaagtgtacatttggactgtaacaagcatagttttgacaattgtctttcattcatttcatcatttgacatcaccaatgaaaagttaaaaatctcttaacactaattatgaaatgtctttcatattcttgtacatatatataaaacactaaactcaaagtgtttagcaaataaaaaagaatttagatacaaatgaatcttgtccacctcccttaaacagaaagaaatatctttgtcaaaagttttttttataagatattcgaaaattaaattaaataccaaaaaagaaagaaaggagtaaacactaataatatgagacgtttcaaagatcctataaaatagtcactctctaccattacatgtgctctgccgcttttaaatctctcatcttcttcctcgtgtcactctttctctcacactctgcaaaaacattttcttgtctctcctctgcccaaattttttttctttccaggaatatttcctagaaaaacccaagcaaagctttaaccccttcctcctccaaaagtagcatcttcctctttttctatttctcctttcctcttcttatctctctctcgtttgtgaacgattccttaagaatataaccaaaagcccttttctcctttcttcaactttccgggaaaaatcttcacgcagcaaggtttctctctcggctctcgcagtgtttttcgtgccttttgttctttctataaaaaaaaaattcgcgtcctttaagaaaactttttccacctagagaagaagaagagtatcactcttgttgttcaagtttctctctttaataaaaaatccatctttattctttgtcttctttcctttttgctttccctaatctctatgttataaacacacagagagaaacaaagtcacagtctcgagtcaaaaacagagaatacgaaagaaaaatg

SEQ ID NO: 22294 - DNA, 3000 bp, Unknown; identical to SEQ ID NO: 4233
  misc_feature (1)..( 3000): 2750-1469P.txt file - cDNA_ID_2050799; gDNA_ID_1620691; Annot_ID_164792

SEQ ID NO: 22295 - DNA, 3000 bp, Unknown; identical to SEQ ID NO: 4233
  misc_feature (1)..( 3000): 2750-1469P.txt file - cDNA_ID_2050799; gDNA_ID_2926159; Annot_ID_198638

SEQ ID NO: 22296 - DNA, 3003 bp, Unknown
  misc_feature (1)..( 3003): 2750-1469P.txt file - cDNA_ID_2050886; gDNA_ID_1620691; Annot_ID_48582
gtcaatttaatagtgtttatttatttattcgacatgtagaaaattaaacgatctacgtaaaatatgaatacaaaaatattaaatattagaataaagtgagagtatgtgtaaatcacgttttggtgaattttttccatgtggtagaataatagaggaggacttttgttgtaaagtaagcttcaccaacctcgatttttagacctgtataattggaaacccacctacctccgcaaatacaacgaaaagtattgtcttataatactttcttaattaaataacaattcttttggagtcatatcatatatatactcctattgtggtgtcgacatggtgacatactacataatgaaaccggtgagattattcttctgctaaacttgtatgatgaccggtgagattattcctaaaatatattaaaacctagaatgaattctttcttttatacgtcatggtttgcttacaaaaagaaatgaaataccaaattttcacgtttttcaaataattgtgttgtctttttctgttttgaaaaatagttttaccggtatgttatcacatttaaaaattttaataaatacttctcatatactgaaagaagtaatatatttttatatcatattttattattttcgatcgatttccaatagaaacaatttcgataaaattacatttttttgtaaataatatataaattttttgtagattacattaatagaactgctgaaaatggtctttaaatcctcttcctcttcaacatttttccaaatttgacattttgactccgaatctcacttataagttgtaataataatgttcattagtgcattagtttcctccttcgttgcccaacaaaagaataagctatcattgacagttttatgatattcggagttccaaaatcatttttcgaaactcggccttttaaggcatttggatcaaaacttcggtgcatatactaaaaacatatggatatatcgggttgagtcgcctcgtagaattcctcgagaagatatatattttgacttggtgctggccatttgtaagaatagcataagccaccagtcaccaagattattcatcgtaaattgtaacaaactcaccattatttggagagcccaaagatactactcaatcttcttaccataaacttttgtcactgtcttataagctataagattactggtctacttaactcagaaatatttatgtcctttgtagccaaaagctacactgaaattgacacaactcgagtgttgtccttttctggtcgattgaatagaatcgaatgtcttaatccagtaccctccagcttttatttcgtgtaatttattttccaaacctaccactaccagtttcataactctcgaataaatttatcaaatagtcttttgagtgctcaaagtcttgggataataaatggtcagtgctatgtatcacccggatgtgaaacattatgggtggagatagactattataaatttattgaaatatacgattgttactcgtttaatagcaaaagtagtacaatgtatatagtttctatcgagaacaagatctatttaaaattcgaaaagtacatttaaaattcataaacatataaagatagtaacatgttagatctgcatagtaccaccaaaacaagaaaaaagaaacgcacatcgccacataattgctatgattctcactgtcggctgctttgaaatattacgattcttttggtaaatcacacaacataatataattacaataaatatatatatactaaagtataattaatataattaataccacattgtttaattctgttttgatcttttaagatcagtcagatccaccgacgttcctacacgcgcaggtccagatccaaacagcacacacacacacacaatgccactagtgtaaatgcttggtggctattgcatttgcacctattgatactctttcttcaaaaacaagttattgtttttattttcaacccaactttaatacggattcatactgggatttaggtgttaaatctgataatttaggtttgaataagttgtatatttgtttctttgattaaaaaaagaacctatatatatacaaaaataaataaaaagttctagatttcaattttccgtatatagcgggttgaattgtctattttaatatgaaaattgacggatcttataaacaaaatgttctgaaatatgtaaaaggatttagccaaagttaaccaaaaaaaaaaaacaaacagaaaagtcacattcacatgtcgtggtagatctaaggcattaatttagaaatatgtcgttacaataagcggagaacatgggacgtttctcgtggtccaatcagacgaacgagatctcataaattaaatgacttcagacgagggaattcatggcagaatgataatgcaacttaagtgactttagagtgaaaatgatacgagaacaatgcataatccatatgaccgttgagtgagtgataccattagcgcgatacaagcgggactataaactgatctagattgtttttcttgggaaaaaatgttacaaattttaaatatgtagtttgaattgttaaaccaagattcaacagaaatataccgtaaataaacaacagttgataatagtcatcgaaaagatatcaactgattcttcacttgggctactgtgacggcccgttagggttctcaatataagtcaataactacgatctacgattcactgaaacaaataaaacacagccacgtgtccaccctcccacatcaccgtccgatctaacccacgacaagcttacaacacgggtcataccgctcgtgcagcgtgttccgtcatccacgggattacaacttctaccagatccaccaaaccctcaaaacaatctgaaccgttcatttcattttgacctcatctatatattctctgtcactccctttctcttctcctcgcacacacttctctctctctctctctctgcctcctttcggattcaaatctcagatctagctcaaccatg

SEQ ID NO: 22297 - DNA, 3003 bp, Unknown; identical to SEQ ID NO: 22296
  misc_feature (1)..( 3003): 2750-1469P.txt file - cDNA_ID_2050886; gDNA_ID_1620691; Annot_ID_164750

SEQ ID NO: 22298 - DNA, 3003 bp, Unknown; identical to SEQ ID NO: 22296
  misc_feature (1)..( 3003): 2750-1469P.txt file - cDNA_ID_2050886; gDNA_ID_2926158; Annot_ID_139618

SEQ ID NO: 22299 - DNA, 3003 bp, Unknown; identical to SEQ ID NO: 22296
  misc_feature (1)..( 3003): 2750-1469P.txt file - cDNA_ID_2050886; gDNA_ID_2926158; Annot_ID_198576

SEQ ID NO: 22300 - DNA, 3000 bp, Unknown; identical to SEQ ID NO: 19879
  misc_feature (1)..( 3000): 2750-1469P.txt file - cDNA_ID_2050905; gDNA_ID_1620693; Annot_ID_164857

SEQ ID NO: 22301 - DNA, 3000 bp, Unknown; identical to SEQ ID NO: 19879
  misc_feature (1)..( 3000): 2750-1469P.txt file - cDNA_ID_2050905; gDNA_ID_2926187; Annot_ID_200750

SEQ ID NO: 22302 - DNA, 3000 bp, Unknown; identical to SEQ ID NO: 4256
  misc_feature (1)..( 3000): 2750-1469P.txt file - cDNA_ID_2050918; gDNA_ID_1620693; Annot_ID_164850

SEQ ID NO: 22303 - DNA, 3000 bp, Unknown; identical to SEQ ID NO: 4256
  misc_feature (1)..( 3000): 2750-1469P.txt file - cDNA_ID_2050918; gDNA_ID_2926187; Annot_ID_200743

SEQ ID NO: 22304 - DNA, 3003 bp, Unknown
  misc_feature (1)..( 3003): 2750-1469P.txt file - cDNA_ID_2050942; gDNA_ID_1620695; Annot_ID_48674
agaccggctttagctttgtaatattgatttctcgttagccattcgattagtagttttggccagttatggactcatggttctcacgggaaaatttgtcaactagctaggtttacattatttaagtctcaggttcgttagaaatttccattgggaattgctctgttctggtcctttgaggttggacctggagtcatgtagtttgctactgtcataacacttagaaaacatatgcaagctggtgcatgagagaatcttggataagttttgcttgtaaactagtttatcgttttgttacgttcctcaagtggaatgtaccaagacatgatgattatattggatagttttagaacatatgtataccattttgttcggagaacaagctgcattctggcttatctttatgttttctttggacctctttaccctttgctgtcctctaatcgtgatgatatttcttgatttctataggacaaacatgaagagaacaaagaatgcaaggaagatgaaagccgtggctaaagctatagcgttgagcgagaagtatgaagcgaaagctacaaaggacaaaaccaaaaccctcagaactctttcggccaagaaattgtacgagtgattttggttaaaaggctacaaaagaaggaaaacagttataaatttttgatagttcgatttgtctattttggtcttgttaacgtttatgttttcttctagaaagagcttttgcaattttgtaatctccttaagttatcgacctatagaagttacgagtgcttatggattttgaccagatggtaaaatatattctttagcaagactggttttcttaacaaatttccaatcttcataaagtcatatctcaagtaacaaagaaacaggcgtacatgcgagactactacttttaacattaaacaatcattcaaagatcaaagtgtgataacaatgtcaaagacatatacatatgggcgtgtattctatactacttttatatccaacaatgagctctttacacaagatttgttgtctctaccaaatcaccttggctcggtctactgaaatatatgcgctatttcgcattgtcagtctgcatctgttacttctgcttctatgtctacgactgctgttgaggaaccctttcctgcacattcaaacacttaatctcaccatttgatatacaagagatatggttacttgatttgcgcagaagtaaaacaaaaatttgggtaagtaacctttcttaggtttagaagaaaacccatttaagtcttgtccaaaagcagtagtttggttggagaatttcactggttccttaacaaacttatcatccacgactgcattttccacgataagaaaacacaatgctaaatgctttgaaaagagatatacttagataaattggaaaaaatggaagaatcatcttattacctgagaatggttgagtacagaaagggcaaagctgaacttcatcatccatcgctgacctgcagacattttgatattcaatcaagctcgatttggcgaaacaacaaaaacaactgagagggatttgattcttgttatatccttacttgaatatctgaaactcatttccacaattaggacactgcacaagcgtaaacagagagatgaaaaaccgcaaaaactagctaagtggaacatactcttgacggatttactcaaaacacaagtgctagctagctaacttatagtcacgaaactgaaattcttgaaatgcttttttaagctaaagagacaagtagacttacattgctctggacaatatctcgttgtgcccaccaaaaaaaggctcccaaacccaaaattggaacaatcaccacaatcagctgcaaaattgtaagaacttcagttcaccagcacaattagataaccagagacattaaatgattaagactttagagagatagagagagtaatacccagacagagacaatagcatccaaaatccaaccaagctgaccagtcatagagagataagtcaagccaatggccaaagcaaggtttccgagaatcctcccatttccgttgttatctccaccattaaacttcaaacccctaaccctaaccacccgtcttttacggttaagagatttctcactagctagcatcccaatatctcccagacccatcactcgctgtctctgtctatgctcaatcaagcaagctctcaaccccaacttggtttggagcatagaaggagccaagctccgtcttttagcgtgtaatctgttactgggttccttgttgaaaccgtcgtgtatggagaagttacaaaggataatctgcggaatcgaagccatcgtctgaattttgatttcccaaacacaaagctcgagttgagaaggatccacttcaacgacaaatgatatttcacgacaatgctgtgttttaaggttatattgaacattaacagaaactagagcatcgcggggatagctcagttgggagagcgtcagactgaagatctgaaggtcgcgtgttcgatccacgctcaccgcatttttgttatttgtccctactttaattgaaacgcgtcgtttaggaacaacaagtcttattttattttatttttaattcacttacttgaaacgcatcgtttttgacgcgtaatgaattaaactgtttacctttgacttgagagatgtagtagaaaaactttaagatcttcgagaacagacttaaattcatgttgcattagagtttgatgaaaaccgattgattttattttattttatatacatgtattaagatcgagtgtaatagtatatttgtcccatgttcattttttggatgtatatacgacttttagaaatttatgcgttctcaacaaaaagaaaccatcaaaggtagccctcttccgaagaaaaatatttgacttttatcaaccttataaactaacaatcgaaaactcatcccaacacaatcttctaccttcttctctaatccatatagattccacacttcagccaaaaaaaaaaaacgaggatg

SEQ ID NO: 22305 - DNA, 3003 bp, Unknown; identical to SEQ ID NO: 22304
  misc_feature (1)..( 3003): 2750-1469P.txt file - cDNA_ID_2050942; gDNA_ID_1620695; Annot_ID_164932

SEQ ID NO: 22306 - DNA, 3003 bp, Unknown; identical to SEQ ID NO: 22304
  misc_feature (1)..( 3003): 2750-1469P.txt file - cDNA_ID_2050942; gDNA_ID_1620666; Annot_ID_163940

SEQ ID NO: 22307 - DNA, 3003 bp, Unknown; identical to SEQ ID NO: 22304
  misc_feature (1)..( 3003): 2750-1469P.txt file - cDNA_ID_2050942; gDNA_ID_2926191; Annot_ID_141024

SEQ ID NO: 22308 - DNA, 3003 bp, Unknown; identical to SEQ ID NO: 22304
  misc_feature (1)..( 3003): 2750-1469P.txt file - cDNA_ID_2050942; gDNA_ID_2926191; Annot_ID_201024

SEQ ID NO: 22309 - DNA, 3003 bp, Unknown; identical to SEQ ID NO: 19950
  misc_feature (1)..( 3003): 2750-1469P.txt file - cDNA_ID_2051015; gDNA_ID_1620698; Annot_ID_164980

SEQ ID NO: 22310 - DNA, 3003 bp, Unknown; identical to SEQ ID NO: 19950
  misc_feature (1)..( 3003): 2750-1469P.txt file - cDNA_ID_2051015; gDNA_ID_1620682; Annot_ID_164478

SEQ ID NO: 22311 - DNA, 3003 bp, Unknown; identical to SEQ ID NO: 19950
  misc_feature (1)..( 3003): 2750-1469P.txt file - cDNA_ID_2051015; gDNA_ID_2926181; Annot_ID_200255

SEQ ID NO: 22312 - DNA, 3000 bp, Unknown; identical to SEQ ID NO: 4312
  misc_feature (1)..( 3000): 2750-1469P.txt file - cDNA_ID_2051061; gDNA_ID_1620698; Annot_ID_164963

SEQ ID NO: 22313 - DNA, 3000 bp, Unknown
  misc_feature (1)..( 3000): 2750-1469P.txt file - cDNA_ID_2051116; gDNA_ID_1620699; Annot_ID_48736
aattaaaggatatataaggcacttggaacatatataggagaatttcctttattcatatataaggcacttggaacatatataggagaatttctttagattactaaactaactcgactatattataaagcatcaagtcacttgattcccgctttcactttgagggagaattggggacgatgtgcgcacagttgtccttaagcagaggtggaaagaacgggttaagcgggaacatatgaggccaacagttagcatctatggtcgacaatgctttgcaacatgcaactccaacatttccaaactgaccagaaaaaactgactttaaaagttcgaatacgcatccctgagtattgaaaagtgatgcccaacatttttccacatcaataggaaaatccggtggaaattgtgagcggggcggtggttgttcatcatgagctattccgggggtgattaaaattgcagcacataaggctacaaccaagaataaagagaaaatagctcttgaattgtttcccatctatctttgacttctatttgctttgatatttggatggtttgggtagggaaaacagtttagaatttataggataaaataaaatataaacaaaactgtattaaattatgtaattaattagagtacttaagtgtttataagttataacatattttttgtctttatcaaaaatagttataacatataagcaacggaaaatttttaaagctttcttaaataacttatgtccttttaattatctggtttgactaacggaagatgtgatggtgttgaaattaaagacatataagaaaataatatttgatggaaaacaatttcaggaataggtccgaagatgtgaagacttaaatgtgtttgtaaagggcaaaccactctacatgaacagtttggttgacaacaacaaatttatgagaaaaaatatcatattcaatgaaagcaagagacataattaataatcgagtatgatcatggtccctgcacaaaatggctcagacaaaatattgtactggtgtttttggaaatatttcccaccgagaatagatgtcacaccagaactttcaacttttgtgtgcgtaactctttgcaaagtttttcgaaaaatccaaccttgtttttaacatgtttaaaataggacctcagatcaaggtcaagtgatcagatgtgtaggttatgtgtgtttatgccgtccatgctctgattcaacattttttgtgtttacatatatcaaagaggccatcccaataagcaacctcttttacttttcatgtttagaggaatttattgactacgtattatttcattgatttggtcatttggaaaatccttgaaagttttcgatttttattaaaaaaatgaatattacaaagctaaaaaaatggaattaaaatgatatatgtaaattttaactattatttagaaatgcgttcgaaataacaattttcaccctcatatttgaacttttgtttttccaacttgacacatatctgttaaaactcacaaactgataaacctccttgaatttttttaattttttttctaactattgcctatgttttctgttttactattgacgtcaactataatcttgtatcttgtatcttactgccttttttttgttattaccatataaaatgtgagaaaagagacactgtaaaaagtaatagtacacgagattagcgacactcacggagtgtaatctttattttaaaaaatctttgacgtccacagaacacacgagattaacgcaatttcattacttccatttttaaagctttctattaatatattgaaagaaatcctctcttacaaagcgtcgtgaatgaaatcgcaagttttttaattacattaatgcatgatatatcatatagtataatctaatcatcctttcgtaatcagtgtgacttcacttaactagcgtacatgcctatctatagtgacagtaaacacggttaaaaaatttgttgtcttattaacaaccccacactagctagttgtggatctgtaattttctggcttggcaaaattacattaaacattattttggcactaccattaatatatcgaaggaaaccaagacacgcacaggctccataatcaaaaattataaaactatatacaaattaatgatgatactacaccaaagtatatattcgaagcaaggctagctaattgaactgaaaacatagtcagtgtagtttatcaactttcaataaaaacatcatccatgatgtacatgtgtacgtgtatactagaagtcattctgcatgatgattttttttaatatacaaatgacacatgtccgagacatttgacagctacgttgatatgtattcgtttggttgacagagcttgagaatgcatttttttataagggaagatttaagtctatattcggtagaatttaactcatagacattactcctaagtttttgtttttatttttgaaaaagcattactcctaagtttcatgtaatatacaagacggaatgatggatcaaagttggttggccaaaaacaccgaagcaagcttgtcgatgccttttgtctcgactagtattattgttactagcttgagactaaatctgattggagtccacacaaaataaatcaatattatttattaatggatctgttttggaaatccaaagacaaataattcatatgtatatatatatatctatagtagtattcggcggtcgacagtcgtaaaccttcacaaaaaaataaaaataaaagacagtaaactaacaaaataccaggtggtctgaactctatcttatgaaaaaaaatattgaatcgaattcttaaatgtcatatatattgatgtcggaacaatatttttttattgaaacactaaattcattgaacatgttgggttcagtccggttcagaaatttactactgtgtctttataaaaccaaattactattgtgcccccattttccgatcgctataaaaaaaacctaattcctcaactctaattcaccatg

SEQ ID NO: 22314 - DNA, 3000 bp, Unknown; identical to SEQ ID NO: 22313
  misc_feature (1)..( 3000): 2750-1469P.txt file - cDNA_ID_2051116; gDNA_ID_2926208; Annot_ID_141865

SEQ ID NO: 22315 - DNA, 3003 bp, Unknown; identical to SEQ ID NO: 19894
  misc_feature (1)..( 3003): 2750-1469P.txt file - cDNA_ID_2051170; gDNA_ID_1620694; Annot_ID_164875

SEQ ID NO: 22316 - DNA, 3003 bp, Unknown; identical to SEQ ID NO: 19894
  misc_feature (1)..( 3003): 2750-1469P.txt file - cDNA_ID_2051170; gDNA_ID_2926208; Annot_ID_202406

SEQ ID NO: 22317 - DNA, 3000 bp, Unknown
  misc_feature (1)..( 3000): 2750-1469P.txt file - cDNA_ID_2051182; gDNA_ID_1620700; Annot_ID_48762
gttaggcgatatgtagtctaagcaaggtttataaccttttgtatatttcaaaggacgtggcatattaggtacatgccaagtggaattgaccttggctctcttctacattgataaagttcttcgcataattcacatccctatataaacaaatgaacggagaaggtatgagtacatccacacattgacatttctaaaatccaactcctctttttgaaaattaagaaactccacttggctcttcgattttttctatctaaataacagaaccaaatcattatcgaaatttaaagttgtgcgaaacaaaacaaagatgggaagatcaccttgttgtgataaaaatggagtgaagaagggaccatggactgctgaggaggatcagaaactcatcgattatattcgatttcatggtcctggcaattggcgtacgctccccaaaaatgctggtacgtataaactacacaccgttccttatattttgttctcatagattaatatatatgttctctatttattgagtcacacacttataagtcgtattgtacaaattaaaggactccatagatgtggaaaaagctgccgtcttcgatggaccaattatctaagaccggacatcaagagaggaagattctcgttcgaggaagaagaaactatcattcagctacacagtgttatgggaaacaagtaagcctgatcattcacaccataatttttgtctgaaattcatattcatcagctacatgcttttgtatgttaattaatgtaaaactcaaaaagggagagtgtacgtttgcatgcgggggtacatgtcaaatgtaggccatcaactccaataaactattattagtactttactagtacgtattgacctatattagaataataataaaggagttttgtattgatcatagattaatgtcactaatattgaattgatgaatattaggtggtcagcaatagccgctcgtctaccagggaggaccgataacgaaataaaaaaccattggaacactcacatccgcaagagacttgtaaggagtggtatcgaccctgttactcattctccacgccttgatcttcttgatttgtcctcacttttgagtgcacttttcaaccagccaaacttttcagcagttgcaacacatgcgtcttctcttcttaatcctgatgtattgaggttggcctctctactactgccacttcaaaaccctaatccagtttacccatcgaacctcgaccaaaatcttcaaactccaaatacatcatcagaatcgtctcaaccacaagctgagactagtacagtcccaacaaactatgaaacttcatcattggagcctatgaacgcaagactcgacgacgttggtcttgcagatgtattaccacctttgtcagagagttttgacttagactcgctcatgtcaacgccaatgtcttctccacgacaaaatagcattgaagcagaaaccaactccagcactttcttcgactttggaattccggaagatttcatcttagatgactttatgttttaattttcaacatttgcatacacatgtcttgctttcacacatatgattctttgttgcattctttcttttgtttgatgtataaatttcttgtttttattctctcaaaagatattaagttattagtctataaaattttcatgaatgtttatgtattatctgcttaggcgagatatctaaattctgctccattagtccatatacacagttgacggaagcaaacatagaattattagcgtcaaacacatcacatattcatattgctttgttcgaatcatcgtcaatcaagttaatcagtttatgcgagttctatcatttaggcccaattcaaggcccaattcaagttcattttaaagccgttaatttggccaatttaaggcctatattccggaagcttgtagaactattttctaaaaaccaaatcgataatatgagttagttaaacttggtctatataaaatgatattttcacttttcaattccaagcaagagataagtgtggaacagttaaatctaagtcttatatagataatttgaatttgagggatgaaggcattttgactaattggtatgggcaggtaagtaagcaacacaaagaacgtgtgaaaatgctttaattggtggaatttggaacttaaagaggaagattaggaaatgcattagtgaaagtggggacgactccttttttctcgccttttggagttttcacctttttccctgacggaccgtttccctaggctggcctccggctcatattcatatacccgtttgaaataagaggtttatttctttttatttttggatttgtcaatgctcataaagcgtatcaatgatttaatatatgattgtagagagtttttgtgttttgtcctttagatatcgatccttttcttcctgtgactatgctccattcgcatctcatcccacctcgttaagggctcgttatgtttctccaccattcatatcttttttttattttctctaactcctatctttaaatttttctctttcacatatttttgctagcgttttgcgaaattaaaagccaccatgttatatacatgaacatgtaaatacattacaaatgtacatggataaatatgaactatacattatgcttagttactaatgtagacatgtagttaagaattcttagttactactagaactagtagtacaaaacaaaaagacaaggcctataatttccggagctaaacacagtttacaaagggattatagactctaaaacaaaccagaaactgccaaaagtcaggaatctcttgtttttcttccctcacatctctcttctctctctcttcacaatagtcctttggacagaacaaaagagagagaagatagtgaataatggaaggctgcttttcttcgtgaatctcagaatcttaaaagactcagatttgagaaaacgtttcaatatctaaatccatttctctccctctctctttagccatttagaatg

SEQ ID NO: 22318 - DNA, 3000 bp, Unknown; identical to SEQ ID NO: 22317
  misc_feature (1)..( 3000): 2750-1469P.txt file - cDNA_ID_2051182; gDNA_ID_1620700; Annot_ID_165054

SEQ ID NO: 22319 - DNA, 3000 bp, Unknown; identical to SEQ ID NO: 22317
  misc_feature (1)..( 3000): 2750-1469P.txt file - cDNA_ID_2051182; gDNA_ID_2926192; Annot_ID_141091

SEQ ID NO: 22320 - DNA, 3000 bp, Unknown; identical to SEQ ID NO: 22317
  misc_feature (1)..( 3000): 2750-1469P.txt file - cDNA_ID_2051182; gDNA_ID_2926192; Annot_ID_201135

SEQ ID NO: 22321 - DNA, 3000 bp, Unknown; identical to SEQ ID NO: 4337
  misc_feature (1)..( 3000): 2750-1469P.txt file - cDNA_ID_2051189; gDNA_ID_1620700; Annot_ID_165050

SEQ ID NO: 22322 - DNA, 3000 bp, Unknown
  misc_feature (1)..( 3000): 2750-1469P.txt file - cDNA_ID_2051197; gDNA_ID_1620700; Annot_ID_165048
gtagaaaagagagatgaagcgagatatacatcaaccagtgtcacaaagcggtaagctgcagtcctattatggagcccgaagaagggtacaccttccagagccaaagtatgaaatttctctgtaatgaaatttgcatctcaagactaagcatcatgtaagaattccagtgcaatgacaaggtctgaaggcactggggtaagacttactgaataatccgagataatcggctgcgcctaggggtctatcacacagctcttcaaaaagaaagtaggcacatccatcagcagctagaggaacctggcgtacaacaaacaataaatttagaaataaggatcaagggatttcaaataagctatttaatggaatggtatctgaaggttttcggcctaatcaatcaataaagcactcttcagcagaaaatcgtgaagaactgcatattgatgcatctgtgaaagaagaagcaaagaaacctgcaatttccttcccattactacttcaaccacttgaggaccagccggttgatcgccaaccaacagctgaaacttctgttttagaaggcctgagatatcctttccaatgaagtaaaatccctcttcagcctgcacccaagaatacatagctataagattgtaatcactttgcaacaaaactaagacagttactgagagacgtgaaatcacgtacagaggtcagtttccgatagtccaccgatgagccaatctcacgaacgacacatctttcctacaacaaatcatttctcagtatcagttacgaagcataatggatcacatgaaacaagttcttcagagcgttgatagtgacatgcatttgcatttgtatacctttagtgtggaaataaacggaaggaataggtccctctgtaaaccaccttcatagagattatctggagcacggtttgatgtagcaacaagaatctacacttttctccaattaccgacatgtaaaaacttttaaataactataggtttaggtccagtaggctagaagagttgagaaagagaaaggttttatagattacttacaatgccattgttaaacaagtgtctaaagagacggtttagtatcagtgcatcagctacatcattgacctatacatgaagaacaataaagaaacatgagttttccctgaacacattttaaaacaataaagacgagcgtcacaaagacataccatgaactcatctaagcatagtaatatagcctcgtcagctatttccaggccaacgacttcaagtggatcttcaagacccttgtgcttctacagaggatattcaaatacacaaagaattgagtccaatgattattgcaagcctaagcttaaaaaataaagctttgaactgggagtttacttgcaggcggctatgcacactcaacatgaaattgtgaaagtgaatcctttgtgttctccagctagctggcctaactcatttaaaacaggatcagatgaatccataaaaaaatgtagaaactatatgaacagtgaccacctacttacaattgatgaaaaaacaagtccatgagcattgtctttccagttcctactcctccatataagtataagcctttgacaggagagacagaagagtgagacacaaatttgttccagaaccaattactcctagtggactttgcagatgcagaataacgatccaatcgacaagcatcagcagattgaacaagctcgtcgtagagtctctgaagttctcttagtgtacctagctgcaaccaaaaaaaaagaaaagattcaaaaatcgatttcactgctaatgaatgaaccataaaaggaaagtacctgacataaatctccatccaataactctccagctacgattctgcgttcatactccactaacggccctgcaatctttccatctccattggaatgtggagacgaacagaaggaagaagccgagaatagagatgaagaagatgtgctgggattgatagagatcaaacaattatgaatgggagcgaaagcgtatcgttgatgcctcgagaatagagttacacggcgaagggagagaagaagcaatcgcatggtgagaatgagaatgagagagagagaaaggtaatcggaaacctcttcagtgatcggaggatgacggattcaacgaagaagaagaagaagaagaagaatcgaagcgatgcaccttcctcactactcgcacctgctcaagctcagactctctgaactaaagaaagattcaacaacaaaagactaaaccgataataaccgattgaatcggtttaaactgtaaagtgaacttaggcccattagtattggagcccaacaatgaaagcggcctcattggcttctttttcttctagtcgtcgtcaccggaggagaaaagttggcgatttgcaaacttcattttcaatcgactgcgtctcctctttcttctcctacccaaccaaagtttctcatcattcatttcagatcagccatggaggacgaggtaatcttacatcttttcgtatatatttattataaacacgatttagctctgtttttccgccggagattataatttgccggagacctttattcgagatctgattgatcatttcttatatgcctacattaactttgatacccattagatttctttttgatggaaatcgatttgatgtgaaattagctgctcgttactctggctttttccactcatcctctatagatgatctggtggagtgtttgtatagagaagaaagacatatgagttcattagaattgtagaaaagtgatggaagattttccgtcaaatcgttttctcaaaggcgtggtggtctattgttgctcgactggaattgtataatagagtttctctgtcaaaccattttggcatttttttagtagacttgggaactgaaagagaagaaaagatggatctttgaagtctaaaagaaaatgttgttattgttggtctccatcttcgtgactcactaggaaaatttatggttttatctgagttttaaatg

SEQ ID NO: 22323 - DNA, 3000 bp, Unknown; identical to SEQ ID NO: 22322
  misc_feature (1)..( 3000): 2750-1469P.txt file - cDNA_ID_2051197; gDNA_ID_2926192; Annot_ID_201129

SEQ ID NO: 22324 - DNA, 3003 bp, Unknown; identical to SEQ ID NO: 19969
  misc_feature (1)..( 3003): 2750-1469P.txt file - cDNA_ID_2051210; gDNA_ID_1620700; Annot_ID_165041

SEQ ID NO: 22325 - DNA, 3003 bp, Unknown; identical to SEQ ID NO: 19969
  misc_feature (1)..( 3003): 2750-1469P.txt file - cDNA_ID_2051210; gDNA_ID_2926192; Annot_ID_201122

SEQ ID NO: 22326 - DNA, 3003 bp, Unknown
  misc_feature (1)..( 3003): 2750-1469P.txt file - cDNA_ID_2051288; gDNA_ID_1620706; Annot_ID_165300
atttggttgagaaacacagcgaagagctcgcgtctctagagacatgggacaatggcaagccttaccaacaatccttgaccgcagagattcccatgtttgcaagattgttccgttactatgctggtatcataaaacgaacttaaatcttgagaattctggtgcttttggtgttactttctgtgaatgaacattcttggttttgctttgatgtgtaggatgggcggataagattcatggactaacaattccagctgatggaaactatcaagttcacacattacatgaaccgataggtgtagctggacagatcataccgtggaattttccacttttgatgtttgcttggaaagttggtcctgctcttgcttgtggtaacaccattgtcctcaaaaccgctgagcaaacacctctcacggctttctatgctggaaagcttttccttgaagtaagatacatccgatagattctcctattgtcttctctaggaaaagaaaaactttgatgagtaacaatgtttcttgtgaaatttatgataggcgggtcttcctcctggtgttctgaatattgtttcgggattcggtgcaacagcaggtgctgccctcgcgagtcatatggatgtagacaaggtagatatatttatttacttgctgctaacttctttaagaaactaaattatcttacattcttctttttgcttcagcttgcttttacaggatcgactgatacggggaaagttatacttggattggctgctaacagcaatcttaagcccgtaactctggaacttggagggaaatcaccgttcatcgtattcgaagatgctgatattgataaagctgtagagcttgcacactttgccctcttcttcaaccaggttttgtcaatagtagaatatattcaccttgagctaagctgactcattttcctagctagttcttgagataatgttgagtaatgtttttgtaggggcaatgttgctgcgcggggtctcggacatttgttcatgagaaagtgtatgatgagtttgttgagaaatcaaaggcacgcgcattgaaacgtgttgttggtgatcctttcaggaaaggcattgaacagggtcctcaggtaacacatacacattccttccttccattaagaagagtttagcttttctactttgttgattggttttgtgatttccgttttcacaaaaactttgtatagatcgatttgaagcaatttgagaaagtgatgaagtacataaagtcaggtatcgaaagcaatgctactcttgaatgtggtggtgatcagattggagacaaaggttacttcatccaacctactgtcttctctaatgttaaggtaaaaagaaaactcttctaagacatctttaatgttcttctattaccgattctccatggcattaatctcgaacgcttggttcaactacaggatgacatgcttatcgctcaagacgagattttcggtccagtccaatcgatcttgaagttcaggtatatagagctaccaataaaactgatccagtagacaaataagtcacaatttggtaaaaatggctgagttgttagagatttggtaaactgaaactaatttcgaaccaaccaaacctaaactttttttaaagataaatgtattcaattaaaaaacagaaaccatgatagatttggtttaacactggttatgatgttgggttcagtgatgtggatgaggtgataaagagggcgaacgagacgaagtacgggctagcggcaggggttttcacgaagaatctggacacggcaaacagggtttcaagggctttgaaagctggtaccgtatgggttaactgcttcgacgtatttgatgcagccataccatttggtggttacaagatgagtgggaatgggagagagaaaggcatatacagtctcaataattacttgcagatcaaggcagtcgtcactgctctaaataagcctgcctggatctgatctctggagtgtggtttcagcatcataaatgctcaaacaaaagaaatagactctataaagttacaatagtaataattaaggtcatggtttgtaatttgagtaacggattgtgatacttctaataaatttttcattgttgtttattcatcacatagctgttgttacactgagacttgtgtgttcattttggttttgcaagatttctattgaaactgaaaacaaacatgaaactgaaaaatgcaacgaaaattagaaaatatatatcttaaagtaattaagagttaaaactcaataattaattaaaaacttttcagttgtttaaatatatactctgtttctatataaatgtagtttaagagtttttatttttttcaaaataagtgttgttttcaactttctatacaaataataaatatttaatattttaatcaattatatttaattaataatatttttatataaaagaggtagattaaatgagactttcatgatttttttaatatgtgtataaaaaccttaaactaatatgaaacaaaggaagtagttgttaattattaaattcatatacagtatattcttagaataaaatatcaacataaaattgatcacaagtatgaaaaaaatactttttattaaaaggtttatcagataaatatatttttccttttgtaacagacaaaaaattatactaattttgaatatttattatatttcttaataaatttcgatacaagttttctatttaaataatatttttaacatgactgaaaaatgttgaacgcatcagaagtgaccaaatcgtgaattttaacttgttcgtcagccagaagtttccgtttctctttagtttcttcatcgcgatttttgctacttggctccaaaatccctcctttttcttctttctcacttgcatcattagctcacgatttcgagtatcgattcaaccattttgatcttcaatctatcttagggtttctccttaattcttctctcggattttagctcttctcgactattactcacctctctcatg

SEQ ID NO: 22327 - DNA, 3000 bp, Unknown; identical to SEQ ID NO: 4495
  misc_feature (1)..( 3000): 2750-1469P.txt file - cDNA_ID_2051413; gDNA_ID_1620711; Annot_ID_165420

SEQ ID NO: 22328 - DNA, 3000 bp, Unknown; identical to SEQ ID NO: 4495
  misc_feature (1)..( 3000): 2750-1469P.txt file - cDNA_ID_2051413; gDNA_ID_2926155; Annot_ID_198369

SEQ ID NO: 22329 - DNA, 2231 bp, Unknown; identical to SEQ ID NO: 4503
  misc_feature (1)..( 2231): 2750-1469P.txt file - cDNA_ID_2051442; gDNA_ID_1620711; Annot_ID_165409

SEQ ID NO: 22330 - DNA, 3003 bp, Unknown
  misc_feature (1)..( 3003): 2750-1469P.txt file - cDNA_ID_2051442; gDNA_ID_2926155; Annot_ID_198360
tcgtgttcctaggaatcctccaaatagggtgagaggaaccgagatgcagaaccagagagccaagagctcaaaatacaaagagattgggatggctccagtgctgttgctgctccagagaaggaagttcaacactgtgagtataacaaaagcaatacccgggaagaagcatgcaatggaccaggaaagtgatctccatccttctgaagtccccttgacagttctccagagccgaacaccagcgtacccagcaacaatacccaagaaaagatagagaataatcatcccggttagtagcattcctcttgaggcaggcgacatgaatccaagtgcagcgaaaacaatagtgacaacagccattcctgtaattcgaaccccatctcccaccataatgcatagaagctttgacatttctggttctctgaacacatctccgacaacaagtttccatccagagagctcctcattcatctgtgcctgtgcttccttgtccagttcctcatactttgtcaaatcccttctcactgtcctcaggaatatgacgaaaactataccggccagaaagaagatcaccataagcgagttcaaaatagagaaccaatgaacacgagcaccttccattttcaaataggcatcccatctggatggccatcttgtctcactcttaacaaattccacttcataagtgaaggttattctttcatgttctttaatgatctgagctttgtcaagctccaatggacagttaactgaaggaacagggtcatacatgtgaagcttcgtcattttttcagcatcatacttaacactgcagggaacaacctcaaatccaacaatctcataccccaatgccttcttcttatcagcttcagagatcacacccataccttcttcaccagtaccaatcacctccatgacattgccttcatactcatgaaccaaaaccttaaacttgaggtgattaatgatgtaatcatcattactgttaggtggcgaatacccaacaggatatccagtccactggatagtaaccccattctgcttagcgaatctcaaagcaggcaagttatcaagaatcattattcacttgatacaactcacgagttctctgtttcaagagcttgacctcatgctcattcaaaggactcgtagtgcataagtaaagagactcattggttctcatccgaaacctataagcagagttatcaatctgatcacccatgagaagctcaccaagattctcagcacttttcttgataccttcaagtggttggcagtaaggaagactatagtaactgaaaggaagctcagtttcaatagaagtcaaggaattgactttggcgaagatagagtctccatctgaatatgtgtgcatataactccctggtaagtaaaacccattgcaaagctgactaacaaacaccagtaacacgaatactcgatacacaccaaacattgtcccttcctgtatcaaaatacaaaaactctctcacgattagtaaaaatcactactattgtaacagattcaagcacattctcacgaatacattgaaatcgaaatggtttatgcatgtagatcagattcgtagtaaccagattcgggattaatgaatcagatcggtggatcaatagatcagatctcaaatggatcataaacgcaaaactcagaagctaattgatataatggaatacgaaaacgatgaatacaaaatcagaaaacgcgaaagaagaagcagatgcgaatccaacagatctcagagtattcgagagcaaacctgagagagagagatccaggtatggagatctacgagggagtcagatctagaagaggtggtcgagggactttgggttgtttcgaaggtcacgctgataatctctctcactgctttgctttggttgcttaatgcgttcgcaaagagagcgaataacgaaaatcaagaaaatcgtgggtgtgttgggtagttattctctgtgacgcgcttatacaatatgtcggtgcggtaatcaccgtgcctaacttcatctgaggccaaaaaaaaaaaaaaaaaaaacttcatctaaggccttgaatttctattggttgaactggttataattaattatatttttaagtaaacgacggtttttaaatgagatttttgtaaaatagagagagtataatgtagttaatttttaaaaaaataaaacaaagccaaatgaccaattttttggaaacaaaaaataattttatcacatataatttgaacatttttttttttgctaaagaattcaatatttactacaattttgaattattttgaactcttatgtaagaaagtaaaatttacacaaaatacatattttgagaagctggcatccggcattttgacatgcgtattttctcaaacattaaatacattaatatatatgttaactagcattataatagagtaaaatattcacaaaataatgttttgagaagctgaaatgtaacatgatattctacagtctagcaatttgaggttttctaccgaattttcatagtttgtattgtaaattcaaattaaatttaagttcatgtagttataagcacataaaaaagttcggtgaatggaaacgataaagcaatttagttcatggtgaaataggccacatgattattagcaggattcatagataagaatgttaacaaaattaaatggtaaattgggtttaattaggtttatgacctccggtcgtccttacgctattatctccacagcgtttttgtttcatctaatcaacgaagtgaactttcgaaatcgatatctgaattttgatttaaaaattggaggtaatcattcaccaatcggtttgtcaacgtaaaaatctctctctgattatatgaattgatgtgatgtgagttcttagaattatgattcatcgaattggaaaaaataaagttgttcgttgtcagtaaaattagggtaatttgaatcattaacgagtatatgtatgtattgtaagacatgattgatatacataatg

SEQ ID NO: 22331 - DNA, 3000 bp, Unknown; identical to SEQ ID NO: 4604
  misc_feature (1)..( 3000): 2750-1469P.txt file - cDNA_ID_2051556; gDNA_ID_1620717; Annot_ID_165686

SEQ ID NO: 22332 - DNA, 3000 bp, Unknown; identical to SEQ ID NO: 4604
  misc_feature (1)..( 3000): 2750-1469P.txt file - cDNA_ID_2051556; gDNA_ID_2926189; Annot_ID_200852

SEQ ID NO: 22333 - DNA, 3000 bp, Unknown; identical to SEQ ID NO: 3470
  misc_feature (1)..( 3000): 2750-1469P.txt file - cDNA_ID_2051600; gDNA_ID_1620717; Annot_ID_165666

SEQ ID NO: 22334 - DNA, 3000 bp, Unknown; identical to SEQ ID NO: 3470
  misc_feature (1)..( 3000): 2750-1469P.txt file - cDNA_ID_2051600; gDNA_ID_1620647; Annot_ID_163303

SEQ ID NO: 22335 - DNA, 3000 bp, Unknown; identical to SEQ ID NO: 3470
  misc_feature (1)..( 3000): 2750-1469P.txt file - cDNA_ID_2051600; gDNA_ID_2926188; Annot_ID_200815

SEQ ID NO: 22336 - DNA, 3003 bp, Unknown
  misc_feature (1)..( 3003): 2750-1469P.txt file - cDNA_ID_2051606; gDNA_ID_1620647; Annot_ID_47641
atgtactcacgtgaacctcttaatttattacttttggtttgtgttttcctccacagtttgacaagggcgataaatattttttattcacaaaataactatagataagttttagatctcagccgttgtagttcgaattaagcaaatttaaccagcagtgcactagtagttcaatcggttatctaaactttagtatagatctcagctgtctataatctatccgttaccattatctcttacaatctctaacgatatcattttttactagcaccaatattcagacagttgattgctcttcatcagtctctaaacatggccatataatccttgcgtaagtttatataacactggtctctgccctaaattttcgagggatccattttcctaaaaaagatttaattgtatagatttttgttagtgagcaagacacttgttaataatgctatgtactacatatatatgtatctttcaccaaatcagtttttcaaatttataaacataaaaagtaagaattgaacccccaaaaaaatacaagaagtaaatataactaaacttctattcttcttttttttttcttttttgttgaagaaatggtatttgtatttcttaatttgtttttctttttgcttaataacttcttttttatacattagatttttgatattgtatatatacatcaaacaagttaaataatggttttatccatattttctaaattctcctaattaactctactagagttaatatgtgtgtatatagtcacacatatacacaaacatttgtttctgctcgtggtctatatattgccttttaaaagggtcaaacatagtatagcttggatccttctttacttgtccctgatctctcctaatctctcgtcttccctctcttttgtgcttcatcgatctctatcggtcatgggttccaattttcattacacaatagatctcaatgaagatcaaaaccatcagccttttttcgcttctcttggatcctctcttcatcatcatctacaacaacaacaacaacaacaacaacattttcatcaccaagcttcttctaatccctcttctttgatgtcaccgtctctttcctactttcctttcttgataaactctcgccaagatcaagtatatgttgggtacaacaataacacttttcatgatgttcttgatacccatatctcccaacctctcgaggtataatttcaaatgaatttcatgtcaatatattaactcttgatccttatatatatggtttatattcatatggaaatttcagaccaagaactttgtatctgatggtggttcatcatcaagtgatcaaatggtgcccaagaaggagacacgactaaaattgacgataaagaagaaagataatcatcaagaccaaaccgatcttcctcaatccccaataaaagacatgacaggaactaactcgctcaagtggatatcttcgaaggtgagattaatgaagaagaaaaaggcgattattaccaccagcgacagcagcaaacaacacactaataacgaccaatcctcaaacctaagcaattcggaaagacagaatggttataacaacgattgcgtgattaggatttgctccgattgtaacacaaccaagactcctctttggagaagtggtccgagaggtcccaaggtattaatcacacgtctgttaattacacatatatgcgtaagcttttttttggttttaatgttaaaagtagatgcctaagtaatgtcatatatactcatattgattattagaagctcacgaagaatatgtctttttatagtactaattaatagcaaatgaaaagtaaatctacaaatctctaactggtaaaaacaatttcatgtagcattataagttggtttaaacagattaatctttgagatcttctaaaattcatgttacaagataattaactaaattatcatgttttttcttgttttgttattacagtctctttgtaacgcttgtggaataaggcaaaggaaggccaggcgggccgctatggccacggcaaccgcaaccgcagtctctggcgtatccccaccggtcatgaagaagaagatgcaaaacaagaacaagatatcaaatggagtttataaaatcttatctcctttgcccctaaaggtaaacacgtgtaagagaatgatcacactagaggagaccgcattagccgaggatttggagacccagagcaactccacgatgttatcatcttcagacaatatctatttcgatgatctagcattactgttgagcaaaagttcagcttatcagcaagttttccctcaagatgagaaggaggctgccattttactaatggctctatcgcacggaatggttcacgggtgattattttaagtattttaattataactcgcatgcttaagaaataaaatataaaccataccataagccctcatagctagtaatatctagattatttgatacatgaaattttgttgcggtgatatattaatttcagtcagtccaactttattataagagagtgttggggtttagtagattttgtatgaaaggcttgtattttattttttatggaacttgatatcccaacaatgtggttgttcttgttcattcgcatgttttttgtgtttctaagttttgagagttgatataagaattactttaatttgtcaagatctcgtcaagtgtttatacttgatgaaaatcttttggggatcaaaacggtttgaagtaaagatcgtactgtcgtactggtgtctgtagattgatattaaactcgaacaacatgattattgtaatataccttaactaccatataatttttttcaattctttctggatacaattgtaagaaaacagaaaaatcggaaaaatgagaaaattcaccaaaactaatggggttgttttgaaattagtttgatacttgaggattgacaaacgaattctacttttccggggaaagaattagagagcgaaacagaacaaaacaaacaaaaagtcatg

SEQ ID NO: 22337 - DNA, 62 bp, Unknown; identical to SEQ ID NO: 4611
  misc_feature (1)..( 62): 2750-1469P.txt file - cDNA_ID_2051606; gDNA_ID_1620717; Annot_ID_165663

SEQ ID NO: 22338 - DNA, 3003 bp, Unknown
  misc_feature (1)..( 3003): 2750-1469P.txt file - cDNA_ID_2051606; gDNA_ID_1620647; Annot_ID_163300
ttgatattgtatatatacatcaaacaagttaaataatggttttatccatattttctaaattctcctaattaactctactagagttaatatgtgtgtatatagtcacacatatacacaaacatttgtttctgctcgtggtctatatattgccttttaaaagggtcaaacatagtatagcttggatccttctttacttgtccctgatctctcctaatctctcgtcttccctctcttttgtgcttcatcgatctctatcggtcatgggttccaattttcattacacaatagatctcaatgaagatcaaaaccatcagccttttttcgcttctcttggatcctctcttcatcatcatctacaacaacaacaacaacaacaacaacattttcatcaccaagcttcttctaatccctcttctttgatgtcaccgtctctttcctactttcctttcttgataaactctcgccaagatcaagtatatgttgggtacaacaataacacttttcatgatgttcttgatacccatatctcccaacctctcgaggtataatttcaaatgaatttcatgtcaatatattaactcttgatccttatatatatggtttatattcatatggaaatttcagaccaagaactttgtatctgatggtggttcatcatcaagtgatcaaatggtgcccaagaaggagacacgactaaaattgacgataaagaagaaagataatcatcaagaccaaaccgatcttcctcaatccccaataaaagacatgacaggaactaactcgctcaagtggatatcttcgaaggtgagattaatgaagaagaaaaaggcgattattaccaccagcgacagcagcaaacaacacactaataacgaccaatcctcaaacctaagcaattcggaaagacagaatggttataacaacgattgcgtgattaggatttgctccgattgtaacacaaccaagactcctctttggagaagtggtccgagaggtcccaaggtattaatcacacgtctgttaattacacatatatgcgtaagcttttttttggttttaatgttaaaagtagatgcctaagtaatgtcatatatactcatattgattattagaagctcacgaagaatatgtctttttatagtactaattaatagcaaatgaaaagtaaatctacaaatctctaactggtaaaaacaatttcatgtagcattataagttggtttaaacagattaatctttgagatcttctaaaattcatgttacaagataattaactaaattatcatgttttttcttgttttgttattacagtctctttgtaacgcttgtggaataaggcaaaggaaggccaggcgggccgctatggccacggcaaccgcaaccgcagtctctggcgtatccccaccggtcatgaagaagaagatgcaaaacaagaacaagatatcaaatggagtttataaaatcttatctcctttgcccctaaaggtaaacacgtgtaagagaatgatcacactagaggagaccgcattagccgaggatttggagacccagagcaactccacgatgttatcatcttcagacaatatctatttcgatgatctagcattactgttgagcaaaagttcagcttatcagcaagttttccctcaagatgagaaggaggctgccattttactaatggctctatcgcacggaatggttcacgggtgattattttaagtattttaattataactcgcatgcttaagaaataaaatataaaccataccataagccctcatagctagtaatatctagattatttgatacatgaaattttgttgcggtgatatattaatttcagtcagtccaactttattataagagagtgttggggtttagtagattttgtatgaaaggcttgtattttattttttatggaacttgatatcccaacaatgtggttgttcttgttcattcgcatgttttttgtgtttctaagttttgagagttgatataagaattactttaatttgtcaagatctcgtcaagtgtttatacttgatgaaaatcttttggggatcaaaacggtttgaagtaaagatcgtactgtcgtactggtgtctgtagattgatattaaactcgaacaacatgattattgtaatataccttaactaccatataatttttttcaattctttctggatacaattgtaagaaaacagaaaaatcggaaaaatgagaaaattcaccaaaactaatggggttgttttgaaattagtttgatacttgaggattgacaaacgaattctacttttccggggaaagaattagagagcgaaacagaacaaaacaaacaaaaagtcatgtctccgacgacgacatcgttacgatccctaagcttctcgctttacgcttcttctaattctactccgatttctacaccaattgaggcccgacagttactgagttcatgcaatagattctacggtctgtcctcttcgagctcttcttcctcccttactacttcatctttgatcggaaatcttgttttctcatcaaggaatcagtctctctccgtaaaggtatacaatttcgtaaatttttgtgatggatttcaactttacggcctaaattcgagaacccatgttccacttattgagaaatctgcttaattcttatgtcacttgtagtcgattgggaaattagggatttctatatgtgccattgattgtgattactctttatgtggtctttttggtccatttgaagatgttttaagttaggtctctcagccacatagacgattacattagtcctgtgtttaagttcacactgtcttactttgattgaagctaggttgcgttaagggcttttaaataacatctaactttatgagtgtttggtgttgtcagtgtggctacatattgatgaaatgtatgtgtgttttgggataggtccaagcgttagctgctgaaaccgaacagccaaaatggtgggagaggaaagcagggccaaacatg

SEQ ID NO: 22339 - DNA, 3003 bp, Unknown; identical to SEQ ID NO: 22336
  misc_feature (1)..( 3003): 2750-1469P.txt file - cDNA_ID_2051606; gDNA_ID_2926188; Annot_ID_140902

SEQ ID NO: 22340 - DNA, 3000 bp, Unknown; identical to SEQ ID NO: 4655
  misc_feature (1)..( 3000): 2750-1469P.txt file - cDNA_ID_2051633; gDNA_ID_1620720; Annot_ID_49180

SEQ ID NO: 22341 - DNA, 3000 bp, Unknown; identical to SEQ ID NO: 4655
  misc_feature (1)..( 3000): 2750-1469P.txt file - cDNA_ID_2051633; gDNA_ID_1620720; Annot_ID_165783

SEQ ID NO: 22342 - DNA, 3000 bp, Unknown; identical to SEQ ID NO: 4655
  misc_feature (1)..( 3000): 2750-1469P.txt file - cDNA_ID_2051633; gDNA_ID_2926214; Annot_ID_142123

SEQ ID NO: 22343 - DNA, 3000 bp, Unknown; identical to SEQ ID NO: 4655
  misc_feature (1)..( 3000): 2750-1469P.txt file - cDNA_ID_2051633; gDNA_ID_2926214; Annot_ID_202838

SEQ ID NO: 22344 - DNA, 3003 bp, Unknown
  misc_feature (1)..( 3003): 2750-1469P.txt file - cDNA_ID_2051733; gDNA_ID_2926148; Annot_ID_197865
ataattcactgccattagcattaaatctttctccaaaataattaattttactttaaattcttgatttaaattgttaaccacattatcaatcaaatttaatccaaacaaacttcaaatcaatcccttaaaattagcataaacatatttgttaacaatattttaaaacaaagtttttgtttaaatttaaataaataaatcatgtatttgaacttatttacaatgtcatgacactgacattaattatttaggaatgaaaatatttaatcttctaaatccttgcttttagaattattatgtcattacttaaaaggctcaaaatataaaaactttaaatattattatttatatatctaaactttataaaacattattaatatttaaacttataaaaagtttaatatatcatgattttttaacattattatataatatataaagtttaaaaaaatcttaattctttccgtcatattttgtgactcaaaattttaaaaatgaacatatattaaccaattggcgaaaaagtgtgagttctacgtcccacatcgactaaaatatttagacaatgattcataaacatatcataaataagattaacattaataaaataatggtttttttacaggacgggtttggcgggacgggtttagcagaacgttacttaataacaaatgtaaactataaaataaaaatattttataaatagttagaatttgcaaaattttatatataataactttaaaatataaattgtctccacggtgtaccgcagattaaaatctagttttttaataattttctaaggaagtcatggacctttgtcattcgtttatttcggttaaccaaaaattcacataaaaccaaaaaaaagaaaggatttagaatctttcttaacataatatatataaactatgtacggccacggcaatgttactaattcaacgtatttagggtgtgatattggttggggttgttactgaagtttttaactataaaattggctgcaagaaatttgattattgcaacttgtttgttgttaactatgacaaaaacaatgaaacaagaaaatatgaaccagaaataaaaatttgaactttgagtaacgttaagaaatgtgagaaattttagtaaataaaaaaattgattggtaaatcttccctatataattaataaacttatatcggtctttatatcaactcttaattaaaatataatgcctcaagatgtttcctaaggctttatatactagttaatcaaccaaaaaaatgtgattttagttaggttgaatttacatatgttttcttgtaatcgatcattaaaacaaagttgctcttcttgtattatgttcagacaacttggctgtattaatgacgagttagaaaagatgtagaagttgtgctcgaacttattttggaaacacgttttcataaagttaacaccaccggtctggcctaaacatagcaacccaataatacatagaacaaatactttttctttctaaacaaaactaagaagaaaatgattcttttctcctatagttttgtgtataacaggttcatcaaattaagtcttttagcacaaaaataaaacaaaagagatcatgtaatcgaggcaaatgagcttttgtttgcgaatttaattgatagagaaatagatacttgagaaaaataaaaaagctactagagaattgttacaaccttcatgttcacgaggatcttgtttctttttgttgaaccaacacatcaaaatcactcactgtccactcagcagtttcttgtctattgctaacatatatatctgtaacaacattgatcgatgtccacattcgctttgctggtttggttcccgggtactcctgtctacaaagacagattagtttaatgctaagtccaagtcttaagatatgtgcacataatcattataacctggtagaagtagagacggcttgatagagctccattgacctcccaagttcttgaatcaccaatccaaccatttccttgcttaattctcgggataaaattggctgtttggtcctgtggtgggtttataatgttgtagagaacattatagagacaaagaagtaaactaaaattggattctacaaactttaaaagactatttataaactaagtctcagtaacttcttgtacacgcaactcgaaatggtatgaagtatgaacacaatgattctcatgcttcatgatctcgtttcgtagagaatcgcaaaataaaatgacgaaagtaacgaatgatcggcgagcaatacctgcgaggatcaggcaagagagatcggcgcaatcagcgagtctagggttttccattgaaggagcttcgttatcaacttcattacagagattccaaacttctaatacgattcttcatccctctgtctcctaacgctgagacatatctctccgccgcgcagttttgaacggaggaagaagaactctccggtaggagaagcagagcaagcaagagtgaaatcgcaggcattgaaggagcaaacttaaaagcgcgtgaagttgaaggaatggtataggcgcgtgagagtggagaaattcgcgcgtgatttattgcggtaaaaaggtaagatgtcgcattctggaaaatctgaatgattgcttttctctgcttttggaagaatctcatttactccgtttagtatttatatttacatccctacactcttcataaattacaaatagacatataaatttcacttaattacaaacataacccggtactttttcacctagagatattccaaaaagcaaaaagaaacgtcattttcagaaacagaggaccctctgtttcgttcagtgagtgtttgagctgtctctataggcaaagaaacgataattggggaccatatgttcttctttttccagatgaagacgaagccttttagtccacgaagaagacaatgtcttctaagtggtggaacattttcctttcttcttctttaaatctttctgattgcctcttaaattttctgggtccatg

SEQ ID NO: 22345 - DNA, 3003 bp, Unknown; identical to SEQ ID NO: 22344
  misc_feature (1)..( 3003): 2750-1469P.txt file - cDNA_ID_2051733; gDNA_ID_1620729; Annot_ID_166039

SEQ ID NO: 22346 - DNA, 3000 bp, Unknown; identical to SEQ ID NO: 4853
  misc_feature (1)..( 3000): 2750-1469P.txt file - cDNA_ID_2051898; gDNA_ID_1620736; Annot_ID_166272

SEQ ID NO: 22347 - DNA, 3000 bp, Unknown; identical to SEQ ID NO: 4853
  misc_feature (1)..( 3000): 2750-1469P.txt file - cDNA_ID_2051898; gDNA_ID_2926157; Annot_ID_198503

SEQ ID NO: 22348 - DNA, 3000 bp, Unknown; identical to SEQ ID NO: 4847
  misc_feature (1)..( 3000): 2750-1469P.txt file - cDNA_ID_2051917; gDNA_ID_1620736; Annot_ID_166264

SEQ ID NO: 22349 - DNA, 3000 bp, Unknown; identical to SEQ ID NO: 4847
  misc_feature (1)..( 3000): 2750-1469P.txt file - cDNA_ID_2051917; gDNA_ID_2926157; Annot_ID_198496

SEQ ID NO: 22350 - DNA, 3003 bp, Unknown
  misc_feature (1)..( 3003): 2750-1469P.txt file - cDNA_ID_2051936; gDNA_ID_1620736; Annot_ID_166259
agaagaagggtgggcgacgacagaaacgacgccgtttcctttattggagacagctcgtgagactgtgtaaccaccgtcttgaggatcccaccattccggcgagtaaaaccagtctccttcgtcttttattacgacgtctcttccgcagaaatgtcgtacacatgacttgacgacgcttagtctttttccacgctgtgttgtcaacgagaaacgttgaattgagttcatctgagatgacccacgatttcaagatcgccggaaaattaaagggtctgataaaggttttgactttgcggcgtttctggttactgttgcgaaacccttgttagaggttagttaggcttcagggttttaattaaacggtcctatagagagttaagagttaagacttaaagagtgtcgcaagagtttttcacttggttaggtgaatttcacttttaaatgttgttaatatacaaatggtgttaatataagtaaatttagtttctaagaatttggcaagtctaaattcaaatgatatctaaaatatataattagttggaaataggttgtgcactctcccattagctcaatacgaatagagattgccccgctaattaaacctgtgaaattcgacgtcgatttccgaagaagaagaaaagaaaagcttgaacttaaagggggaaaaaagataaacttaaacaaaataaaaaattttatatatgatcaaccaaactatctataaaataaggatatttgacaaataagcagttaattaccttttcgtataaagaaaagaaagtttcatatcgatggattcattgacacatttgtagaagaagcattagagattgaccgcaactttcaaagcttttaatttattagctcgttcactgacgacctaacctctttttcacttgtaatcgccaagttaaaattaaataaacgagatttttcagtaaaataagacttgagttattactttttacaaaaataacatgtttaacaattttgatgtgttagttttcgtaacacgccaatagagaaaatatatgaatatgtgttcagtttttagggtttaaagttttgacggcttagtttccggaaaataaaatcatgccgacctttgtatttaacttttgttgtataatttttcagacaaaaacaaaactcatcaatatcttttcattttcccttagtctgttatttttttgtacttagagaaatgctatctttgccaaaaaaaaaaaaaaaaaaaaagagtaatgctatatgtaataaacagcttggccaaaagagtgtgtaataaacagagtttaaatagaaaaccttataatctctccgagaaaacatatcaaagctacaccaatcaccaatgtctccttagtaataataatcatacatatacaaaagcttatgcatgtgacgttagtttatcggatgggtaccataaccactgcaccgatcacgctatccattttagtgacaattacaacttttagcaaattccaacactcaaccgcgttatacaagttctgagaaaaaagaaaaaaatcgtccaacagaaataaacatttaataaacaaactcgtgattggaaaataaataaataaaaactcgtgatatcaccaaatttcatcggcaacgggcaaattgcaataaatcaaattaaaaatggttttgcagttttcacggtcaacctatacgccgaaactcggcaagaaaaacaccgacttgaccacttaaccacctctcccttaaatttattttttcatcattacacaactgcttcttcttttcttctttgtatgattattgttaatataagcatgattagttacgaaataatgtcacctcataataaattattagatgtctttattttgaagacttttgcttttgtttgcttctgtagaatctcttaaaaacgaatttcaacatcaaagaacaaaagagaagctctccaaaagctggcattatccttttcttcctttacctcctaatctttgcgcgttttttgttataaccacttttatataaacatgcaaacttattttttattagtattttgttaatcgaagaatgtcacataaatccgagttgtttttgctatttaaaatatctacaaatggtttaaggaaagcatctatcaatattaataagtcgtacataatacattaaatttaggcaatctcttacaactttcgtaacaatattaatggaatatcatatgtgctgtagatgattgggatgtatgagaaaagtaaacaaagtgaggccacaagacctttcggtgaagacatcttctttttttttttgcatagaatcaacttgattaatacgtcctaatttaggtgaaatatattcatacaactaatcacatgcatttcataataatatagaaaaccccattccttagacaaaagaaggtcaaaacgatatacaaaaatagttcaatcgaaaccaaaataaagcaaaatttatgaatacatgttaaaattatataaatcattctgaagtaactataatactaggttaatacttatgtttgtatatacaataagttgtttttctaaaaccgaaatcatgtcaaaccgaaccaaattgcaaagtttttgtaaacccaaaataccgaataaattacaccgaaaccaaaccgtaaaccggattgtcttcacctaaattacttatattataaatactacaaagagattatatgggaataggtaaaggataattaatttgataattataatttttgaaagaacaaattttgagaaaaaaaaaaaagataggcttgagagctgtgaatgagctgtctctctttcatttatattccaacctctttctccttccacacaaacataacacaaaacctccttctcttcctcatatctccatatcccaaaaatactcttataacattgtattattatacaatctacatttcccattttaccctcgcttctccttccaattctcaccccattgccacttcactcagatgtcttgtacactgacatg

SEQ ID NO: 22351 - DNA, 3003 bp, Unknown; identical to SEQ ID NO: 20463
  misc_feature (1)..( 3003): 2750-1469P.txt file - cDNA_ID_2051944; gDNA_ID_1620741; Annot_ID_166474

SEQ ID NO: 22352 - DNA, 3000 bp, Unknown; identical to SEQ ID NO: 5137
  misc_feature (1)..( 3000): 2750-1469P.txt file - cDNA_ID_2052045; gDNA_ID_1620765; Annot_ID_167326

SEQ ID NO: 22353 - DNA, 3000 bp, Unknown; identical to SEQ ID NO: 5137
  misc_feature (1)..( 3000): 2750-1469P.txt file - cDNA_ID_2052045; gDNA_ID_1620741; Annot_ID_166434

SEQ ID NO: 22354 - DNA, 3000 bp, Unknown; identical to SEQ ID NO: 4929
  misc_feature (1)..( 3000): 2750-1469P.txt file - cDNA_ID_2052065; gDNA_ID_1620745; Annot_ID_166645

SEQ ID NO: 22355 - DNA, 3000 bp, Unknown; identical to SEQ ID NO: 4923
  misc_feature (1)..( 3000): 2750-1469P.txt file - cDNA_ID_2052069; gDNA_ID_1620745; Annot_ID_166644

SEQ ID NO: 22356 - DNA, 3000 bp, Unknown; identical to SEQ ID NO: 4914
  misc_feature (1)..( 3000): 2750-1469P.txt file - cDNA_ID_2052106; gDNA_ID_1620745; Annot_ID_166631

SEQ ID NO: 22357 - DNA, 3000 bp, Unknown; identical to SEQ ID NO: 4910
  misc_feature (1)..( 3000): 2750-1469P.txt file - cDNA_ID_2052152; gDNA_ID_1620745; Annot_ID_166615

SEQ ID NO: 22358 - DNA, 3000 bp, Unknown; identical to SEQ ID NO: 4957
  misc_feature (1)..( 3000): 2750-1469P.txt file - cDNA_ID_2052198; gDNA_ID_1620748; Annot_ID_166716

SEQ ID NO: 22359 - DNA, 3003 bp, Unknown
  misc_feature (1)..( 3003): 2750-1469P.txt file - cDNA_ID_2052200; gDNA_ID_1620748; Annot_ID_166715
atattataaataaacgtttgtgtttaccaatagcatagttccagaatatgacactgccaactttgccaaactctccctcatgcaaagcacatccctggatgtcaggagtggctttcgcaacatcttgtggtcttccagagagcatgtgatggaacttctttgccgatgctttgatctcaatatctacctcaagttccccttgtagagaagactgacgcgtagcttgtgccatttttcttatacggatgttttgcttctctaggttttaatgagagtgagtgagagtctctttggaaattcatagccacttttatagaggaaagaataagcaatctgtggcaagagtcattattctaaaacaacagagtttcggaatgttggaatatatatggtcccttacggaagggaaggaatcagaccaactagctgataacaactacaatttcttttagtcagttgtggccttatgggaatcgattcagtgatgtgtccacaaaaaaaaaatatgtttcaagattgttataggctgctattatcgaccacatataccaacgacaaaagtaagcccgttcagaagaccaatatcgttattcgaaagcatgtacgttgtcttgaagccctgcttgtagaatctgcaaattaaataacttctcgtatagtactattcacatatcacaacacaacttccattaatcgatttttgggagcgtcatgtgtatttttatctaataactctaacaaatcattgtaaggaaggatgagtaattcctctaagctttttacgtagaaacttttgcatgtaaatacttatatgtaaaatttatagcgaaaatgaaaacatttgagaaatgtatattagtaaaagagaatcacttttttcatgtcaattttctcttttaggaaattcggtgcatggaattcatgcttagttagctttaggaatataaattcctcatcattgattaatcaataaaatagatagtataataccatactattagaaaataaatttatccaataaatagagtcatttaaaaaaaagacgattgtgtaaacatttaaaaatttaatggttggccatttgtaaaagtaagtgcacacaacaattgaaataggtactttgtgtcaaggatatgatatccttgacacttcagatctattctgtgagtaaaattaatactgtattttcatattagttaatatgcgatttgtttcatgtcatcatttatgaaaatttataaaaatattattttcatagcaagatctgatttatttgacaaggaactcggagacattgatgatatattcatgattcagacaacaatctagtctcgaggtcgcgtgtgtaatcttcaacgaacgcagtgtatctggtagggggaggaacgtcgtcatttaacttctcgtattcccatgtccactttgcaatacaaactttatgatccttaggaacaacgtcaagtgttatcttatagctcttatattgctttaacacatctccttcaagagctaagaaagacaccgacttgttctcttcatctacgtctatcttctctttgatctgctccatttttccatctataataaacccaaagtaaccgatggaattcaagaattagaaaaaaaaaaaaaaaaaaaagagagaaaaaaccctatttttcaagactccttaaaaaacatagacagctagttatagtacataccaacgatgaaattccagatctgaatagaggagttggatgtgggatcgtcacgatgaacataaactgcctctgtcttgtccgtgaaatttccttctttcttcttgaaagtcttgaagaatctctcggcggtcatattcacttggatctctaattcgagagtctggacaccagccatggctctaagataatccagtctctcacgctgacttttctgttgtttatctttaccataacaaaaagcatagagtagaaaaccaagagaagaaaacaaaaatagaggtaggcaaggtaggtgccttatgcgtagcagtttcttgataagcataacacgtgttgttaattcatattttaagtattgtctaagtgtattatacaatatgtattttcatttttgtgtttggtaagaacagtatttattttcatttaacaagtaacaggaagcgtaattttgttgttggtaaactaaggaagcgaaaattattttattaactaagaacaatatttaaatgttttcttttcaccataaccaaagaggacacatttcataagaatgaatatgcgacacacactacacgttggtcttagcccatatttggcccagacctataaagtataaaccatgcatgacgctgactctgagatacgttcttggttcggatcaaaatcaaaccggtatataaaccggataaaaccgggactggtaactgagtaagaatattgatgaagagaatatgccgtggaacagagagagttaaggaaaaagattcgtgagtcattcgcatctctctgactctgattctctctgcttagttctcctcgttccttctctctctctctttatagcatttcttctccaacaattcttttcgagtttttacggccattgcttcaggttctatctttctctataggtttgcatgttttctatgcaatcattttctgtaatatagctatgtgtgtttgcttcttcttagcttttccgttgaattttatcgaaacgctatatgctttgtggcccttattcacataaaattcatacgaaatggaaaagagaaaaagcagatacaattctggtcattgataattcagcatatcatgcagcaatcaaattttaggtgttgacttgtaaccaatatttctctctggaaaacacatgtatgaccaattattatggtttaatttatgaatacatttttatttttgtcatcagaacagaacaagggagacaacaaagtagtttgattattctggtggcgtatagataaatgttggttgtctgtggtttagcaagattaccatg

SEQ ID NO: 22360 - DNA, 3003 bp, Unknown; identical to SEQ ID NO: 20547
  misc_feature (1)..( 3003): 2750-1469P.txt file - cDNA_ID_2052254; gDNA_ID_1620753; Annot_ID_166863

SEQ ID NO: 22361 - DNA, 3000 bp, Unknown; identical to SEQ ID NO: 5017
  misc_feature (1)..( 3000): 2750-1469P.txt file - cDNA_ID_2052277; gDNA_ID_1620753; Annot_ID_166853

SEQ ID NO: 22362 - DNA, 3000 bp, Unknown; identical to SEQ ID NO: 5003
  misc_feature (1)..( 3000): 2750-1469P.txt file - cDNA_ID_2052322; gDNA_ID_1620753; Annot_ID_166838

SEQ ID NO: 22363 - DNA, 3000 bp, Unknown; identical to SEQ ID NO: 5018
  misc_feature (1)..( 3000): 2750-1469P.txt file - cDNA_ID_2052346; gDNA_ID_1620753; Annot_ID_166828

SEQ ID NO: 22364 - DNA, 3000 bp, Unknown; identical to SEQ ID NO: 4996
  misc_feature (1)..( 3000): 2750-1469P.txt file - cDNA_ID_2052355; gDNA_ID_1620753; Annot_ID_166824

SEQ ID NO: 22365 - DNA, 3003 bp, Unknown
  misc_feature (1)..( 3003): 2750-1469P.txt file - cDNA_ID_2052396; gDNA_ID_1620754; Annot_ID_166900
tttgtcttttaatttatttttttatctaccaaccaatccggtccaagagccaaataattactctaccacaaggttcgattttttcaaaatgttcgactaaattggcttttgtaaaaagcttatggcctactaggctgcataaactccgaaatcataaaacgtggatattcataaaggggttccactttattcaacttcttaattagaaaaatcttatagagacggtcgaaccctcttatataatttaaaggttctagtgttaggcactagtttgcttaagaagatactcatctatctctttgaagttcttgacagcaaagtccttgatgacatgtggatcatcgatctcatgggcggtcttctcaaactcaccagaccatttcagaaggctaccaccatccttagggataacggtgatggttcctttgaaggttttgtagtactccaacatttctccgccaatgatgctgtacgacatgcttttgttctccaaatccactgcttcgatcctctccgccgatatcttcaccagtggagatcctatattacggtaaagagtagaaacaatgagcattttttaaataaagatatggtgagagagtgaaatatagtcaatgaagacatagatcatttagggtttataatgagttattgaccattaagtaacatgaattatttattattatctttaatacatacaagtcttcctatctagaaccacacttgtttttttttttgaaagatgtcttcatgaatgtagtactcaatcttgaatgcgacaagatttatgctaattacttaattagccatttaggtatttattcgaaacatgatttattaattatggttacaaattaaagacaaaatgagaaatgtaccttctccataagtaatgaggcgaatggagccaggagcgttgccatcgccggctagaacttggatggttttgtagtcgttagggaaagctttggggaagagattgatgccgtcgccaagggctacccagaacttttcagccggagacttaacctcaacctccacatgaagaacaccactcaaccccatttgtttctaattaaaaaaaaaactcaattattttgtatgtctttgaatgatttgtttgtataacttgtcaatgaacgtgtctatatatagagaggttttaaagcctttagtgatatgataaattgcattaactatgtggagcaactcatccaactaatttttcatcctatgggtcctttttaaaattaacctaaagcttatacatttgccattcttcattgctatctcacccactcaaagaggtggatgaatcaataaatcgatgcatggtataacattcagtacaaagaaattaaaactggttttgtactgctttaaaacaaaattgtcggtgataaatgttgaaaaacatatagtattgagagtctatcggccaaaaaaaaaaaaaaaaaaaatctagatatttttcatatattcatacacgttatttttatggctacactcatctacatatatatttttcttattatggatttaaatttttaggaaacaaaattatttcaacttttcatgattatatctaccctttttaacacttgattaattggtttctcttctttcaaggtttttagatcaaagtttcaattgtttgatttatttgaaaaactatttatcatagagagtgtttatggcctagagataaactaatcccttgttcgtatttcttcagatcgattttgtgagattaccattttttcagatcacttacttggttctttgttgaacaatggtaatgtcacacaatcgatctgaagaaccaagtaagtgaagtagcatattttacataattggttctcatttacgacctctcataataactgtgggccaatatgtgaaacatgatgagatttaaatggttataaataatgtattatcattgatcaaaaataaatcagtaaacgttcacgtcacacaattagtcaaacataacaacttaataattgcaaattgcatttcataagaataaaactttctaatcataaagagctgaatgtttcctctttattttctacaataatcttcttggtggcactggcatggttaggtgcaatgcaataaagccaaaacaatttcttcatcgttaggtactttgatttcaccattgtgcgagaaaacagcatgttggtttccattgatataaaacgacaaccactcttcaatcgtaaaataaaaatgttctaagaatgagtcatcatttctattcgaagcaaaagttcatccgaacccaaatccttaatatacaattggatacgttaaagttacagtatcctaggatttgtcaatcttattaaaaaaaactaagattgctttaagaaaattataggttttctccacttataaagtttaacttttataatctctctctcaacgaactatgaaaacaacattagtaaatagtaatatagaagtctagagaaaaaagttgagacgaaaagggtaaggaaacactctgaaagcagcttcccatctctatttgatcgacagagatacgtacgtacacaaactggttagaaggagatagattcagacaagagaaccaaaccgagaatttgagcttagaaaagttaaggaaacatcaagtctttactttctcaagatggctctcaatttcttttgcttcacgtacatgtaatctacgtattcttcagctctaccgtctctttctctctctcttgaactttcggtagttgaaatactgctgttgagtatttcagaaacctaaccctcaaaatcaattaactttattgcactctatatttatcatcttcaaccacaacaatcttctgtttctttggaagcaactaactacaaagaacatcttcacgactagaaagacacatacccttctgtcttaaggacgagaccagaagcttcttctatcggctttgtaatggtctacaaaggataagaaaaaaccaaatccaaactaaagctatg

SEQ ID NO: 22366 - DNA, 3003 bp, Unknown
  misc_feature (1)..( 3003): 2750-1469P.txt file - cDNA_ID_2052454; gDNA_ID_1620754; Annot_ID_166882
atcgccatcttctatcgaagtaatagcaatggttcctttaagcgtcttgaagtgtttctggatttcagtgccactcattttcattgtcatcgtttctccaagtccatatcctcaagaatatgatgtaatggtaaagagaaagagttacaatttggttcaaaagggggcgatccgtttcctttacgaaagctgaaaagaatttgtctgccggagacttaacgtcaaactttacaggcaaagctcccttgtcattgtctatttgttttttttaagagcaaatgtttttagtggatgtgatattaatcttctcaactaaggtgtctatatagagaaaggttgataaaagttacattagttacttcaacttaagttaactccatccactttactttcttcaccgtaaggaatctcaccaactttagccaaaagctccaatatttgacctttgctttcatccgctcaattatttaacgtgttaggataagtaaaattgttcatatcgttttgatctgcataatataccaattaactccaatcaagcaagtattttacgtaataggtgtttttctaaatacattattcttaagaaatgtgatcaacagaaaatcgttttgactaatgacgactattgtgaaataaattaacgaagtcacgagttactcaactttcacaaactgatgagcaacctgaattttcaattatgtttagcaaccaaattttgatcttcttttttttttaatacatctagcgattaactacttggaagaaaatataaataatgcgacctaatctatttcccctgcttaattttgaaagaaactcgaaccatacgcaacttatctatatttagtactttatcatgaagaaaaatgtgaacatgtgaacaatgtctttgatgaaaagaaagtggttttgactaatgtacatcatcaaataaatatcactaaatgctcaagtcactcaactaactttagtttcaattaccatacattaggaatagtaataaaaatcacattagaattttcacaatatattatctgtactagatcataaaaaataagcgtgttacactgttacgttcttttttttgtttggttaagcgtgtaacaaaaatgattcttctctattacccttattaagaaatattatgactatatgtgcgaaccaatgtgcacgtcacttttgctggtatgctgatgaggatgtcttaactcttaacttttgctatttttttttcttatcagaaataaatattacaggaaatttagcgtatgtctcaattaaataattctgaagagagatcatataaccattttttgtcaaggaaatcacataaccctcaaagaaaataaaaacctagctagcttgctagctcgcacttaatttatgatttaactgattcaactgcatagtagaccactttttcttcttttttggtttataatcataatagaccacttacttcaaccaaaaaaagtttttgaagtagttgattttgtaagtacattattaaaaatatgattataaaccaatgtgaacatgatcagtggcggatccactaaggaaggaggggtgtcagttgacccaggttaaatctacaaattaagtttaatgcatagaaatccttaaagagatagcagcatagttggtagttctctttctgttgacacccctaaacaagagttcgaccctgccttattacacttttgagtaatttttattcttttaacatatatctatgacccccctaaaaataaatcctcggtccgccattgaacatggtgaatgataagtgttaacaaatgaatattataatataactatgttagtaaaaggattctagagatcataatagatacatatatttacggtttctgagttgatgttagtgaatcagataaagtgattgttccattggagatgagagtttgtataaatttcttaactgaaaatggcaatgcgtgaacgtgttgtatcattatgactcacacattgttattttgttcataatgagtctgttcaagtaaagtggatgtctacgtggaagaaaataacaaattgtgcaaagatgattcatttcatctgcttaatgtagcaagtaaatgtgaaaaaaggatttgacgaaaacaaaaattgcaggaacaattacttctttttttttttggtcaagagaacaattacttttttaaagagttaatttatctactaactaaaattgagcttgaaagacagctgcgcggacgattttacccttatcggcttctttaataaaagttgggttccagggaacttttatcacttatgccacttttttgaaaaaactgatctggactgccatcagttaatctgaatgccaccgaaaatgtgatataccagttgtacccttaatgagttgattaaaaaaatgaaaaagaaattcaaaagctaaataaagaaaatcgagttcggaggctcctcttcgtcgtcgtgttcttcttctttggtcgacgttcatcttcttcgtcggccaccatcgatttcctcatgccgccgacttgaaatccggcgtaaaagccacgaattaggtcagtttcttctcatatttcctttgacattggtgcattgtgattttagattgggattttgaattctatataattcccagctcgattcaatttgatagtttgatgattggtttgcaaagtaaagagtaatcgattagaggttgccgaaacgttatttgaggtgatgagcaaaggaatgtaggttgaatgtgagttgaatttgaattccgagatttcatattaaagatttggggggtttgtgtttgcaaagtttagattaaccaattagtttaacgaataggtatgtattaacattggaaatcaattgaaaggtaacgaattaggttcagtagaatcgagtgcgacgagagattgatttcaacgtatgataagagtacatgtggtataactattaaaatgtttgattggagttgaactggttgtattttcaggagcgatg

SEQ ID NO: 22367 - DNA, 3000 bp, Unknown
  misc_feature (1)..( 3000): 2750-1469P.txt file - cDNA_ID_2052629; gDNA_ID_2926144; Annot_ID_197632
tttccaaaaataataaccaatcaaaatcaacatataagatttgatatctaaattttaattaatttaatttaattagaaaaacaaaatacattattaatttccaaaaaagtaaccaattaaaatcaacaaattatattttatatctaaattatcatattatttttttattaattattatagttcacttctcatctttatatgattctatttttgcggaaaataatatcatcattataaaagaaataattagagttatttcgcatatgccacaatttgaattcttaaaaacgaatataaactgttcaatacatgaaaaaatattataacgagtgaaaaatagatttaagaaaactttctactgagtaacgggtcataatttgaaatatttatattcaatttcatacatattatattgaaaatttataatcttatatactacaataattaataacatattagatgtgattcaatttttaatacaagctggaaaatcctagaattgacgggtttagatcgatattaatacaagatggaatactatatgcgaaactcttaaattaacaatcaaagtacaagtgtataatcttaaacactaaacaatatagataatatcaacaaaacatatacaactcacaattaactatacatttaaaatcaaataaaataatatcatatatttttaaatcatctttacaataaaagtttttagtttaactaaaatacaagcctacctgcggtatactgcaggttaatatctagattatagggcttattggatctaaagacgggtcatcaaagatttcctaaactgaagcaaaatatactgaatattcaaatatctatctgttaccaaattataaacaaataagtcaatttaatattttatatacaaaatcaattaaatcttaatcacatataaaattagcacaaaaaaaattattcaacaattaaaacattatcaaatctctgtgttatataagttttgatactatattcgaataatgtaatataccttttcaatttgtattctttaactaatttaagctaactaatatatttgttaatcttatacctatcaaaaccgactatcgttttttatctttatagtatttttgcaagacttttttggtggatttggataaaagtgcattcggatcatatggtacattcccctattaaataaatatggtgcacacctatgttattagcaaaaatgtttagaatataattcaaagtcatatcattaataaaattaatattaataaaataaattggtttttggcaagacgaatttggagggacgggtttttgaatcaacattaataaaaaataaaatataattaatccaccgtttcaatacgggttaaatctttaatttattattttttaagaccactaatattaaacatatcaaatcatcctaatttagaaaagattatataaaaccaaaaatgttatgtggtatgtataatgttactatatataaaattaaacaataaaatataaatgtattagagaatgatacaatttgcaaaacttttatatataaaaaataattcttaaaatttaaaaattactactttaaacaaaaaaatcacgggacgggtaaacaaattacagaacgggttttattttggaattgggttatatggtggatgtatttgaatcaatatttataaaattttaaaatattattaatatgctgttttaatagggattaaaacttcagttttttaacaattatctcatggattcgtggtatagctttacttaataacaattataaactgtaaaataaaaatattttataaaaataaaatttgcaagttttaatatatattacttttaaaaaataaatcgtaccgcggtataccgcaggttaaaatctagtcgtttagtagatttgagaaagcggatcatttttcaggaaactgtataatcgagactaactttgaatcatttgtttcaaacgcataacaatcaacttttttttattctttataacacaaagtaatgcttcttactccgagtgaaggggtgaggggcacctggaaaaacactttgcaccaagcagtaaagtataatcattttcttgaaaacactaccaacataggcccataattggatccatgaattttcatgaaccatcaatccaacatcttatattttgatttgaactatccaatttttctctaataaactaatagctctagattcaataggatccaattgagttttttcccacattgctacttcccacaattggactatccaaagctattaatagattttctatatttttttttattttttttgtcttttgaactatgagtgattagtttttcgaaaatgttttgaagaacgttaacaatctatttttatacctcttagattctctcggttccttaagtcatatttcaatatacccattaattatcagaagagaatctctgacaattaacattacacaatctatttattttattttgatttaaacaaaatgtttgtcaagtaaaacccattgttttcttaaacaaaaaggcaccctactagctccaacgatttatcatcattttccgttatttcaaaattaaaatgaatatgagaagtcaaatgtatttatttttagtaatgtttcacgtattttactaaatctgattatccaaacagaaatcatcatgataacagataatgaattaattctataaaaaaaaaaacagatagtcaaatgatcacaaaacattaaaatcgatgacaacaaactaataacctattcaacaataatctctaatctccaagattaaaggaacaagaataggacttcaaaatcaaagaaaaaacaaacaacgcaattcttatcttttctttttcctaacttcacttccatatataaaccccattcttctatcatcatctcaatcaagaaaacataaagctaattaacaataagaaaccaataaactctaacgctcttcaaagcaaaaaaaaacatcaataatg

SEQ ID NO: 22368 - DNA, 3003 bp, Unknown
  misc_feature (1)..( 3003): 2750-1469P.txt file - cDNA_ID_2052629; gDNA_ID_1620757; Annot_ID_167019
taatttccaaaaataataaccaatcaaaatcaacatataagatttgatatctaaattttaattaatttaatttaattagaaaaacaaaatacattattaatttccaaaaaagtaaccaattaaaatcaacaaattatattttatatctaaattatcatattatttttttattaattattatagttcacttctcatctttatatgattctatttttgcggaaaataatatcatcattataaaagaaataattagagttatttcgcatatgccacaatttgaattcttaaaaacgaatataaactgttcaatacatgaaaaaatattataacgagtgaaaaatagatttaagaaaactttctactgagtaacgggtcataatttgaaatatttatattcaatttcatacatattatattgaaaatttataatcttatatactacaataattaataacatattagatgtgattcaatttttaatacaagctggaaaatcctagaattgacgggtttagatcgatattaatacaagatggaatactatatgcgaaactcttaaattaacaatcaaagtacaagtgtataatcttaaacactaaacaatatagataatatcaacaaaacatatacaactcacaattaactatacatttaaaatcaaataaaataatatcatatatttttaaatcatctttacaataaaagtttttagtttaactaaaatacaagcctacctgcggtatactgcaggttaatatctagattatagggcttattggatctaaagacgggtcatcaaagatttcctaaactgaagcaaaatatactgaatattcaaatatctatctgttaccaaattataaacaaataagtcaatttaatattttatatacaaaatcaattaaatcttaatcacatataaaattagcacaaaaaaaattattcaacaattaaaacattatcaaatctctgtgttatataagttttgatactatattcgaataatgtaatataccttttcaatttgtattctttaactaatttaagctaactaatatatttgttaatcttatacctatcaaaaccgactatcgttttttatctttatagtatttttgcaagacttttttggtggatttggataaaagtgcattcggatcatatggtacattcccctattaaataaatatggtgcacacctatgttattagcaaaaatgtttagaatataattcaaagtcatatcattaataaaattaatattaataaaataaattggtttttggcaagacgaatttggagggacgggtttttgaatcaacattaataaaaaataaaatataattaatccaccgtttcaatacgggttaaatctttaatttattattttttaagaccactaatattaaacatatcaaatcatcctaatttagaaaagattatataaaaccaaaaatgttatgtggtatgtataatgttactatatataaaattaaacaataaaatataaatgtattagagaatgatacaatttgcaaaacttttatatataaaaaataattcttaaaatttaaaaattactactttaaacaaaaaaatcacgggacgggtaaacaaattacagaacgggttttattttggaattgggttatatggtggatgtatttgaatcaatatttataaaattttaaaatattattaatatgctgttttaatagggattaaaacttcagttttttaacaattatctcatggattcgtggtatagctttacttaataacaattataaactgtaaaataaaaatattttataaaaataaaatttgcaagttttaatatatattacttttaaaaaataaatcgtaccgcggtataccgcaggttaaaatctagtcgtttagtagatttgagaaagcggatcatttttcaggaaactgtataatcgagactaactttgaatcatttgtttcaaacgcataacaatcaacttttttttattctttataacacaaagtaatgcttcttactccgagtgaaggggtgaggggcacctggaaaaacactttgcaccaagcagtaaagtataatcattttcttgaaaacactaccaacataggcccataattggatccatgaattttcatgaaccatcaatccaacatcttatattttgatttgaactatccaatttttctctaataaactaatagctctagattcaataggatccaattgagttttttcccacattgctacttcccacaattggactatccaaagctattaatagattttctatatttttttttattttttttgtcttttgaactatgagtgattagtttttcgaaaatgttttgaagaacgttaacaatctatttttatacctcttagattctctcggttccttaagtcatatttcaatatacccattaattatcagaagagaatctctgacaattaacattacacaatctatttattttattttgatttaaacaaaatgtttgtcaagtaaaacccattgttttcttaaacaaaaaggcaccctactagctccaacgatttatcatcattttccgttatttcaaaattaaaatgaatatgagaagtcaaatgtatttatttttagtaatgtttcacgtattttactaaatctgattatccaaacagaaatcatcatgataacagataatgaattaattctataaaaaaaaaaacagatagtcaaatgatcacaaaacattaaaatcgatgacaacaaactaataacctattcaacaataatctctaatctccaagattaaaggaacaagaataggacttcaaaatcaaagaaaaaacaaacaacgcaattcttatcttttctttttcctaacttcacttccatatataaaccccattcttctatcatcatctcaatcaagaaaacataaagctaattaacaataagaaaccaataaactctaacgctcttcaaagcaaaaaaaaacatcaataatg

SEQ ID NO: 22369 - DNA, 3000 bp, Unknown; identical to SEQ ID NO: 5133
  misc_feature (1)..( 3000): 2750-1469P.txt file - cDNA_ID_2052751; gDNA_ID_1620765; Annot_ID_167312

SEQ ID NO: 22370 - DNA, 3000 bp, Unknown
  misc_feature (1)..( 3000): 2750-1469P.txt file - cDNA_ID_2052792; gDNA_ID_1620770; Annot_ID_167503
caaaaagcaagtcctctttgtgaagttaacaagaagcaaactatttatcagaataagcaacaatttcgtcatttgcacaagctgccacattgatcaccattgtccccttggtcgttgttggcactaatttacaacaatctctccgtggagcctacaaaaacatttgactggcactaatttacaacaatctctccgtggagcctacaaaaacatttgacaacagcaaaaattatgtaccttgctccacctatccggagtaggctttttgtagacaaatatctgattgatctcggaaggatccgcgattccccattcacatttaggataccattcgtcgtgcctcaagtattggctaatcgtcgttgtatcagaagaagaagagttactaaacgcatgagagaaataaaacacacgaggacgctgacaatccgtccatgttaccggacgtgtgttgaatgcaagattagtcgctgacaatccgtccatgttaccggacgtgtgttgaatgcaagattagttcatccttgctggcatatacgtacgcgtgatttgaactgtgtatccccacgagattgacattgtccactgatgactcttatcatagcataccgattgttggacaagactcgctgaatcgagtttcgctgggatcattagcttctttaatgcgttgactcggtttgtttttgggaatataggatccactacgtctaggtgatggattgatactattggtgcttgtggatggacagataatagccctaagagtggattgatactattggtgcttgtggatggacagataatagccctaagagagtaagtgaagtaacaagagtcaatgacaaatgaatctaatcacggattttaagttttactatttcacatttactttgtgtttttccggctgatttttctcggtaataacaaaactaacctgatggaatccaacttctttagtgagaggaacaccaagctcagccatacaagcatgaatccgatcatcggatccgtacaaatcggagtatctctcgatacaccgatcttgcatcttctccaaaaccttggatcggagtatctctcgatacaccgatcttgcatcttctccaaaaccttgggaaaactgatgaagattctgcaaatgactctcggacggagctccgatgtaataaaactgtttatgatcgtactttctcaaaaccctaacaagattttccgtgaaaaacacggtatcgtcgtcacccatcacaacccacctcacgtttctctccgcttccgttccgtttaacatcctcaccgtctcggacacgattctcgtgatcctgatcgctgatctgtgaccgttacggtaacggtacttgaaactcggatcctgatcgctgatctgtgaccgttacggtaacggtacttgaaactcggtgtcgttgatgggtttgtcgagccaaacggcgccgttcatgactccgttaggtttccaccatgttttcacgtattctctacgatgcttccatagatctgaagacgcggcgattccgaagactatgtgtttgagctccgtttgttcctcaggtgtttgacccgacccgagacggataacgggtacgaggagagaattgggggatttagaaggtgaatatgggtttagaaaagagatgaaactgaatgagtggatttagaaggtgaatatgggtttagaaaagagatgaaactgaatgagtcatggagatgaagaagaagaataaaagggtttattagatttgtcgtaagaaagtgttttttgatctcccatggctctgattgacatagaagaagactagttttttttttgctttgtgagttgtgacagtggtggtgttggtgagattgaaggctttttattaagaaatgaaaccaagtttatttttttttaattacaattataatctgtattatctaatgccaaaaaggcaaggtttgtctcgatgctgtataatctgtattatctaatgccaaaaaggcaaggtttgtctcgatgctgtttaagacaacttaactcaaatttaagacaagatatattttgatgatgtctaaaataatcttatttagttaaaaaaaattttggatttagaaagaaatctcctttttatatttcccaatttattagagtcaaagctgtttttggaacattaattctccacaagaataaaaccataagatggaaaacgacatttcaacattaatgattacagtaattaataactgaaaatagcgtttttcacacaaatctatatgattacagtaattaataactgaaaatagcgtttttcacacaaatctatgatactttgtctaaagtcaataccttttttattggagtacaattcatgataaatatctcttctatttttagtggttgtatatattttgtcatttataagcagatttaggcacatattattttgtccaaaacatattgaatttgtaaccatatatatttgacaaacaccgtgattaattaatgattatatatatgtacgtagttaagtaaattcacaaattcacaactttgtgtgtgtgtgtttcttaatagttaagtaaattcacaaattcacaactttgtgtgtgtgtgtttcttaatatcattaggcccaaaaggcccagaagttgaaggtgactaaaacgacgtcgatgttaccgaataagaagcagagttgacgaaataaacctgtctcttcttcttcttcatcttctttccctctttgccaagcaaaatttagaattctttctttatctctcagcgagaattttggctaagaatctagctaccttcaagtctctccaggtaatatacaagttctatgatctcttcacattccattgacttcaattcaggtaatatacaagttctatgatctcttcacattccattgacttcaattacactgtgttcttcttcaattggttaagaatgtgattaagacttctaaatcctgatttttgattttgatttgtagatcaatg

SEQ ID NO: 22371 - DNA, 3003 bp, Unknown
  misc_feature (1)..( 3003): 2750-1469P.txt file - cDNA_ID_2052823; gDNA_ID_1620770; Annot_ID_167493
tttgggcaaagttatgtctttatattaaatgtcgtgtctatgagtctatatttatgtgatatagaacaagcttatcttttgatttacacttttagtaatagtagtttgttaagaaaacatgcataaagcataattctatgtgtgtgtatttcacttcacatatagcatatatatgaaaacttctctctatttcctagttaaaatctctacagtcgtagttaattggctaggattaaggaagttaagcttgtttccaagtgattgagatgacaaatcttcctctgttcgcaacaaccattgtttccaagtgattgagatgacaaatcttcctctgttcgcaacaaccacgttgttttacacttattcccaagcatcatttttttttttggtttatcttttaattgcaatatacatatatagtacacacatacacgagatatatacaaacgtatgcaattgcattctataaattgatgttagtgaaggatatttccaatattacaagcaagcatttatttatatgttatgtacaatgtcttttgtgttattgatcaattactcctgtcgtgtttttttggcattattgaatcaacaacattgatcaattactcctgtcgtgtttttttggcattattgaatcaacaacatttgctcgaattcggaaactcttccaattattaaagattgctgaaaatatcattttatctagattcttatcactctttcatatttgttggcattattatccatttcaatttcgttataaaaaaaacaggtggtaagtttgcaaactgagctttcatatctacaagcacacttagcaactctagagctgccacaacctcaaaacggacctcccaacaatatcaccgtcggtgtacgacctctcctccatctaacggacctcccaacaatatcaccgtcggtgtacgacctctcctccatcttcgagccggtcatgtcctccacttgggccatgcagcaacaaccacgaccgtctgatcatctcttcggcgtcccgtcatcgtccaatatgggcggaggcggtgagctccaagcactggcgcgtgagtttattcacggtgggcaaatgccagctcagccatcgccgggaaccagtggttctgcctcgtcagtgataaaacgatatagttagccatatgtttctccttgtaatatatatacttggtcgaattctatagttagccatatgtttctccttgtaatatatatacttggtcgaattcgtatttaaattgttgtctagaatgttaatataagaactatatgatttacattgattaaatggagtatcttataggccaatatgttgaagttgctttggtctcttggaccatcgaatatgttgttttaatcagcctagagtacaccggttctccacaacttgggtggaatcttgagcgtgaaggaggcttgattctggcgcgggccttaaatgggttcaataaagtttttttttcttatatcaagcagcccgggccttaaatgggttcaataaagtttttttttcttatatcaagcagcccaaaatattatttaaacccgactcaattgagtttgatactctggtttgctttgtagtccacactattttaacaacatcttcgaagcatgcatttgatttaacaatcttcctaatttactagagaatttgagccaattttgtcttttttttcaccatttttataaaagctggttttcaacttgtgttctcttagcatttccccgatgtctaaggactaagctacataaaccaatgagtaaaatacatatggacgatgtctaaggactaagctacataaaccaatgagtaaaatacatatggattggacaataatcaccaatcaaaaccccaacgtcgattgcatagccgataagtagtaccacaatggtgagaggaggatagtgccagcggctatgaagggtcgacgtaaaccaaaccttgatgagacactgtaaaacacgactattggttgaacaatcagttccaatcgaggctcacaaagtcaaagcatgcttgtaagatgaaatgaagtttagccctatggctatagaagcaataagccatttttatatgaaatgaagtttagccctatggctatagaagcaataagccatttttatattcataactttagaggtattaataagaaacatatataaatttttttataaatgtattgacaaaaaatcaagtaaaaataagcaagatgcaaaacataagcaacatttctaattaatattatataattttttataatgattttatacatgaaaaaatctctaattaatagatatgacacatgtgtgatcatgtgagttatcatgtcattttttgaaactaagtgaatgaataaagggttgagctaagcaatatgtcattttttgaaactaagtgaatgaataaagggttgagctaagcaatatataattgttgatgatgaaataataacatgaatacaaattatatttatatgtgtgtatcaattagtgtaatatttaagagagaaccattggagtagagccttacaagacaatatatgatcaccattggaaaactttaaagctattactatggtaaaaactcaattgcttgaattcgaattcaagtaatcaaaatcttattattaatctatgttatcaccaaaatagaaacaattagatatagcaagtgacattaatctatgttatcaccaaaatagaaacaattagatatagcaagtgaccactattttccttctaagacaccatacgaactaatttttatcaaaaacaaattatcaagctctattacaattccgcatgtgtgctatacattagattaattaaaagaaattaaatctgttttcactccatttatcaaaagtaacatctttaacgaatcaaacccataaggtactcttactctctattaatagaggagaatacaatgataaggtcaaaatgttcttgccatcatcatctacttgttcttgtacaatg

SEQ ID NO: 22372 - DNA, 3000 bp, Unknown; identical to SEQ ID NO: 5192
  misc_feature (1)..( 3000): 2750-1469P.txt file - cDNA_ID_2052834; gDNA_ID_1620770; Annot_ID_167489

SEQ ID NO: 22373 - DNA, 3000 bp, Unknown
  misc_feature (1)..( 3000): 2750-1469P.txt file - cDNA_ID_2052868; gDNA_ID_1620770; Annot_ID_167478
agaatccgtcggtcttgtttattatttgctaagtttattctctgctttatgaaattattttctcattcttttctttactccaatgaactctctgctttatgaaattattttctcattcttttctttactccaatgaacgatggttcagtggattaaagaaaacaattttaagtacaatgttgccaagaagaatcaaagagaaaacacttggtttaagtaagagtataacaataacagacaattaaagaagaatcatatgcatataggagacaaatcattattctcatcatcgtagataacatggacaggtttatcgacaaagtcgttgtcttgaacgtaacaatctcgatcataagtaggcttctccacgaaattgttgacatgaacgaacaatctcgatcataagtaggcttctccacgaaattgttgacatgaacgcttcaaacgattagacaccgaactcgtgtaatgaggaggtaaaaaagttttgcatagcttctccttaagtttatcccatgatttaataggattcttgccagctcgcttgcgtgttttctgcttttgttgccaccatgatgcggcttgccctcaaaatttcttaatcacaagcgaaacaaatagatcatccgaaacgttttgaaactccaaaatttcttcaatcttcacaagccaatctagtaacgaatcagaaactccaaaatttcttcaatcttcacaagccaatctagtaacgaatcatcatctcatgtctttcacagacatcgctgcaagggaatcaaaccactaggaacgacgtggctctgataccaactgatagaaagcggaagctaaataacagacaaaaacgcaagattttcaggaaaattcagattcacgaacggatcttttttagaacgtcaaaacttgacaaagaggcaataggatagggtcgagatcggtagcgatatcgacgaggtttaaaaagtcatccttgcaaggtttgaacacatagcgatatcgacgaggtttaaaaagtcatccttgcaaggtttgaacacataaaactctttattcaataatcaatagctaattcattctacaacgtaaggtaagaatcataaacaaaaccttaattcttaaaagaagttaaaagcccaataggtaaagcctatctctttaataaaatccataaactactaaatcatgaatgagaaacaataaagaggtttggtcacgacgaggcccatcgaaggcgtgaacaaagcaaagatgcgttgcatcacccatggagggactttctccgttagaacaaagcaaagatgcgttgcatcacccatggagggactttctccgttagaatttttttttttttttgttgttgttgtcgaatcatagtaatgtgttgtcaatgatcaaatgagagttagattatgtttaaggaaatgtatatgattaaagaaataaggaaattcctttaccaactttatattgtggtaattgttaattacttcccgccgatcttggttttttttttttaatcataattattattactttggctctaatgagatgaagaaatcttctctatttttctttatccttatcagtcctctaatgagatgaagaaatcttctctatttttctttatccttatcagtctcatcatcctaaaatctaatacaaaatgaacgacgcaatcatttatatatggttacatgcatacaaactctaacacgttatccttcaatataaattattgtttgacaagattaatatatttagctgacttgtttcttcctctaattatggcaaagcacgattctgttcatcatacgaactatccgattgagtggggttgggtgtgttgcttgtgatgaagggtgccttgagacgagagaaaagaacatgtgtgtgttgcttgtgatgaagggtgccttgagacgagagaaaagaacatgtttagtattccaatataccaaatattatattaatatatcatgaaacttgaaaatgtgttggtgtattatgtatgtcaataagaaataatattaatacagtttcgcgatcatttcaagatttataataattttgtataagaaagaaaagtgtgagaagtagttgttagcaaatcacatgggaacatataaactaattaaatcttaaaaatgaacattttaactttttgttgttatataaagtaagttaactattaaaaatgaacattttaactttttgttgttatataaagtaagttaactactaaaaattactatacaagaaactgaactctgtgtttttttgtgcggtcataattcgcatataaaagatagattcagaatctgatattgtttatacttttttttttttctttgatattgtttatactaatgaattggtttgcatagaaaagtaaatgctttttcattatcatgaatacatgataatgaaactgtcgccattcattgcaaaattggtccgattttaatttgtcttcatcaattacccaccttcattgcaaaattggtccgattttaatttgtcttcatcaattacccacctgttttccattggtagatatatttatatatgtatatatatggtgattggtgacttccattgtctgctcaataaaggactaccactcgttctttctcaatctctcgtgcatttaacttgtcacagaagaaacatcattcacagatcttcaatcacttttttccttcaaacgaaaagatgtaccaaagaaagtatgtttttatatacacgtaaatatatatataactccttctttgttataagtagtacatgaatacacgtaaatatatatataactccttctttgttataagtagtacatgaaaacaaaacagatatttttgatgtaactccaatatatacatagtttttgtttccactttgtttagatttataaatttagattatgtccgtagcaaaaaaaaaaaaaaaaaggaaacacaaattaatataagcactgcaatatgtggtttagctcgtacaatg

SEQ ID NO: 22374 - DNA, 3000 bp, Unknown; identical to SEQ ID NO: 5203
  misc_feature (1)..( 3000): 2750-1469P.txt file - cDNA_ID_2052911; gDNA_ID_1620771; Annot_ID_167551

SEQ ID NO: 22375 - DNA, 3000 bp, Unknown; identical to SEQ ID NO: 5205
  misc_feature (1)..( 3000): 2750-1469P.txt file - cDNA_ID_2052914; gDNA_ID_1620771; Annot_ID_167549

SEQ ID NO: 22376 - DNA, 3000 bp, Unknown; identical to SEQ ID NO: 5206
  misc_feature (1)..( 3000): 2750-1469P.txt file - cDNA_ID_2052918; gDNA_ID_1620771; Annot_ID_167547

SEQ ID NO: 22377 - DNA, 3003 bp, Unknown
  misc_feature (1)..( 3003): 2750-1469P.txt file - cDNA_ID_2052922; gDNA_ID_1620771; Annot_ID_167546
atatcgtagtaatgcaacaatgcatagaactgtgtctgagagtctgataaaccttacttggtcattgaaatatgattctctttgcagcttttgcttggttacttgccacctgaacgttcactctggtcaactgagttgaaacaaaagagatcccaatacaagcactacaaggatgagcttctgacgagtcctgtaagtgatcctggtcttttgtttcttgccttggagttattgttagtctgttagttttgcatgctatgtctgtctaagttgatttcaagtaaccggattatcacataaaagttatcaagtgtgtattatcctagctgtttttgtgaactttgtaagtcctttttctcatctagaaagtttctgtacacaattatcttttcttgaaatgtgtttgtacctctaaatgattctgtggtagttagtcagaaatcacatggaaaatggtgaggtcaaaggggttcgacaactatgacttgaagagtgaaagccgatgcatgcttgcccgatccagaattactgacgaggaccatcctttaagcctagggaaggcgagtatctggaatacatacttccaggtactatatcttacatcctgggcaggtctttcattgtcttaatcttttagagagacctcagtgcattacttaaggacaggattaaaggttatatagtatttaatttgtccactagttccatcatcactcttttgttaatgtaggatacggagaccatagaacaaatagacagagatgtcaagcgtacacatccagacataccctttttctccggtgaatcatcgtttgcgcgttctaatcaggtaacctttttgtgttctcatcagcaaattttcacctatttttgattaatcaaagctcagtgacatttcgatttacatgtctaggaatctatgaagaatatattacttgtatttgcgaagttaaaccaaggcatcagatatgttcaagggatgaacgaaattttagcacctatcttttatgtattccgtaacgaccctgatgaagatagttcagtaagtagactctttttgtttcggtgataccctttaaccaactttcaatgataacgtacacagttttaaggtaacagtgctagtctggaccctcaataatttcaagatatgcgttcctttgaagtaaaagctcaagactgttttactaaatgatgtgtcacagagttacaaataaaaaagaaccccgtaatctattagtatgaatctgacctctctgtctaattttcttagaagattggttcgtgtatgatcttttttcttcaaccttgtttttcttcttctcagcttcaatcaatttcatattaactcttttcaaaatatgcagtcccatgctgaagcagatgcattcttttgctttgttgaattgttgagtggatttcgagacttctactgtcaacaactcgacaatagtgtggtgggaatccgatctgcaattacgaggctctcacaacttgtgaggaagcatgatgaggaactgtggcgtcatctagagatcaccacgaaagtaagacattggttttttctttctctcatgtctttttgttgtgacaacaaccatatttgtcattctactactatagtcctaatgatctgctttgtgcggaagataaattccaatgatcccctcagcttactttgtattcttgttctcctatccataacataataacagtggattggatcctctgagattgagactgacattgtatagattctttgattacaggtaaatccacagttctatgcatttaggtggatcactctcctcctaacacaagagtttagtttctttgacagtcttcacatatgggatgcactcttaagcgaccctgaaggtccgctggtaagatcgtaatatcttctccttgatgcatacccgaaatcaaatcgatagatgcagaagtcacattagtttactgttccactcatttgcttgattaaagaagacccggtctgtatcgtattgttgcaggaaagcttactggggatatgttgtgcgatgctggtactggtgaggaggaggctaatcgctggggatttcacgtcgaatatgaagttacttcaacactatccaactacaaacatcagtcatctcttgtatgtagccaataaacttcgttccaaaatgttagtataaatccttttgttggttttttctagcttttgattaaaccaacttttagttgcccccattacaatatacaaagcgtttttgttttgtttttatattttactgtttaaatggcaagacatgtttgtttgttacgttatcgttttggagattttctcggaaatcatgaatgcaaacaaaatgtggttgttacttgtcctccgatttcagtcttagaagccatatgaggttcttggagaatcattctcctcctccaaaacgtacatatgccaaaactcagagccttgaccacttgcacttccaccctgtaatgatttacacaaaagagaagcttgatattaccatttcaggcaaaaaaaagtacaagaatatttatgaccaatacggtggtaccgaaatcatctccactacagctgctggagctcgaagctccgattttggttcagttcttatcatttcggtttactgttgactttggtctttagcaggttcaaatcgaattaaatttcggttaagttccacgcaattcaagggaattttgcagcttcaaaaataagagaaacggtcacaaaacgagcaaaaattcaaaattagaaaatacgcagctcacgagtatcgtgatattaacaacaacccaattacatcattacacgtgtcgttatatacagatgggtactttcgtttataaatacacatcaaacgccttactaaaaacctagaaatagaaaaatcagatctagattcagtttttttcatcaaaaaagagcgtcttcataaacgcccttcgtcttcttccctggaaatctagtttctttcttccacgaaaatg

SEQ ID NO: 22378 - DNA, 3003 bp, Unknown
  misc_feature (1)..( 3003): 2750-1469P.txt file - cDNA_ID_2052925; gDNA_ID_1620771; Annot_ID_167545
aagacaccgcaagtctccgccatgttcacgcccagatcctccgtcgcggcgtcctcagtagccgcgtcgctgctcagctcgtatcttgctcttcgcttctcaagtccccggattatagcctctcgattttcagaaattctgaagagaggaatccttttgttttaaatgctttgatccgtggtttgacggagaatgctcgtttcgagtcttcggttcgtcatttcattctcatgttaaggcttggtgtgaaacccgatcggctaacttttccgtttgtactcaagtctaattctaaattaggttttagatggttgggtagggctcttcatgccgcgactttgaagaatttcgttgactgtgactccttcgtcaggttatcattggttgatatgtacgccaaaaccggacaattaaaacatgccttccaagtgttcgaagaaagtcctgatagaatcaaaaaggagagtattttgatatggaatgttttgattaatgggtattgtcgagccaaggatatgcatatggctacaacactttttcgatccatgcctgagagaaattcaggatcttggagtactttgatcaagggttatgttgatagcggcgagttgaacagagcaaagcagctttttgaattaatgccagagaaaaatgtggtgtcttggacaacattaattaatgggttttctcaaactggcgactatgaaactgcgatttctacctatttcgagatgctagagaagggcttaaagcctaatgaatacacaattgctgctgtgctctctgcatgttcaaaatctggtgctcttggatcaggaataagaattcatggttatattttggacaatgggattaagttggatagagccatagggacagctctcgtagacatgtatgcaaaatgtggggaacttgactgtgcggctactgtgttcagtaatatgaaccataaggatattctttcttggactgctatgatacaaggttgggcggttcatggacgctttcatcaggctatccaatgttttagacaaatgatgtattccggtaaaagattttgtccagtctaagaatttagcttattctcatttttttttaattattattcatcgagtttagttctttaagttgtggtgtgcatgcaggagagaagccagatgaggttgtgtttctcgcggttctaactgcatgcttgaactcaagcgaagttgacctgggacttaatttctttgatagcatgaggcttgactatgcaattgaacccacgctgaaacattatgtgttagtcgttgatctgctaggtagagcagggaagttgaacgaagcacatgagcttgtagaaaatatgccgataaatcctgatcttacaacatgggctgcactctatcgtgcttgcaaagcgcacaagggttatagaagggctgaaagtgtgtcacaaaatcttttggagcttgatccagagctttgtggtagttacattttcttagacaaaacacatgcgtctaaagggaacattcaagatgtagagaaaagaagattatcattgcagaagagaatcaaagaaagatcattgggatggagttatatcgaattggacggtcaactgaacaaattttcagctggtgattattctcataagctaacacaggagattggtttgaagcttgatgagatcatatcgcttgccattcagaaaggatacaatccaggagctgattggtcaattcatgacattgaagaagaagagaaggaaaatgttacgggaatccatagtgagaaactggctcttacacttgggtttctaagaactgctcctgggaccacgataaggatcattaagaaccttagaatctgcggagattgtcattctttaatgaaatatgttagtaagatcagccaaagagatattctactgagagatgcaagacagtttcatcatttcaaagatggaagatgttcatgtggtgattattggtgatatagttgatcccttcaggttagtcaacaacaatgactcaaaccaaaaaggaaaaatgcgatgttctgtaacatcccagcctgagctgcttgaagtttttgtttattcatggcgctttccggtacaaatcttgtcatgttcttgtacacaagagtagggattaggacaagctcatgatttctgagaccaggccacacaccacagctatatcaggccgaagtgattcgggttaccccacaggcctagaagtgaaagagaaggggctcaagtgggttacttgtgtttttgagatggaaaattccaattcttttttatagaaaatatgagaagtttcgtttcataagctaagattttcgtaagataagattatgattaagcaaggagatgttagtatctgtaggtgtcatgtgtattattgaagacaacaacgaaacacatggcaattgtttgcgaagcacaggtatcacatgagaacaaataccagtcgccaaggtaaattgggtccatcactgttgctgattaatcaatcttgtgtttgtatatcactttatatatatggtaatacgataaaataaatcatagttattgttgctttctgttatacgattttaactcaaattattttgttgatatccaaaaattacctcaactctttagatatatgataatactaatgtacataatccatatatttattgtagtttccaaatatatccctaatcataaaaaaaatcttacaaatgactatggatttaagtatttccaaacaaaacaaacaggggaaaattgaataaagaaaaagaaagggataaatgtgtaaatagtcgacaatattgaggctatatttaatattaatttcttcgattcttctctctctttctctctctgtgagaagaagcaaaatcacgaacttccattaatcaccgactcgcagaacctttctctcattaaatcttgtggaaacctcggaaattgaatctgcgtgagtttcaatcgcttgatcgatccatcaaaccctagagatg

SEQ ID NO: 22379 - DNA, 3003 bp, Unknown
  misc_feature (1)..( 3003): 2750-1469P.txt file - cDNA_ID_2052939; gDNA_ID_1620771; Annot_ID_167541
aattcatggaggggcttttatagctttttccttgaagcctttcttggactttgcaatctcttattttcttgtttaagtttttcgtcatttgattctttgtggataatatttataaattgaactcctgtgtatgtatctttgagtttctttgatggaagacggttaattacactctgatctgatgtgtggagccttaaagtctctgacttttgtttcattaataagccggatagatagtaaatgctgaagaaggtttagtggttgttaaagagcgtaaatgatcttaaagtgcttacctttttgttttcttttttgtcttttggctgtgttaggaatggcatcaagctcttgtctcaagcaagggtcagtgccaatgaacaatgtttgtgttacccctgaagcaacgtatgaggctgtggttgcagaccctaggcttttcatgacttccttggaaaggctgcactctctcttgggtactaaattcatgtaagcttctttcttcccttatcatatcttacttagtagagtaagttcagttgttatctgctctgacagaaatttgtgttcagaaagtctctatctttgagatttaagctcttatgttgacgatgaatcatgctttgtttttcacctacaaaaattttaccagttacaatgcatgagattctctgtctatattatggattcctcttctgtgtgtatagtctgactaaaagtaatgttcttttttgtgtaacgcattgttccttttgcttcttgggggtaatgtattgtaacttttacatattggatatggatgcaatactttatagcttatagctttaaccattctacatattacattggtgattgtagggttccgatcataggaggaagagatttggacttgcacaagcttttcgttgaggtaacctcacgtggcggaatcaataaggtatgtgaatgccctctcaggctctcaatgataaattaattccattctatatgtattgtctgttttctatgtctcatatagttggttttgttctaaaatcttgaaatctacattgacatttttccttggatcattttccttctttgaattgcagatacttaatgaaaggagatggaaagaagtaactgctacatttgtctttcctccaactgcaacaaacgcatcatatgttctgcgcaaatactacttctcgctgctgaacaattatgagcaaatctatttcttcagatctaatggtcagattcctccaggtttgttcataaaaacctctttaactattttaccaaattttcaaatatttttcagtttcttctctgttttgtaacacacatatcttctgtagactctatgcagagtccatctgctagaccatgctttattcagggagccattagaccttcacaagaacttcaagctctaacctttaccccacagcccaagatcaatactgcagaattcctcggaggtctcaacttttttctctctttgcttctataaatgttccaactgagaaactgtgacttataaatctgagtaaaatcctttttcctttgatgttattgtttcaggatcacttgctggatcaaatgtggttggagtgatcgatggaaaattcgaaagtggttaccttgtaactgtaacaattggatcagagcagcttaaaggagttctgtatcagcttcttcctcagaacacagtttcttatcaaactccgcaacagagtcatggtgtcctcccgaacactctgaacatttctgccaatcctcagggggttgcaggaggagtaacaaaacgccgtaggagaagaaagaaatcagagatcaaaagacgtgatcctgatcatccaaaacccaacagaagtggttataacttctttttcgcagagcagcacgcgagacttaaaccgcttcatcctggtaaggatagggatatcagcaggatgattggtgagctatggaacaagctgaatgaagacgaaaaattggtatttcacacactgatctttgaattcttatcaaactctgttacgtatatcgagtttttgtctcatgatctgtttgattttcttttatttctagatttaccaagggaaggcaatggaggacaaagagcgatacagaactgaaatggaagattacagagagaaaaaaaagaatggacagctcataagcaacgctgttccgctgcaacagagacttccggagcaaaacgtagacatggctgaagctgaccttccaattgatgaagtcgaagaagatgacgaagaaggtgattcaagcggatcctcaggcgaaagcgagccacatgatgatcagagcatagaaactgatcctgaattggaagagccatctctgaatccctcaggtccaaacctaaaccctaatccgactgagatagtggtggctcctaaggagaaaaacggcgatgttgtgatggaaacatctccattgaagaaagccgatgagccaactgtggcggtgactgctgagcagaactgaagattcttctcttgtttcttactccccgttgccagtttcgtgttccataggtaaatgttagagagaggaaagggcttcagataccttgcttctggcccaagattatgtctttttggttttttttttggtttttttggatttttcttcggaaacaaggcaagtttatggttataacattttggcataagagaattttttactttcgttattaatgggatatcctgtaaattggtgattaaaatctgaaagggccttataaacttgggcttggaaagcaaatgggccgaagaagtaatccctgtaatatgattttgaaagcggaggagggagacttaaagactttgattgattgatttataaaaggaaccctaagtttccgaactttgtccgtcgccgtctgaaaactctgtagctctctcacttcagctttccaattaaagggaacaaagctttgatttttgccgcagtcagaagcattactttgcaagaacaagtgtgtaaacaaagatg

SEQ ID NO: 22380 - DNA, 3003 bp, Unknown
  misc_feature (1)..( 3003): 2750-1469P.txt file - cDNA_ID_2052959; gDNA_ID_1620771; Annot_ID_167533
ttccggtcagacgccaaattcaagatccgtcagctgttctttacccgtttgctctaccgggtcgagggttttcagcccgacctgttcgaggattcgtcgcagatccttccgtgacggctggtaatctgagtgggtaccctcctcgcccgagttttacttacgatcctggaccatatgagcagcgtcaaatggaatccttgttgcagcagtttataagggagagaaatcctcagattcgtccattaccacgccttggattgggttctcctgttgggttgggtcccattagagcaagtcctcaatttctgcaaccgcgggtgaggtttcttagatgaagtcctcaatttctgcttgtcatgtttcatttgttaatgcttagattctagctaagtagtggaaagattagtggggaaaatgctcgagatgatccaaagtttcttgattggagtcttagtagaactgaatctgactgtaccgtgacttaagaatcatcttggttaatattggatccatttttgtcagagtgattctcattcgaactaatgcatgtagttctagaattttgatcgactagtctagttatacaacaatgtgagttgttggacgtgtctttcatggttttcttataaaccatgtgatagttagtaattggatctagttatctttctattttggttctttgtcctgctatgtgcctgctttactctggtcttgaaaattctcttttgtggaatgaggaagacttgaaaatgcttttatatcttagcaaatgttaagctgttcttctcttaatagttggtttgcacctacttacttttgattattgctcttgctccagtcacattttctcattttcgtaaattttggtacttaggttgccccgcccccaacttcaattctagacactagcaggaatagaaaggccaggtgaacatcaaatttctctactttgatattacctttcttttggtttcactgaaaatattattttaaaaaaaacttgttcaagagacttagttgccttgctgtttcttcttccttgttattagaagcaaggatggggctcttgccgttgttagagggagaaaggtaagcctactatcatatgtactgcttgtttgagaatttggaaaagacatctgttaagtttagattgtaatactattcaactgtttacaggtccgaatcactgaggggtcttcttctctttattcacttggtcgatcgtggttgaaaaatggtgctcacgttggaattcaggttcgcactttatatgctgctgttagagtaggatgttagtgtcattgacgactccgcttgataaaagattcatcggttgtattttcaagatattggtttgtggggttttgattcagaaaacctctcagaatgccaaatttactcgaatttggaaactaaattacttttgatcactcacctatttgcatccgtgctagttagaggattctttcttgatatagttatatttttagaagccaatcttagttaaatgatcttcaattgcatactcaaagcttgttatctgctttgcaatggaaatgtgcatctgcaatctcttgagcgtaaccatatatctgggactaatctaactttcagtttctctgttgacagccgcaaaggagtggtataatgaaacctttgccaaaaccgttacctgtggatttaacaacagagacaagtgtaccagatgatccagatgaagaatcagcggatgaagacaaagaggtttgtgttaagtcttcaagaaccattgattctatctgagcagaacagaagacattagtctgattctttcctgctgttgctaatttcagctcttgaatatttactacatgacgtttgattccactcttttctttgatgatctcaggacgaggaagctgtaaagcaattatctgagaaggatcttttgaaaagacacatcgagcgagctaagaaagtccgtgcacagtaagctccccactattctctctttttgctccttaggtcgtgtagtatttgaaagataaagctccccacaagattcatggattagttttcataatcatcaaagcaaatctagcagaatattttggtaacttgaaaaagcggatttctttctctttcagattacgagaagaacggtcgaggaggatcaggaggtacaaagaaagaataactcttattctggcacaatccgaagaccgatgatgcttgaagaacgactaaaaaagggtaaagttttgttaggaattagcttcatatgactgttgttgatttagcatactagtaccacgtaacaacatacgtgtagtaatagtataggtgtgttcttcttcgtcttctatagattagtaggactactcaatgaatagtgtttcattcttcctaaaactaaagaggaagataaaattgtttccttaaagtcagcttttactaatttgacaataaaaatttcttctcttacacatgtgtcaatcagcgaagtggtaataaataaactttactgtcattcgactaattgtaactttataaacaagatttgagaaaaattgagattttgtagtaaataggtggaagtctctaattggattagaggcttttcgagagagaatcgcatagggaagcggacagagaagataacaaacgctcatatttaaactctctttccgttacatttgccacgtaattacaacaaacacgtgtcatcgccgctaagaactaatttttgtcattgctccacacatgcaactactaaactaccgatgatctctctcgctcacgtttaatccgccatttctgtaaaatcctcttcccttttctgaagtaaactttttcccgcaatcaactcttgctttctatttttctcgattgtttacacttttcattttcagctctctgtttctttctttcacactaaccccaattctagtttcttactctccaagaaacaaagagcaccgatctcagttttctcgagaaacagaggacaaactcagaatg

SEQ ID NO: 22381 - DNA, 65 bp, Unknown; identical to SEQ ID NO: 331
  misc_feature (1)..( 65): 2750-1469P.txt file - cDNA_ID_2052959; gDNA_ID_1563933; Annot_ID_148541

SEQ ID NO: 22382 - DNA, 3000 bp, Unknown; identical to SEQ ID NO: 5211
  misc_feature (1)..( 3000): 2750-1469P.txt file - cDNA_ID_2052966; gDNA_ID_1620771; Annot_ID_167531

SEQ ID NO: 22383 - DNA, 3003 bp, Unknown
  misc_feature (1)..( 3003): 2750-1469P.txt file - cDNA_ID_2052970; gDNA_ID_1620771; Annot_ID_167530
gtatttcattttcttttgctctgtaagcttatttttctcatcgatccaacataaacaatcggaatagaaaataattcatcactctttatcactaggccaatactggactcccctcttagtgacataatttttgttgtctcttgataaccagattcgacagcttgcaaacgagatcaaagaactaactatgaccaatccagttaccatctttaatggagattcaaactccagtggtatgtacaagtcttagtttctcataaaatatttatgtactacttttgataatgtaggaaatgtttcaaatatgtttattttttatgagaaacagagaatgatataatctttgcttttgctcttgtaggctatgcatcttacctggttccagcggctgccgttggagctatggggtactgctacatgtggtggaaggtgtttatctctttaaaatctgtctatttttctctatgtttcatgtgtcttttgttatagttttgtaacatgtggtttaccggtaaactatatatcattgacttctaaggtttacccacattgcagggctggtcgttttcagatgcaatgtttgtgacaaagaaaaatatggctgatgcggttgcctctgtttcgaaacaactagacgatttgtcagacacattagcggtgaacaaataatttttttgagaccttcctctgttatatattctatttcattatgattttttgacctagtgcatttgtttacgcagtcaacaaggaaacatctttctcagaagctagcgaccttggattggaaggtggaagagcagaatgagacatctaaaatgatcttaagtgatgtaaggaacccgttttatttctcactttcttgtattgatgccttattttttccttagacttaagattaggatacttatacattcgtctgagagagatctcctcttgtacatttaacatcttagaagaatttaaaacacatttaggaattccaaaagattgtagagtatttatttattaacgtcctatctctttggccctgaactgtttttcttcacatgtacagtagagtcctttgtttctttcaaattacagcttgattctcatatctgcgatttactccatctatgcctttctttgatattcattttaatgctaatgctcacatggaatcttgcttcaattcaggttactgagatgagatcaagcatttcgcaaattgggtttgattttaagcaacttaatgaaatgatttctggaatagtaagtctcatcattgccctctaatatgcatcattgccctctaatatgcatattttaaaggggctaatatatctttactctcttatatgaaatttttacaggaagggaagattgaaagtcttgaaagcaaacaagtaatttgtctacaaccattagatactacaaaccacttcacgctatcaattttcttaaaactaattgatctcaaacagatattttttttgttaaaattttaggatgtgaccctctctggactatggcatctatgtcaagttgcaggcgttaaagacagcacaagtactaaagtatttcaggtgagtgttaacttacaaattaagtgaaacgttttcttacttatttttcacgtagttataggccttaatgaaaaaaatcttgtttctggctttgtggtttaggatgttggtgagagattacctattgatggaaaaccatccactaatacttctctctctgtaagaatgctactatacctttttccatcatataaatgtgcatttccattctgttgacgcaaaaaagttgcttatagtgaaaaaattcaacgagatggttgatcttgaatttgcatatattcaaggcaatctctcatcaagcttattcgaataaaaattggaacctgaaaatacttgtggtagtagctgttatttgatgatttcatgtcatgatgtttctttggctttctaaaactataaaactatggaaactccagggtctgcggtttctgacggaaggcaaagaggatgcaaatgtaatacacaagccggttatggcgaaagaaattatggtgatgggggaaaaaacaaaagtcactgcagcgggaagaagcagagttcatagagcgtttccaggtggaatatcttgggtacgggatgtttcaggactatcctaatattattttggttgatatacaaagaaattgcttgtattcgtcccaaattctgatactgggactggcaattattttttcatgtaaaaagaagaaaaatctacatatgttattgcatccaccaacaatttggtttgcccctaattatatttggtcttgatgtttgtaaagaaagagtgtgattaaggctttcacgtatgttgatgtcttcattgatttggacttttgtgctcctttttccttttgtgtttggatcaattttgtttgtgtagaaaatagaaagaactaccacagaagacagaactactgtcttgaaacatttgtttcgtcctttctcgtaggattaattgtctttagttggcagagaaataaaatatttcgctcttattgggccttggcccaaaatagatatagagacagcccaaatttaatttaacccgaaatagtccaaccgggtgaatttgacagcaattaaaaaacccggcccggcttcttatattaacaagaggcttggcatcggttaatcggagcttctttcctctcaagtgaagtgtctggatcttcgtcgctcaacgcaaatccctctccggttcatgtaaatttccaacttatttttgtgctcgaattttggttaacgggacaaatttcacacttttacggagtatggaagcagcctttgtcttctgggctgttgaattgcgattcattgtgtatgcccaacaatggtttaattgggaggttccaatgattttttgtgcttttttcttacttaatataaccactgttgatgtttcttctgtgtccttgtatcgccacagtggataagcagcctggggaagatg

SEQ ID NO: 22384 - DNA, 3000 bp, Unknown
  misc_feature (1)..( 3000): 2750-1469P.txt file - cDNA_ID_2052974; gDNA_ID_1620771; Annot_ID_167528
tatagttttagaaagccaaagaaacatcatgacatgaaatcatcaaataacagctactaccacaagtattttcaggttccaatttttattcgaataagcttgatgagagattgccttgaatatatgcaaattcaagatcaaccatctcgttgaattttttcactataagcaacttttttgcgtcaacagaatggaaatgcacatttatatgatggaaaaaggtatagtagcattcttacagagagagaagtattagtggatggttttccatcaataggtaatctctcaccaacatcctaaaccacaaagccagaaacaagatttttttcattaaggcctataactacgtgaaaaataagtaagaaaacgtttcacttaatttgtaagttaacactcacctgaaatactttagtacttgtgctgtctttaacgcctgcaacttgacatagatgccatagtccagagagggtcacatcctaaaattttaacaaaaaaaatatctgtttgagatcaattagttttaagaaaattgatagcgtgaagtggtttgtagtatctaatggttgtagacaaattacttgtttgctttcaagactttcaatcttcccttcctgtaaaaatttcatataagagagtaaagatatattagcccctttaaaatatgcatattagagggcaatgatgcatattagagggcaatgatgagacttactattccagaaatcatttcattaagttgcttaaaatcaaacccaatttgcgaaatgcttgatctcatctcagtaacctgaattgaagcaagattccatgtgagcattagcattaaaatgaatatcaaagaaaggcatagatggagtaaatcgcagatatgagaatcaagctgtaatttgaaagaaacaaaggactctactgtacatgtgaagaaaaacagttcagggccaaagagataggacgttaataaataaatactctacaatcttttggaattcctaaatgtgttttaaattcttctaagatgttaaatgtacaagaggagatctctctcagacgaatgtataagtatcctaatcttaagtctaaggaaaaaataaggcatcaatacaagaaagtgagaaataaaacgggttccttacatcacttaagatcattttagatgtctcattctgctcttccaccttccaatccaaggtcgctagcttctgagaaagatgtttccttgttgactgcgtaaacaaatgcactaggtcaaaaaatcataatgaaatagaatatataacagaggaaggtctcaaaaaaattatttgttcaccgctaatgtgtctgacaaatcgtctagttgtttcgaaacagaggcaaccgcatcagccatatttttctttgtcacaaacattgcatctgaaaacgaccagccctgcaatgtgggtaaaccttagaagtcaatgatatatagtttaccggtaaaccacatgttacaaaactataacaaaagacacatgaaacatagagaaaaatagacagattttaaagagataaacaccttccaccacatgtagcagtaccccatagctccaacggcagccgctggaaccaggtaagatgcatagcctacaagagcaaaagcaaagattatatcattctctgtttctcataaaaaataaacatatttgaaacatttcctacattatcaaaagtagtacataaatattttatgagaaactaagacttgtacataccactggagtttgaatctccattaaagatggtaactggattggtcatagttagttctttgatctcgtttgcaagctgtcgaatctggttatcaagagacaacaaaaattatgtcactaagaggggagtccagtattggcctagtgataaagagtgatgaattattttctattccgattgtttatgttggatcgatgagaaaaataagcttacagagcaaaagaaaatgaaatacctgagcagcaaggagtgcaccgtcatacttaaaaggagtgctttcaactccttgagcaccattgagtaagtcttgaagttgggctattaggtcagacaacctcccatgtctcaatacgatcgaaccagatacaccttggacatgatgaaaacagaaccaagtgtcattaaaggtcattaaatggaacatccaagctagaataactaaatcattcttgctacatccaagctgtattaccatcaaaactacactaacgattgaagattagaagttctggaccattttagcaaagtgatcaatcaatttgccaagataaattcaaaccctaactcttcataaaacaattccctagattagagagtcaaagcaatacgaatcgaatttgattacaacaagcaaagataataaaacaagcatcaaagtgagaaagagacctgcgccgagtaggataaggaccttagaggtctgaacaccggcttgcatcgccatgaattccggttacaagctgaaaaagattctcgattaattctctgttccgtgtcgccaagccaccgcgagagaccaattatgacacccttttgccctttagacctcaattttagctttgatttaccacaaagataaatacttttcaaaacttatgttcttacccccgaagcttccaattttaatcgaactattgtccttagacacatattagaatatttaacaccacttgagcttatatacatatcaaacgttaatatgtacagtatatacaattacatatgtatttatacttttattgccctatagacctcagctttagctttgattgaccagaaacattaatattttaacaatttatgtattcaccccaaacacttccttttgaatcagattaccccagaaggcaatgcaaatcgaatgactaaggttattttagacatttctcaataatccaaaccattacgcaacttcactgtattaacctgttttcttcatcgaagaagatagagagaccaaaacaaaaaaagctttgaatatccgccatg

SEQ ID NO: 22385 - DNA, 3000 bp, Unknown; identical to SEQ ID NO: 5270
  misc_feature (1)..( 3000): 2750-1469P.txt file - cDNA_ID_2052999; gDNA_ID_1620775; Annot_ID_167706

SEQ ID NO: 22386 - DNA, 3000 bp, Unknown; identical to SEQ ID NO: 5270
  misc_feature (1)..( 3000): 2750-1469P.txt file - cDNA_ID_2052999; gDNA_ID_2926205; Annot_ID_202158

SEQ ID NO: 22387 - DNA, 3003 bp, Unknown
  misc_feature (1)..( 3003): 2750-1469P.txt file - cDNA_ID_2053058; gDNA_ID_1620775; Annot_ID_50269
atggttggaatggagcctggtctaagagataagaaaagttttggggaaccaagactgaaatccccttctaccagtttctataattctgtacctcgccacaaatcgtttaaagagacattcaaaggttcaccacgggaaatccctgtaactaacagcaagaagggttggataagttccaaaagttgggctgaagggtcgagaaaccatctggttgccaacgtccaaaatctttctggaagcaatattgaaaccaatcagtctcatgattatgataataatatatctaatggcggacgcaagacgggatatctcactaaatcttcgaagctgttacctccgagtagaagcagatcccctgagtcaatggatagaggtccatcttctgggatggtaaagatttgtctaatacttccatgtctacatgttcctttcttgcccttttatggaaatatgacttgtgttttgtgtgatatcttcttttaaaggcaggaatatatcacggggagaggaatcaaatgaaaatgcagagagagaaattgcattcgactgatgaaccaccggtgagtttgatggttaactatcttaaaaatatagatattgatgtatattttaacaaagtttagaggctctatcaagttcgtgttctgacctttaacgaatgttaataggttgccaaacgagtgaaacatgggtatattcagcaagtatatgcaccaaaatcatcatcatacagcgagattcttgaacgaaaaagccagataaatcggttagtaaccaaccattgtgtaatgcatttattgtcccaaagagatatcaaatcggcttattggatcatactgttatgtttgtaggtctggtgtggaactgccttctagtttaagcggggacgatgagactgacgaatctagctcgtcaatggattaagtaaagaaaggtacaaaggaagattaggaaattccggtttgtatagatatatgatgaaaccggtttaggatgtgaaaatgttgcatcgtgtaattggtaaaagttagagctctcttcattttggtaactaaacggtccccaaagagatacagtgagccagtaatgagcctttttttgtttaaatttgctcctaaaccgttaccggtttgaccgaattgagtatgtaaatcccagtgattacaaaataaccaaagtaaggcccatttattaataaagctcaaattaggcccaaaatattatgatagtccggtttagtcgtaaaaggcggttcggaaatgtgtgactaggagatttcgtcacatgagaaaaaatcagagccgttgactagttttcgtagaaagtatgtggtacaattttgattcggccaaaaaaggtttttttctttttcttttagggttagcgttgctttgcctcaaactcaaattttgaagataatttttttggtttctctgctactgatttcgaatctttacgcttaatcaattattcatctggattttcaaatccaatccttttcctccctggtaagaatctctcttcttcttcttcttctctctcacgacgattccactgttctccgattctgtgttagttcctgcgatattttccatcacttgttcgtgtttcgttattacgggtttgtgttttgtgaacttgttgacctttgtgtctccgtaatttcgtccaacggttgatgtttttgattgctgattagatttttgtcggtaggtattgaaaaagatgatctttatggattttgttttctgtttcttctttcctttttgtaatctgacttgcaagctttttgctttttttgtcggtcggtgttaaaaattgttccttttctcttgttcaattgtttcctcaggtgaccaagtaattggggattaacaaagggactggggctttattaagctcgaaacaattgttcttcactctggccgcttctgcaaagtcgtgtgcttctcgcacctctgcgcaggtgtggggtggccttgaagtggtgacttcactctgtcttccaaggatttctctagcttctatcatttggaggctccgtcgtgtttctgagggtcttacccttgattacggctaacatttactacgcccactataccacctcttaagcttttataagaactttttattcgtgcaaaaacttaacttggatcttaattgtttctagtttagttgtggttgtaaagtaaagaaccgtttttttgtggtttggttttgcttttttagtttccgttggtgatgtagttcgatgttattaagtttgacacaatggtcaggttttcatgcttcaacgctcacatccaccgccatagacctaaggtaacttgaaccatcattgcctcttgtgtctttagaacgatagttttacattctctgtccaagactcctttgtccaataagagaatgctaatttgtttctatgttctggtgatgcagaaatctgttgaaggattttcagaacgagtgatcaaagaagatgggtctaaatcaaaaggattgagctcaattatatttgggagaaacattgcttctgttagtgaaaacagcaagccagccgctgttgagcgtgtctggaaatctgaggaaattaagcccagtggcattcttgagcatggtattgggacgcaccaggtactgcatctcaagaaaagtcaatctcatggaaatgaactatacttggatgggcgggatgccacagagaatggaacagacgatgcatcagatcggattacttctccgaattctcttgaacaacagagtggtattcacgaggcaggcagcagcaagcgtgtagatgaaagtcctaatctgtatcagcaaggtcctcgagcttctgtttctgcttaccagggttcaaatcaagcactctgtgggtctattttctcggttggagatcttcatcatactgataaagacagccgtcaactcgatgatacctccttatatggtgaacagatggacaactcaaacagtcaaacacctcatgattcacctttgatg

SEQ ID NO: 22388 - DNA, 3003 bp, Unknown
  misc_feature (1)..( 3003): 2750-1469P.txt file - cDNA_ID_2053058; gDNA_ID_1620775; Annot_ID_167681
gtggaaagttctagatatgttgcacataaagacgttattcagcatcctcagttcatgagaagctatgggtataataagccttcgggatacttgaaagtgaagggagagagtgagaattttgctatcactgccgtaaagagacaattaggaagacaataccaagaggatggtccacctctgggggttgaatttgatcctcttcctcccggtgcatttgagcctcagactaatcctatagttcacggtgagtcatgataaaatgtttcaactttacctttaattttctggtttatgatgttatgagtattgagtaagtggctcagagaagctaaaaccatcttcttcgtgtgtcagattgtgaatgcctttacccatgtccagtcggatttgattgctttttctatcaactgttttgtcagagccaatatatgttgggaatcagagacggcctcaccttccacatttacttggaacgaggaagagctttaatcctggtcctgtaagtgaacattttctgtatactacatacccatgaagataatataaactagaatcttagtctgccatcacattctttggctaaattatcttactttctttgaagtattattaatattttcgttttctgtcttaatgtctttatagagctatgaattagctcgtaaatcaaagttgcattcgccagatccagattcagaggatgatgagcatgatgatgatgacaacataatggttggaatggagcctggtctaagagataagaaaagttttggggaaccaagactgaaatccccttctaccagtttctataattctgtacctcgccacaaatcgtttaaagagacattcaaaggttcaccacgggaaatccctgtaactaacagcaagaagggttggataagttccaaaagttgggctgaagggtcgagaaaccatctggttgccaacgtccaaaatctttctggaagcaatattgaaaccaatcagtctcatgattatgataataatatatctaatggcggacgcaagacgggatatctcactaaatcttcgaagctgttacctccgagtagaagcagatcccctgagtcaatggatagaggtccatcttctgggatggtaaagatttgtctaatacttccatgtctacatgttcctttcttgcccttttatggaaatatgacttgtgttttgtgtgatatcttcttttaaaggcaggaatatatcacggggagaggaatcaaatgaaaatgcagagagagaaattgcattcgactgatgaaccaccggtgagtttgatggttaactatcttaaaaatatagatattgatgtatattttaacaaagtttagaggctctatcaagttcgtgttctgacctttaacgaatgttaataggttgccaaacgagtgaaacatgggtatattcagcaagtatatgcaccaaaatcatcatcatacagcgagattcttgaacgaaaaagccagataaatcggttagtaaccaaccattgtgtaatgcatttattgtcccaaagagatatcaaatcggcttattggatcatactgttatgtttgtaggtctggtgtggaactgccttctagtttaagcggggacgatgagactgacgaatctagctcgtcaatggattaagtaaagaaaggtacaaaggaagattaggaaattccggtttgtatagatatatgatgaaaccggtttaggatgtgaaaatgttgcatcgtgtaattggtaaaagttagagctctcttcattttggtaactaaacggtccccaaagagatacagtgagccagtaatgagcctttttttgtttaaatttgctcctaaaccgttaccggtttgaccgaattgagtatgtaaatcccagtgattacaaaataaccaaagtaaggcccatttattaataaagctcaaattaggcccaaaatattatgatagtccggtttagtcgtaaaaggcggttcggaaatgtgtgactaggagatttcgtcacatgagaaaaaatcagagccgttgactagttttcgtagaaagtatgtggtacaattttgattcggccaaaaaaggtttttttctttttcttttagggttagcgttgctttgcctcaaactcaaattttgaagataatttttttggtttctctgctactgatttcgaatctttacgcttaatcaattattcatctggattttcaaatccaatccttttcctccctggtaagaatctctcttcttcttcttcttctctctcacgacgattccactgttctccgattctgtgttagttcctgcgatattttccatcacttgttcgtgtttcgttattacgggtttgtgttttgtgaacttgttgacctttgtgtctccgtaatttcgtccaacggttgatgtttttgattgctgattagatttttgtcggtaggtattgaaaaagatgatctttatggattttgttttctgtttcttctttcctttttgtaatctgacttgcaagctttttgctttttttgtcggtcggtgttaaaaattgttccttttctcttgttcaattgtttcctcaggtgaccaagtaattggggattaacaaagggactggggctttattaagctcgaaacaattgttcttcactctggccgcttctgcaaagtcgtgtgcttctcgcacctctgcgcaggtgtggggtggccttgaagtggtgacttcactctgtcttccaaggatttctctagcttctatcatttggaggctccgtcgtgtttctgagggtcttacccttgattacggctaacatttactacgcccactataccacctcttaagcttttataagaactttttattcgtgcaaaaacttaacttggatcttaattgtttctagtttagttgtggttgtaaagtaaagaaccgtttttttgtggtttggttttgcttttttagtttccgttggtgatgtagttcgatgttattaagtttgacacaatg

SEQ ID NO: 22389 - DNA, 3003 bp, Unknown; identical to SEQ ID NO: 22387
  misc_feature (1)..( 3003): 2750-1469P.txt file - cDNA_ID_2053058; gDNA_ID_2926205; Annot_ID_141695

SEQ ID NO: 22390 - DNA, 3003 bp, Unknown; identical to SEQ ID NO: 22388
  misc_feature (1)..( 3003): 2750-1469P.txt file - cDNA_ID_2053058; gDNA_ID_2926205; Annot_ID_202140

SEQ ID NO: 22391 - DNA, 3003 bp, Unknown
  misc_feature (1)..( 3003): 2750-1469P.txt file - cDNA_ID_2053079; gDNA_ID_1620775; Annot_ID_167675
tttaggtttatatgtcgttcgtccaggctctgtatggtggaggagggtggccactgtcggtattcctttcacctgatttaaagccgttgatgggtggaacctactttcctccaaatgacaattatggacgaccaggattcaaaactctccttaagtaagtaaaccctttttctcttattgtacaaaagcattctaggcttgtaatggtgcaataaaaaatagagtatgtatgtagaaacaaacgctcttggcgaagactatagttgattcgtttatgttctccatgttttctttgggtttggttcaggaaggtgaaagatgcgtggaacagtaagagggatactctagtgaagagtggtacatatgctatcgaagaactctctaaagctttatctgcaagtactggagccgataaattgtcagatgggatttctcgggaggctgtgagtacatgtgcaaaacaagtatgattcgactcgcggactctagaaaaatatatatgattgatacatcaacatgaaaaggtcttctaacagtgagtgtttgtgttaaagctttctcggagctatgattcggaattcggtgggtttggatctgcaccaaagttcccgaggcctgtcgagatccagctgatgctttatcattacaaaaagttgaaggaatcggggaaaactagtgaggctgatgaagagaaaagtatggttttattcagcttgcaaggcatggcaaatggagggatgcatgatcacattggaggcgggtttcatagatacagtgtcgatgaatgttggcatggtaaaacttcaaacagtatcctgtagtatcaaggtgatgaaaaatattttgagattgacgcattttttgctatttgtctggtgcagttccacattttgagaaaatgctgtatgatcaagggcaactagctaatgtgtacctcgacggttttagcattaccaaggacgttatgtattcttatgtggcaagagacatccttgattatcttagaagagacatgattgcacctgaaggtggaatattctcagctgaagatgccgatagctttgagttcgagggggcaaagagaaagaaagaaggagctttctatatatggacaagcgatgaggttcttttctctgatatatgatatattcatgagctgactctggtttccctctgcatactgacatttgttttgcgtgtgtgtttggtttcaagattgatgaagtcctcggggagaatgctgatcttttcaaggagcattattatgttaagaaatcaggtaactgcgatctttcgagcaggagtgacccgcacaatgaatttgctgggaagaacgtgctgatcgaaagaaatgagacgtctgctatggcatcaaagtttagcctctctgttgagaagtatcaggagatattaggtgaatgccgaagaaagcttttcgatgtcagattgaagcgacctaagccgcatctagatgataaggtaatactcttcttggaattctcatgttgtcttctctactgtttcttcagatttgttaaccatttaagatttctttcatagataatcgtgtcttggaacggtcttgttatctcgtctttcgcaagagcttccaagattcttaaggctgagcctgaaagcaccaaatattatttccctgtggtgaatagtcaggtaatgaatgctacaccctttcctttaatttcttctttgaccgttttgtaattagaagactcatttttcagccagaggattacatagaggttgcagagaaagcagctttgtttatcagaggaaatctctatgatgagcagtctcgcagattacaacacagttacagacaggggccatccaaagctcctgccttcttagacgattatgctttcttgatctctggtttactcgatctttacgagaatggaggtgggatcgaatggcttaagtgggcgattaaacttcaagaaacacaggcaagtgagatctttactagctcgatttgttaaagttcttgattttggctaaaaaagttaaaaacattttaggatgagttatatctggaccgagaaggaggagcatacttcaatactgaaggacaagacccatcggttcttcttcgtgtaaaagaagatcatgatggtgcagaaccttcagggaactctgtttctgctatcaatcttgtgaggttagcttccatagtcgccggagaaaaagctgaatcctacctcaacacggcacatcgtctcctggtaaacaaacaaacaactaatcccatttgctattcatagaaagagattattgagtctctttgttgttgtttttgcaggcagtctttgagttgaggttaagagaactggcggtggctgtgccattaatgtgctgctccgcagatatgatctctgttccgtcgaggaaacaagttgtattggttggttctaagtcttccccagagcttaccaacatgctttctgcagcacattcagtctatgatcctaataaaacggtaagagcttaaaaaattatccaaatttctagattcaagatttgtgacttttggtggttttactgagcaggtgattcacatagatccctctagttctgatgaaatcgagttttgggaagagcataacagtaatgtagctgagatggctaagaagaacagaaactcagagaaagtggtggctcttgtttgtcaacacttcacttgcagtcctcctgtctttgactcttcttctctcactcgcttgctttccaagtaaacaaagatcattccatgtttaatagttgcttgtactgtaaggaacagatcaacgttgttctctctgttacagtcttacagagtagataaataaagaagagaactaaaccgagtatgaggttttttggttgaactaaaccggaaataaccgggtttggtttggttaaaaaaacagagctttgacgattccttatcatcttctatcttcagcaaaaaggtgaaaacttggattcgatcgatcgctgaaaatg

SEQ ID NO: 22392 - DNA, 3003 bp, Unknown; identical to SEQ ID NO: 22391
  misc_feature (1)..( 3003): 2750-1469P.txt file - cDNA_ID_2053079; gDNA_ID_2926205; Annot_ID_202134

SEQ ID NO: 22393 - DNA, 3003 bp, Unknown; identical to SEQ ID NO: 20730
  misc_feature (1)..( 3003): 2750-1469P.txt file - cDNA_ID_2053142; gDNA_ID_1620783; Annot_ID_168048

SEQ ID NO: 22394 - DNA, 3003 bp, Unknown; identical to SEQ ID NO: 20733
  misc_feature (1)..( 3003): 2750-1469P.txt file - cDNA_ID_2053165; gDNA_ID_1620783; Annot_ID_168043

SEQ ID NO: 22395 - DNA, 3003 bp, Unknown; identical to SEQ ID NO: 20734
  misc_feature (1)..( 3003): 2750-1469P.txt file - cDNA_ID_2053176; gDNA_ID_1620783; Annot_ID_168039

SEQ ID NO: 22396 - DNA, 3000 bp, Unknown; identical to SEQ ID NO: 5548
  misc_feature (1)..( 3000): 2750-1469P.txt file - cDNA_ID_2053227; gDNA_ID_1620801; Annot_ID_168685

SEQ ID NO: 22397 - DNA, 3000 bp, Unknown; identical to SEQ ID NO: 5550
  misc_feature (1)..( 3000): 2750-1469P.txt file - cDNA_ID_2053237; gDNA_ID_1620801; Annot_ID_168681

SEQ ID NO: 22398 - DNA, 3000 bp, Unknown; identical to SEQ ID NO: 5551
  misc_feature (1)..( 3000): 2750-1469P.txt file - cDNA_ID_2053243; gDNA_ID_1620801; Annot_ID_168680

SEQ ID NO: 22399 - DNA, 3000 bp, Unknown; identical to SEQ ID NO: 5554
  misc_feature (1)..( 3000): 2750-1469P.txt file - cDNA_ID_2053260; gDNA_ID_1620801; Annot_ID_168674

SEQ ID NO: 22400 - DNA, 3003 bp, Unknown
  misc_feature (1)..( 3003): 2750-1469P.txt file - cDNA_ID_2053264; gDNA_ID_1620801; Annot_ID_168673
acctctttcagaattcctctgagaacatcagcgttactcaaagataaatcaaactccactttttcctctaaagcagaagcaacaccaacaccgttagcatcgctcatgcttggatcaaacatgaactccaagactctaagagacaggacttcattaatcctcttcccatagtcatcagagtactgataaccaatgttcatcaaatctgaaacaaggaacttcatattaacacttgctctcaaaatacacaaaaaccgtaagaggagtttcgggagttaccgagtaagcagcttagatccttgacaaatttggctacatattcaatacaccataaccattcagctatttgtgcgggtcgagaagaatactcatccatgagatcctcgaggctcaaatcagaaccaccatggtcatccataagagctgcgttacacaaaaatacagaatcaataaaccctaaaccattttctccttaaaaccctcaaatcgatcaattactaaagacaagcctagagatttcaacaatcaatcaaaaactagcaatgtcatacacttagattcaacatcactgatacaaaatcgctatcagacataccatagaaagagaaatgtaagtaagaatatgaaagcgaagcatcaattggctaaaacgtagaaataaggaagatgaattttacaaaccctagaagtgagttagcgcgaaattttccataatgaaaatagaaaaagaaaagcccattgatttcgcgaaactgccgccttaaattttgaaacttttccttaagaaaatttgaaatcgagacattcttctccggtcaccatgttggagtctggttagtggggaacttgggaagacgaaaagacagctgtgtatattgggccgtaaaagggccttactcgtttttctataactgatcagcaccgttgaaatttaaataaaatcatcacgtaggcttattaactaaaaagctggcataatatttacttaggccgacgaaaaagctttattgggcctggtccattaatatgtctattttctatgtctattatttccaaagaaaatagacatattaatacatgaaataaaaatagacatattaatacatgaaataaaaatagacatattaatacatggaaaatagactcgcatttatatgttgtctattttcgttgatccaaacaaaaaacaaacagaaatcaattatttaaaatatgcaatacaccaaccaacaagctacacgagtgttaaaaactatatgattaattagatatatagccagccgtaaaaaaaaaaaaaaaaaaaaaatagatatagagccaaattttaatttaaaacgtgaggcaaaattataattaaggaatgcagttttttcatgggctattttttttaagatagcagaagtaatgtatataaattgtgatcatttgaaaaaaggatttaatgtataatttgactaatcctgcgtactaattaaaccaatgacagtgaaaaagattataagaaataaagtaatagtaataaacaaacaagaaagacgcgttgcgaaagctgcgttcacacggacgctaatgatttaagatcaaatcatcttggagatgtatatctacacactacacttgtttcttgtcgactatatgtgaccctttttataacttacttttttatttgtctgtatcattacctcgaaaagaaacaaccaaacaccaatcgtcactacatatattttacctttaaaccttgacatgtgaatctaaaaacataacttatacgtatttgttccgtttattccgattctgaacaacttattaaaatgctacaaatactcgacatagaagtcaagctatgatatcgagttagagaggatgtaaacaatgcaattttatgttctgatgttgatgtgtatgtgtatttaccgacattgttttgtgttatctttatgcgtatacgcgattttgtagtcacatcagcttaatggtgtatgtgtgaaaacaaaagcaaataagagaaaaagaagaggcaacttctgtgtttcttatgtagatgcttttattatgtaagaaagagacgttagacattgctatccaaaattaactaatcagtcaaacaagtttttgaaataaagtcatgttcatattatctagttttatcacctaaactggaaatttttgatagggttaattagccgtgcggagtactacttccaaagcttaaattttagattgctaattatgataaactaaacgttagtgcgtattaccacttttcatgacaaatggaatgattgaaaattcgaaactaggaacaaaaaaaaagaagctgatttggtataatcagttgttaaattcatgtacaaatcgtatatatggttggagctagctagactgcgatcggtttgatatgtgatcaagtcataaaataagacttttgaaactctagtttcttcttcttcttgagacgcgggttaaattgtcaaagtcacaaatctttttgttttctgttttatggaaatttatatgcaattcttatggccaattttgattgcaacaaacaaaatttaaatgcatcacattcaattaaaccacatcaacgttagttaccatacatgtatggactaaaacatctgtagttgatttatagcgtagacttcctatggcttttagtatctaaaattctaattaatttaatatccaccaaaatcactataatgttttaacctttttaaagcataccgttgcaagtaatctatttacgtgttcctccgacgacttcgtaaacgatgctgttattcgtcgttttcatacttttggaataatccgataatcacagcatcacgttctttctcttcctctgttcaagattaatttatataataagttttttgattaatcatcattacaagcaatcaaccattaattatttatttctatattagtagtatatatacaaatgccttttctcctacaaaagactcgctgcttttactacaagaggaaacagagatg

SEQ ID NO: 22401 - DNA, 3000 bp, Unknown; identical to SEQ ID NO: 5543
  misc_feature (1)..( 3000): 2750-1469P.txt file - cDNA_ID_2053288; gDNA_ID_1620801; Annot_ID_168665

SEQ ID NO: 22402 - DNA, 1482 bp, Unknown; identical to SEQ ID NO: 9433
  misc_feature (1)..( 1482): 2750-1469P.txt file - cDNA_ID_2053370; gDNA_ID_1972120; Annot_ID_178919

SEQ ID NO: 22403 - DNA, 3003 bp, Unknown
  misc_feature (1)..( 3003): 2750-1469P.txt file - cDNA_ID_2053370; gDNA_ID_1620803; Annot_ID_168740
tgaaaatatgagattgattatttgtataacacggaaaatatgagattgattctttatattacaatgaaaatgaatgattcaaaactaaagatcatagtgtaatatagtttagcttagaaaataattaaaacgattttatttatttatttagttttctaaattttagtttagattcagaaaataattgtttaatttccttagaagatgataaacatatatggaagatttgaatctctatatattttaaaaatcaatcaataatgtcaatataattaaaggatagattagaaaaaagtttcttgaatgctaaataattaatttgttatttataaacaaaatattaaatgctgtaaaaacgaaatattaaataaatatggaaagaaaattctaccttaaaatattttgtactattaaaaccgattttttttttgcagcaaattaaaaccgaaaattaataaatacttaagagagattttaggaatgatttttttgaagtaatgttagactttttttgaagtaatggtggatttaatatagagacattttaggcaatatttttgttaggtaaatatttgatttaaaatgtcgattgaaaaaaataaattcagtggcattgagtcgtaaataagttctaagtccaggatttatttgttaaaatgactgcaaaaatgtatatatagatatgaatcatttgttttaactctacactacatataatggtcctagctggcttgtactaaatactgagaaccctagctaaatgctgcactttgattgatctggttcaaatcaagatgattatcccttgatcagttctttgattgatctggttaaaatcaagatgtccataggattttcgcaacatagcccttgcctaagcgtctaggcgcttagacaaaaccaacacatacattacatctacgaaaaattatgtactctgtatatataaacaataaaatacatgtagagagagagagacggaccctacgagtgggagaaacatgagaagagagtatggagaagagatgtttcatgcgcattcgtcgttctttctctctgaggtttcgttgttcccgtaatgacgatgcgcttccttctcctatttctctcgctctttccattcttcttcttttccttttttaggttactatgtttaattccctctttccaaatccatctctccctctataaatataaagagatagagagaaagagccgcgtaattttagatgaaaatgatgtttttcaaagaaagtcatggcttttctggttgcgtccatgagcttacacactacttaatttatacatatatatgcttcttttactttgtaagttccactcttagagatactaaacatgtccaatatgttttttacttacttggtaaggttttgttggacacatttctagaacctagatagtgttacgctaggttttgttctagtgaagcttgtagaaaatgtgcttatcaaaatcatttcagcagaacatagtaattaaattagtcggattatatgtgatgaattcttcacataagtaccatgtttggatcgacaaaaacaacaagggaatttttttgttataccatgataattatgttgatcatttgtaataggctagataaaattaaagatacctttaaatgataatgtaacaattccatgtttaattaataggtgtccatatttattatccgaattacactatacaggtcacatatgctaagacaatttggtgtcaaaaacgaagaatctaagattattcaacaagctatcattattccttaccgatataaaagactttgaactattttttggccgtaaagctgacatatttcaccggagatgtcgttcaattatacacttgaccaagtcttattctaataacaaaaataataattatacacgtgaccaattctagattgaactttctaaccaattctacatgaatcgttcaccgaataaaaacaaaaacataaaattaaacctcgcaaaattgagtcttggagcctttgctaatttcttgaatactaaaagcagatcactgttgatctacatataattatttatttctgttgttcgttatttatccataaccaaaccatgattagaactaaatcagttctgtggatgcggtaaaacaatctcttcgtcgaatgaccccaaccaaatattcaaatgtacacttgctaaaacccggttcattggtagtccggtttggttcgtagtatttgagtcaatttcatatccctagatgttatgcagaattttgccacctagaccgaacagagcgttttcaaaacttggaaaggaaaaaacacaaagcatttagaacatgatggaacacatgttagccgcaaagaagtaaaagaagaaaaccttcattttgtcttctttccttgttttgcaaaatcgtccaaaggaataacttgtgtatatttatctgtttttgggtataaaagatatatatatatatatcgcctagtcgtcgctgcttgttgttgtcaaggcacacatgtttattctttatttttgtcaaatatttgaatcaagatcagctactattctaagaaactggctatttctaaaataacactcacgaattagccattatttataaaatggtaacggtatattcgagattccagtccatacatgttattaataaagaaagattggatctccatataaaaaatagctgtctcttacattgtagcactagctaaagatctttcaatactacgtacctagtcatacaattctttgaatatggttttaaattgtatgtgaatattattaagtgagaatagtatcgacataacaagtatgaaatcttttatttctatatattttatttaacaacctataacaaacatttcacttcaaattctcactatatgtagtccatcatcaactactttcttttcgcatatctttgaagtttttggttttactaaactaactctatcataaaaggagaaagctttaaatttaaccagaaatg

SEQ ID NO: 22404 - DNA, 3003 bp, Unknown; identical to SEQ ID NO: 20764
  misc_feature (1)..( 3003): 2750-1469P.txt file - cDNA_ID_2053385; gDNA_ID_1620803; Annot_ID_168735

SEQ ID NO: 22405 - DNA, 3003 bp, Unknown
  misc_feature (1)..( 3003): 2750-1469P.txt file - cDNA_ID_2053402; gDNA_ID_1620803; Annot_ID_50515
acaaaccacccgatttgaacagaaatatcactgagatatttggaaagttaattaacatatatagaggtacaatctctggtgtttgtattctagactactcgcttatagtaagtaagtaacaatactctttcttttttttcaaaagctttgggtgaagatagacggtcctttagctattacaaagctatccccgtcattgaaaagttccccactaggattgaaagcgttgatcagctcaaacacctccctggaatcggaaaggcaatgagagatcatgtaagttgagaaatgcttcaaatgttttgtctaggttctgtgtgtgggtgtcaaaactgcaaacacttacccttttcctagtgcatacctataacctttgttttgatgtatttctgtgagaacaaagtcttattcttctacctgaatttggcagattcaagagattgtgacaacagggaagttgtccaagcttgaacattttgaaacagatgagaaggtaattttgaagtccttggttatagttattttgctatctcccattttcaattagatacaagctcacatgtagaggccatttgcttttctcttgttcctttttctctttaaagaaaaatactgtcaatgaccgaactggagctagagatgtctgatatgttttgtttaccactataaatgtttcattactatggttgaaggttcgtacaatcagtttgttcggggaagtttggggtgtcggtcctgcaactgcactcaagctatatgagaaaggacatcgcacactagaagacttgaagaatgaggattcactaacgcatgcacagaagttggggttgaaatattttgatgatatcaaaacacgaattccacgtcaggaggtgcgattcttaaacttcaacgtgaattttgtttgtctttattatccttcttgtaattttctcctcatatttcttcactttctgtattgtaggtgcaagagatggaacaacttttacagagagtcggcgaggaaactttgcctggcgtatgaactattcagtttatcggtctgctccatatttgggtgataaaagtttagtgaaatcctaaccaacatctttactgcaggtgaatattgtatgtggaggatcatatagacgtgggaaagctacttgtggagatctggatatcgttgtcacccatcctgatggacaaaggtacctacaatcttctttcctcatcttcctgcgttagtttcctgtaacaaagtttacttaaactgttttttcttattgtcctgaccagtcacaagggatttttgacaaagtttgtaaagcgtttaaaagaaatgaactttttaagggaggatctcatcttcagcacccacagtgaagaggtaagatgatctgataaaattatttaagagaggatctcatcttcattgaaaacacattacttcagttgtttcagtatcttataaaatgatctcttttagcattagataaagctttgttctctcagagttgcatgtgtaacaaaaattcttgttcaatcacagctcctcaatgatttcccttattgtgcagggtactgattcaggcgttgacacgtattttggtttgtgcacttatcctggtcaggagctacggcgccgtatcgattttaaggtaacacctgaaaactcctaatgtcacacaatgcagaaaagaactaagtgggttagtcaaagataaaaaggacaataccatgattgattcagctatgtctaggttgatctcttcccggaagatcattcaataaatagtcttttttcataggtctatccaagggatatctattcgtttggactcatagcctggacagggaacgacgtgttgaacagaaggtatggatatgatttcatttgtatacatgtctcactaaacacatttgttggtagataaagaacacagcatatgtatatatatatgcgatgataactgcaggctgagattgctagcagaatcgaaaggatatcgacttgacgacactggactattcccagctactcacagttctagtggtaaccgggtaagtaagggagaaaagtgaattaacttgatgtgaattcttgggttttaaagtgaaagaatgattatgttgaagctgtgataatgtttgtctctcagggtgctagaggaactgcaagtctgaaactctcaacggagaaacaagtttttgatttcttaggatttccttggctcgagccacacgagaggaatctctaaggcatcacaggcacacagcctttggtactaaattttttttttttctttttgaataggttctgtatgtaagtaatcggttcctttttgtaattgcatatccatggacaactgatttagatgttacatataatgcaatgcaatgtacttgtattagaaaccattgcatatctttaaggtaaactaagaaaacctatggtactgaggaaacttgggatctcaatttttttttaaaatacaattcctttactaaataattaattacacgtgtcataagatagttggattaagtgtggaaataagagtgtcaaatgtcccacatcgaaaagccagcagaaaaccaatttgtatatataaggacacaaaagatagatggtcacgaccttacttgaacaggatctgttctataggctcgtacctctgtttccttgatttctaaggagacaggccctaaaccctggttgatgaaccatgaccgtgcggtcagagcgtgattgatggctacgatcgtcttcggacgcatccggtgctgtagaggatcgttactcggcttggtcttccttgccggggtggtcgcacggcggtctgacaggttctttttattttaccctcggtttttttttttttttttttttttttttttcaccctcaaaactttcaatttcttacattttcaccctttaattgaaacctcgctaaaaccctcagctgttttattgcagaaaacaagagataaggttgaagagtgaagcaaagcttagtaatg

SEQ ID NO: 22406 - DNA, 3003 bp, Unknown; identical to SEQ ID NO: 22405
  misc_feature (1)..( 3003): 2750-1469P.txt file - cDNA_ID_2053402; gDNA_ID_1620803; Annot_ID_168728

SEQ ID NO: 22407 - DNA, 3003 bp, Unknown
  misc_feature (1)..( 3003): 2750-1469P.txt file - cDNA_ID_2053495; gDNA_ID_1620806; Annot_ID_168850
gtgtctggtggagtgacacgtgtaacttctctctttgcgctgttgagctccacggtgtaaagcgcagaccaattcttgaaataacgatcaggttgctcgtgagcagagatgaaatagagtctgttgttttgagtgatgataggacggtcgtggaagtagctctctggagctccgggaatctgctcgggcttagaaattccggatcgggttttgtaaatcctggcggatccgtttctttccgaaacaaagacgacatcatcgcttttatcgttgacgaattgagcgttgaagttcacggaaacgccgtctgttaaacggcgttcgacggaggtggctatgttgagagagaagacgtcgaagccgtagtgagttcgaccgacggtggtgaaaatgatagtgcctttgggagtttccattgtcgagtttttgatgaattgttggtggtaagtgattcgagtatttatagaaggttgtggaggtgtttgactatttgactgagtgtgaagtgtgaacggaacaaaactgatccgtacgtgcgtgtgtaatgacgttgcagtcttcataggatcttttatcgttaattacgtggaaaatcgacgcagaagagattcatgtatgtgtaatagaatgtgagaaaattggttttgaatactaaacagtggatttgaccaaagacagagaatgagctaatgaagttgtgacttaacaagcaaaatcgctgtcgtatacaccatgtgtaatatctcttctagttttcaccaaccaagtattaaataaccaacaagaatacaacatcaagcaatagaaggattgggttttccggcgatcagtaaagtattttccggcgagatgcttgccgggatatacttcactagctttgaatttaatccatgtttcttaacccacttcatcctccctgcatcgatgatctgtttgcatttgaatcctaaaacagctctttccatgggtttcattttcttcacaacttcctccacgctgatcaaagaagcatctcttacttctccttcttcctcctcctttgcactgcatcagaagaacaatcaaatatgaaacaacttatatgcagtaacttctttatcatctttaaatccaagaaaatgttactttgaatcaagaaggtcaatgtcatcaacaccgggaagcttggaaccgtgatcatcatctactgcccagctagtgaacgaagtcatgatatggaactcgtccttggaaatccccaggctaaggatatattctttatctgagagacacataaccatattcttgattaaatagagaagttatataataatctgatagatcaaagaagtcacagtgactgtgagtttacttatgtagcttttccattgggaaagatgatggcaacaagtcgcaatagcgagacctctaagtactgggctttcaccatcttgtctggataaacaacatcttaagctcaaatctattatcgacacataagaatgaacatcaattagcaaaaccagatgctataaatgaagtggaaatctaatagtgaaggagcaaagacataagcatgtagtgacctgttgcaggaccacagagatgtttccctacggccacataaggaacaccgtgcaaagattcaaccgcgttaaggttcaaatcctcaactgaaaacacacaaggttttttccatcattaatacataacctggaacaagtaaacaagaaaaggtactagatttacgggaaccttactatcgattctcatacgctctaatactaagctctccttttgcctcaatgacctatcagcctatatgcgataaaacaaatgtggactgaaaaacaagatagattactaaaaataacagaatgaacacaaactagcaagcttaaccaaccttaagcttgtaagatttcctctcaactagatacacttttttgatcccatagcaatctgctagcatctgtgttaagtatcctctcccagcgccaaattcaacaaccgctggcgcagtattatcgtctttctcttccagatcgctttcgcaacattccacatttatgttgcacctcttcaatacaccaatctcttccaagttaccaagaattgaaccttgctgcaaaacatgtttctcttgaaatggtaatttcctgccaaacaatatgtatcagtcccgaaacttctcctcgccctatccatacccaagaaccaaagctccaaactattctaaccatttatgatttacctatctatctccttattaaaccatatgttacaagcttcaggtgacaaatacgaatcttcgatatctttacaaataccgccatgaacatcctcaattttcttaataagctgatgaaacttagaaacactcatactatagagcagatttctcttcatctctgaagtaacaagagaacaagatcccatcttttcttcttcttcgtcgttcccagcattaatacccttctgataaaatcgttgaccagacaattctacagtttgtttaagtaaaggacatctctttacatgccattcgagattctcctgcaacacagagctaacaaaattcgaatcaaacagttgctacaatagcagaaaaattgcaaactataacctttgaaaaaaaaaacaaagtatttgactcactgagaaggatcaatagggcatggaatccattgaccttccaatctctggctatggtttccacaaaacctgtttgataactttgaaaaattagctcctcactaatttgaacagaagaaaaaaacgaaactttactctttcacttacatagaactctcgattcgagtattcgcgcatgatcttttcttcttcggaagccagaaactgcatcgattgctacttttcgcctccattctctcagccagagttttgctcttgagacaaaggagacggaggtcttcaacgggtcctaaaaagggctttttttggcccattaagagcccatttaagtttaaaatcgaatcaatctaagcaaccatttgaaaaatg

SEQ ID NO: 22408 - DNA, 3000 bp, Unknown; identical to SEQ ID NO: 5608
  misc_feature (1)..( 3000): 2750-1469P.txt file - cDNA_ID_2053503; gDNA_ID_1620806; Annot_ID_168847

SEQ ID NO: 22409 - DNA, 3000 bp, Unknown; identical to SEQ ID NO: 5608
  misc_feature (1)..( 3000): 2750-1469P.txt file - cDNA_ID_2053503; gDNA_ID_2926172; Annot_ID_199564

SEQ ID NO: 22410 - DNA, 3003 bp, Unknown
  misc_feature (1)..( 3003): 2750-1469P.txt file - cDNA_ID_2053559; gDNA_ID_1620810; Annot_ID_169012
agggaggtcaggatctttacgttagactagccgctgctgaactcggttagtttctttcttatttgcatttactaaagtggttcttactttttgttttgattaaaaagttatgacccaaagtcaatatatcttcccaatctgcggaccaagtcatgtaatattgtccctctcgaagcaaagttcaaactccctaatctatagaggctttggtcaacaaagtacattcttgatgtttggtcaatttgtttagttttttttttttgtcatctgtttttaattagagatcaaaagattaataagagtttagctagatccaataccattataccaaaaagaatttttgtttaagttaaattaattattttgtttatttttcgtattaattttttttaatcaaacgtacaacaaaggatatttttcgtatagaagtaaatatatgcctcgtttttattgcagaggacaagagaatcaaaaatgaaaaaattataggttcgagtattggagtgagcattttgcttcttttaagttttgtcatcttccatttttggaaaaggaagcagaagcgatcaataacaattcaaacacctaatggtaaaataaatcattagctttcatttcctttatttttgtcaataaattttgataatcaaatgtcttgattgttttttttttttttaacgcctgaatgaaacagttgatcaagtgagaagccaagactcgctaatcaacgatgtggtagtatctaggaggggttacacatccaaagaaaaaaaaagtgagtacctagagcttccattgttggagttggaagctcttgccacggcaacaaacaatttttctaacgacaacaagcttggacaaggtggattcggaattgtttacaaggtaaaagtgattcaaaacatattgaaaatctaccacagcacatggtttcattgtataatcacatgtgtggtaatagggaagattacttgacggaaaagaaattgcggtaaagagactatcgaaaatgtcctcacaagggaccgatgagttcatgaacgaggttagattaattgcaaagcttcagcacataaaccttgtccggcttctaggttgttgcgtcgataagggtgagaagatgttgatctatgagtacttggagaatttaagccttgactcgcatctctttggttagtgactcaaacagcttctgttctaataattgaacatttttgtgaaaacgttaacttgttgttggttgtgttggatgtgtagaccaaacacgaagctctaacttaaattggcaaaagagatttgatattatcaatggtattgctagaggacttctatatcttcaccaagattcacggtgtaggattatccatagagacttgaaagcaagtaacgtattgcttgataaaaatatgactccaaagatctcggatttcggtatggcgaggatctttggacgggaggagacagaggctaatacaaggagggtggtcggaacttagtaagcaatcattcttcaacaaaacaaaaaaagagcttttatctcaagtccaaatattttcttaaaaacctcataacatatgagtttatattttgttatgcagcggctacatgtctccagaatatgcaatggacgggatattctcgatgaagtcggatgttttcagctttggggtcttgcttctagagattataagtggaaaaagaaacaaaggattctacaactcaaaccgtgatcttaatctcctcggttttgtaagctaaaaacctcttcaattcgatattgttttgcattcataatctgattataacactaaagaaatattacatcctttatgcacaggtgtggaggcattggaaggaaggaaacgagctagagattgtagatccgatcaacatcgattctttgtcatcaaagttcccgacacatgaaatcttaagatgtatacaaattggtctcttgtgtgttcaagaacgagccgaagacagaccagtgatgtcctcggtaatggtgatgcttggaagcgaaactaccgctattcctcagcctaaacgtcctggattttgcattggtagaagtcctcttgaggctgattcttcttcaagtacacagcgcgacgatgaatgtacagtgaaccaaatcactctctcggtcattgacgctcggtaatttgtaacttacggcccaatctgtttacatgcatatcattttataggtaagtctaaatagattttattactacatatatgattcgatatcttgctctatctaatttaatttagacaaaagattcaccacatgtttcacatgattttgatttagagcgagaattataaaaaaaaaacatttagacaaagacaaaaaaatgcaagatttggagttgtcactccaagatttgaagtttgagaccgaaactcaattaagtgggaattcagtaatgattaatattcactttttgtacatactactgataatagaccaatactggaagcgaacataggactttatggctattacaacagaggactttatgaaacaaatcgaatatataccttaaacttttatgaattcatcggtgaagcattctcttgcatataacatttagtatgtcgccagcaacattgaaattttgtctattctcgtacacacacacacaaatggttgaggatattatttttttggagtaaacgaagaaaagtcagttactaggaaattacaaaaccataattatcaatttaacgacttttaaggtcattgactcaattctatagtgacatagtctatagatatttcaaaagcgaacaagaagaccaagaaaatgtagctgaaaatgaaatattatcaacaatagagagaaatcgtgtaaatgacgttcacacatttcaacaccaaacatgtcgtaatctccgaagataaaaattctcaattatatgtacataaaattttcataagaagaaaataaaacagaacacaagaaagtgtcctagctagagagagagagagagatg

SEQ ID NO: 22411 - DNA, 3003 bp, Unknown
  misc_feature (1)..( 3003): 2750-1469P.txt file - cDNA_ID_2053565; gDNA_ID_1620810; Annot_ID_169011
ataagtctgacggtattcgcgtggtagcatcttctaacatccaaacaattcagtattgcatcttcttgtgaaggattcagcttgagaaaacgacgaggagcaagaccatcacttccttcttgtaaacactgaatgcaaaatccttcatcctacacaagcagaagccaaaaatgatatgactacaaacatcgaaagctattacagagtttatcaatatcttttacctcactgtttcttcgaaggactcttgagataagattcaagttcacaccttcatcaccaggatgcaatgcattccagatacggatattagtagttaaattgacgagatgaataccgaaaaggcgttctttcttctcattcttcttcctccttccatcctcaacgaaaagaggttttgaagccaagatagttacatcattaggcctatctggatctaccttacacactaaagcaactatataaggttcactggaaatattgaagccatcaacatggtttggtctttgatctgttagcgagataagatctctaggcatcaactttgtactagcctcattacttattccactcaaacgcactttatagaacaagtcattaggaagcttatattccgcagtttgcataatgtagcttatttcaaccacaggtgcttgccacaacttcctcatactcgacaataaagcggcatgtgtttcttcgataagcggaggaataaaggtcttgaagtagtctccggttgattcaaactccataggtatcttctccacctgttataagcaatcaaacacacaaaattactctctaggaagcttctctttactcaaatgggacagagaacacaagaaagtaaaacagaacctgtcctttataaagatcaacattgagaacttcgtcaagagaccatgagagcaccagatcgactaaatctcttccttcaatacgcattctcggcatttatattaaagttaccaaactcgatttcgtactctgaaagattaacgcaacaaaacccattaaacaagtgaaccctcaaaggtacgaactttacacttttggctataacagagaagcaaaaggaactatttttacgagaaccattgatcattgaaaggtaaagtaaggttttttcttctttgttctttttggtaaacaacgtcttaggattttgagattcgcaatgaaaaaccctaaattctaacgttggcttgaacattagagcgtgtggcaacgaaatttgaagatgatgcaatgaaattttagccgcttactttgaattcgagttgttgttgtcagagtttgattacttcgagacgaagaagggtttggttttgggagacaggaacagaggtttcttttagaaggacatggatgagtaaggatttggagggaaaggaggagaagaagtaattaactaaaatggtaaaattttggggctttcttgagttatttgtttacttacgggtctactatgtaaagtaattacgtttcgtatttaaccggtttacacgctttcgcaatctagcctatctacgccataagctaaacatgactagatagtcctataaggctatgacaataatgttaatttaaaaaaagaggatgtgttcgtggatgttttagagagaagctagagaagaagaaagcaatagaatttagtatattctaaaatctatttctatttttttttgcatttgcatagtcttcaacattaataataattatttgtattgacaaaattttcataaaataaaatctatgtcaaataatattataaagacaaaattttacacaataatacaaaattatatatgaattagaaaaaaatgttgaaggtaatatagcagttaacaatttcttgattcatttaaagagagagtgcatcaattaagagcaaatgttatgagatggctcaattctatgcaaaaataaaaagataaagttctaaaaatataaagcatggaaataaaatattgataactccttcaagtggtattgatgagtttatacgatctgaacaagtaagaatcatacaaaacaaatcaagaataacaacaacctatgattgcacctaatatttattgacaatattttggtgactttaaaggaattgtacgttgtaaaatcgtttatgtaacaagtctcattatttgtaataaataataaattttataactaaattttataaataataaaacagaagggcccataaatattttgtgtattgcttttgtttttaataactaaattttattagaactgtcatacaattttttttaaataatgtaaaatctttaaaagaaatttataagggcagccaaaaaacaattttgttctagaacccatgatagaattgaaccggtcatgatgcgatggccagtacacacagcactacgaatacgaagctctgccaaacaaatgtcattttgtagtctaaggttaatgatttacttgtctagcgaatgaaatagttgaagcttggtggtgtaagttaatttctttcatgaattgatattcgtaggaaaggaaagaaaaccaaaaaaaaaagattatttataacgagaaaaacacaaattagttttatatctctctgagacacgcataggcctggccacacacacacacaaataaggagtgttgacgagatttgtttcttttttgcgtaaacgaagaaaggtcagttactaagaaaattacaaaaacactgataagtaaatgtctatctaacgagttattttcttgtcatttgctaggtcaactctatagtgacagagtctatagatatttcaaatgcgaacaagaagaccaagaaaaccaagaaaaccaagaaaagacagccgaaaatgaaatatcatcaacaatgtaatatacagagtaatcgtgtaaataacggcacacatcaacaataatatgaatctccgaagataaaaattctcaaattctcataaaattccctcaagaagaaagaaaacagaacacgagaaactgtcctagagagagatg

SEQ ID NO: 22412 - DNA, 3000 bp, Unknown; identical to SEQ ID NO: 5680
  misc_feature (1)..( 3000): 2750-1469P.txt file - cDNA_ID_2053621; gDNA_ID_1620810; Annot_ID_168995

SEQ ID NO: 22413 - DNA, 3000 bp, Unknown; identical to SEQ ID NO: 5671
  misc_feature (1)..( 3000): 2750-1469P.txt file - cDNA_ID_2053625; gDNA_ID_1620810; Annot_ID_168994

SEQ ID NO: 22414 - DNA, 1282 bp, Unknown; identical to SEQ ID NO: 8020
  misc_feature (1)..( 1282): 2750-1469P.txt file - cDNA_ID_2053649; gDNA_ID_1621183; Annot_ID_174325

SEQ ID NO: 22415 - DNA, 3003 bp, Unknown
  misc_feature (1)..( 3003): 2750-1469P.txt file - cDNA_ID_2053649; gDNA_ID_1620811; Annot_ID_169078
aacaccgtccgtttcaacactattggttcgggtggaggagacgcagcagttccaagagctagaaccggcatcaagtgatgaacggatccgatagggaacgtaagagctgacattggtgaaaagaagcgccaaaaagtcaaagaaagtttgctacgagaaaatcgtttctcattggctcaatttatactcactacttcgtggccactagccaccatggccatcaaaaacaagtaaagaaaaaaaaacatgtcacgagtggccatcaaaaaaacaaaacaaaaataaaaggaggatgccacgtgtaacccataacctgctacaagaggtgaaccgcacctccaatcatttgtctaatttcggtgtcgtgtccaagttccccggtggctttgaatttatccatcggtattggactaggttttggatggattcaaccctttgtcattttcattgagttactttctaatagtgtgtacttgttaaaaatctcaattattagtgttttatggctttgttcggaacttcgttgatatggacaatagagcaacatgttccttggaacacaagatagtagaaagcgaggtgttgaaatttctcccctctcccgctgttaaatatttttggtggtttgtgtattgtgattgtaatttaaaaatgattaataaggagcaaatgcccttagctttctcccatttcaaatttagggtttagacccataacctaaaatgtattattagaatcctggtcgtgaatccaatcttattagccaagttctactccacttccgtactacgctgtgtctaaatgacaaatcgtttatgttggagatagtccttattcattattcattatttcattattagagagaatgacaagaaaatcattgtgacgaatgataattgtgccgttttcaataggctattttcacacaaagtgatcagatctccccgtcccacatctcggcgacagatttgatgggacctttcttagaggtataaacctctccgtggacgtttctgaactgaggaatctcagttgaaattctctgtgtctcatcctctgtcaaagaccaatcaaatatctttagattctcttctaatctctctttggtaaagctcttcactaccatgctcactccttgttcataagcccatctcatactcacctgtaattacaactccaaatatgagctttgaactccatggatatagctgatgaatacatctcaaatttttctgttgagattcatgttaccaagatagtgactgactattgatggtgataaattgataataactgataaacgtccccactttttttttttgttgttgtaaaagttcatataaatgtcaccaattgttttttgtatttttcttgtttgatagtatcgtttaagaaaacttttgaaagtacctgggccactgttttttcctttgcttctgctatttctttgagaacatcagattccataattttgggagttccccaaaaagctcctctagatcccaacaccgagtacgctgtgacaacaatgtcgttcgatctacaaagctcccttagctttctttgttgccatattggactcatctcaaccttgttttcatccataaaaaaaaaagaagggtgaattggaattgtttgctgaaaaagaaatcaaagagtaaaaaagtagtgtttacttgattgacgctaggcgggattgtcgcgatagagagtatgtgttgaagcttcttacatgaaaaattgcttactcctatgcattttgcgagcccaagtctctgacactcctccatttcagaccacactacttcgaaatccattggcataaaatcatcttcatcaataggaaacttgtatttaccaggtttcgagctaaccggccaatgaattatataaagatcaagatagtccagtttaaggtttctgcaaaaccatatttgttacacaggtggtttacattaagttatgtcactcccaaaataatattcaatcatgaaacataattgacacggtgactgatagagaacctgatccatagagatatgtgaaatagttttctgtatttctcaatcggaaaagtgtttacaagtatgtttgtatacatctacactaaaccaactaaaccatatacaatcacaatttaacttaaccggaatcactaaaccggactatcatatatacagttcgaatagtgacacctactctcagtgattgaaaccgtgcattctaatttcatgtgaaaatcattaaggaatctaaatcttacttcaaactccgtttgatcgccggtacgacgagaccaccatgagcatcagcacaccaaagtttggtagtgacaaagaattcagatcgagatcgaactaagccgagtgaaaccgcctccgctaaagcttcgccgatcggctcctccgtttggtaccttggagaggtgtcgaaatggcgataaccaagcttaatagcctcaatcaccgtctctttcagcatcgttggttccggtagcggagaagcggcggttccaaaaccaagaaccggcatcgagtgatgaccggatggtccggatctgatggcgagcgtagggactgtggttaaagacattggttaaagagaagtcaacgaaagtgtgctctcagaaaatggtttctctcggtggcccaaagctttactcagtagccactgactaatgctagtgcctgataatattatattaatatactctctttgattagaaaagtacgtaagtcttcatattataagtttataacgctatataatttgactataaattgttaatagaaagtagtcatgatattatatacgaaaaatatttgaattagtattctttaatattgtttatttggaaaacttttaaagaataatatgttatgtaatttgtgctaaaatttcaaaattttaatatgtaaatcaataatgaattaatataagttgttttcagctttttctcaaaagcatgtcacgtatgagcattaacacccgtgtggaaaaatg

SEQ ID NO: 22416 - DNA, 3003 bp, Unknown; identical to SEQ ID NO: 20806
  misc_feature (1)..( 3003): 2750-1469P.txt file - cDNA_ID_2053674; gDNA_ID_1620811; Annot_ID_169067

SEQ ID NO: 22417 - DNA, 2305 bp, Unknown; identical to SEQ ID NO: 5681
  misc_feature (1)..( 2305): 2750-1469P.txt file - cDNA_ID_2053753; gDNA_ID_1620811; Annot_ID_50583

SEQ ID NO: 22418 - DNA, 3003 bp, Unknown
  misc_feature (1)..( 3003): 2750-1469P.txt file - cDNA_ID_2053753; gDNA_ID_1971909; Annot_ID_177047
tatttggggcaaatcagatggattcgagccagaaaacaattcggctaatctaacatgtttagtctgggatacaacaacagtaatcgtaaccacaaaatcatgaagtttcttatgtttatgacaaaacagcatgtccacaatactcagaaatctatgattttaactccagttcatggaggctggttgagatcaatcccgtctggtttttacatagcgaccgcgtgtctttgaagggaaatacttacttttttgctcaagatttactaaaggatgcaaagattgagaattatttactctgttttgattttacagcagaaagatttggaccgcatcttcctctgccggttcactcttatgatgacgtgactctatcttgtgtcagacaagagcagcttgctttgttatatgggaacaacgagacagatgattcattagagatttggattacaaatcagattgatcccaatgcagtgtcgtggagcatatttttgaaagtggatatcaaaccgcttattggttttccaaaagacttcgatcctgggagcttcttcattgacgaagagaagaaagtcgttgtggtttacgatttggacggacatttatatagtaccaagaagaactgtgcctaccaaaggctttacatcattggagaagatggatacttcacatctgtaaaaatcaaatgctctgactcacctgaattctctgcttatgctccaagtttagtgacatacaaaccaaccaactacgcaaaatgaaaagaaaaaggaagaataaaagaagaaagatgcagattacttcttagttccatttgcaatactttttttgttacgtatttttttgcatcgtctcctgttttcattcattgtctttcatttccttttgaacatttattaatttgttttttgctatttatcatctaactaagtatttagatttatcatgatattttaggctttttttcaattgttagtatcaaatttttcaatataaaacaaattatatctaccacaatgcagattcgtcttgatgttctttgtgattgtcttggcattctctatatgtttttgtggaagcatcggagttttagattagatatgattaacgtaggagttcatgtagaagtagagagatgtgttgtaatttataaaagaggcttcatgataagatagcttttgttgtttgtcttcacttccatggttcattgtcttccttttccattgatgtgctggtgaatcacaaagatactcatgcatttttcaatcctaattttggcatatgtaagtttttttcaattttgtttgctttttaatccaggcattggatgaaaacagagagaattcagggctaaagaaagcctttgatttttttttttttgtgtgtgtgtcaaaacagataataaccttttgtttttgggtcgtttaattgctatatgatgcatcaaatcttgtaaacaagagtgattccaagaaggtggaagtatttccgcatgattacggttgttgcttcacaaaataggagacggcttgtttcctctgccgaaccattgacatgtaaaggtaaatgttcatgttttgagtgattgattgattcaagccttaattagcatgtttatattctcttttccatatcatcaactaacattcataccagttgtttctaagagatttagtcgctggcatgaactaatatatatgcaatagtatagaggcacacaaataaaagatttgatcggataaagatcataagaaaaatcagagacataaagaacatgcatcatataaaataaatgtaattgaaagggataacaaagaaaacatttgataagcattgacctatgaaggcgctacttcacaaaaacacgagactcttgatgtgatttgggtaaaccttcatgttgtacatatagtctttaacaaatccatagcggcttctaaattcatcacccacaattccttcaaccgagacttctctaatactgtttctcctcggatcaaaatatagtagataaaacgattcaaacaatatcgatggtgcaaaaacaatctcaccagcatcactaacaccataaaagcttggcttttctttccgtattaggtccatttcagaaagagtcaaaaacgcgattatgcgtccattcgtgtctatctccattcgtcaaaatccatatatcaatagacgggaatttaaaagtcttaactagggctaaccttcccacataaggtaccatataacaacttttcctataataaccctctggaagtttgatctggttgaacttttcagatctaacgtctaagctcattagtttgcgttccacttcaataccatcaccaacataaacagttgctccatagtacatgactccattaattagtatatgcatcccccacaacgtatagtagatcgatgcctagggacaccgttggttattattctccatgatcttagtccttaagctcccagtgtacgaatgcaaatcttcgagtctctctagtaacatgtagtagtacaatgattcaagttttcaatcaatctgatcatatttacgctaccattcttgattagatgcttatcctgctcaaaaatgtattcagatatatattaacaattacttttgaatggtatcaaatatttattaactaattctttttaataatttaatccaattaaattttaactttttaatggattcaaatatatactcattctttatttagtgttaaaaaaaaaaaagtagctcaactggaaatgtatgtaaattatatattaaaagctgacccgggtctagaggatgtatggaaagccaatagcatcgtttcgaacattgcaataatattgtgtggtgacaagcaacacatgatatgtccgtttagaaacagacaaaataagaagaagaagaaagagtcgtggaggattcttcattcttcctcatcctcttcttcaccgattcattagaaaccaaattacaaaaaaaaacgtctatacacaaaaaaacaaatg

SEQ ID NO: 22419 - DNA, 2305 bp, Unknown; identical to SEQ ID NO: 5681
  misc_feature (1)..( 2305): 2750-1469P.txt file - cDNA_ID_2053753; gDNA_ID_1620811; Annot_ID_169029

SEQ ID NO: 22420 - DNA, 3000 bp, Unknown; identical to SEQ ID NO: 5775
  misc_feature (1)..( 3000): 2750-1469P.txt file - cDNA_ID_2053819; gDNA_ID_1620816; Annot_ID_169253

SEQ ID NO: 22421 - DNA, 2702 bp, Unknown; identical to SEQ ID NO: 5767
  misc_feature (1)..( 2702): 2750-1469P.txt file - cDNA_ID_2053825; gDNA_ID_1620816; Annot_ID_169250

SEQ ID NO: 22422 - DNA, 3003 bp, Unknown
  misc_feature (1)..( 3003): 2750-1469P.txt file - cDNA_ID_2053840; gDNA_ID_1620819; Annot_ID_169408
aaataaatgttgatatattaaaatagccatactagattatgatttgcagtggaacccaagcaagtataaatcatggtagataatccgtaactagctcgtaaataacctgcaaataacttatcactcatgaataacatgaaaataatctgtagatattttctagaggttggttagaacttagaagtccacctacccatcttaaaacgatacaaatacaaaattttctagtccataaaaagttttgtagtcttggcccaccattatttataaggcaacaacaaaatcattgagacatatactcaccagtcctttcttttgttgtttacgaaaaaacgaaacaagatgttttgtaaaataatataacattctaaaagccgaaagataaaaatttcaccgcggacttctcgtatggcgtcactagattctctagtgagcttctttttatctaccctttttgtcacaatcgtgagctcacaaacgcagtgccggaatctcgagtcgattatcagtttcggtgattcgattaccgacacaggaaacttggttggtctctcggatcgtaaccatcttcctgtgaccgcgtttctgccgtatggagaaaccttcttccaccacccaactggccgttcctgcaacggccgtatcatcatcgactttatcggtacttctctttctatgtaacttgacatgtaagtaagtgactaggaatgtaaatctgatgaagtatcgaatcatgatcttataattggtctcagttggagtgttttagacgtcttcaatctctgagaagaatccaaaaacacaaaaaaaaactgatagttgcgtttgaacctctgttttcttgtgtgggcacagcttttccgatttataaaaatctggattttcttgattagggtttcttatgtagactctttctctgatttggtttttcttgatctgcaagttaacagtagtatgagaccttaagtgattctccaattttctatttacagctgaattcttagggttaccgcatgtgcctcctttttatggatctaaaaatggaaactttgagaaaggagttaatttcgctgttgcgggagcaacggcactagaaacttccattcttgagaagagaggaatttattatcctcacagcaacatcagtttgggaattcagcttaagaccttcaaggagagcttaccaaatctatgtggttcacctacaggtactgaagatcaacttttcccttttctagctagtggagtcatgattattacgttattgcagtgaattgacctcacttgtaatgggtttaattctttgcttttagattgtagagatatgattggaaatgcttttattatcatgggagagattggagggaatgattttaatttcgcattctttgtgaacaaaaccagtgaggtcaaagagttggttccgttggtgatcactaaaatttcttctgcaattgtggtaaacattcttgatcagcgagtccctagaacgagtaattttttcaaaaaactgttatgttttttgttttgtttttgtgttttggtactgaatgttgaatctaggagttggtcgatatgggaggaagaacattcctagttcctggaaacttcccgctcggatgctcagcaacgtatttaacattataccaaacatcaaacaaggaagagtatgatcctctaacaggatgtttgacatggctgaacgatttttcagaatactacaacgagaagcttcaggcagaactcaacagactcagtaaactttaccctcatgtcaacatcatatatggtgactactttaatgctctgttgcgcctttaccaagaaccatccaaatttggttagctttcttgatccttagtttaattacctaaaaacccaagttcattgattcaatttgataattgagttaatcattcaattcattgtacaactagggttcatggacagacccttacctgcttgttgcggtttaggaggaccgtacaacttcaccttaagtaaaaaatgtgggagtgtaggagtaaaatattgtagtgatccttcaaagtatgtgaattgggacggcgttcatatgactgaagctgcatacaaatggatagctgatggattactcaagggtccgtatacgattccttcgttccattggttatgcctcggctcaaaaattaagagcaaggagtcattagacacgtagtgttcttttgacaaacagctgaaacaagcttgttggagctctgagagataataagaaaacaaatacgttcttaagtgctttccatggatattttatatcattgtgtattgttgtttgagagagagagagagagtggttaagtgttagtagctaactcatgtgatatcttcagagagatcttagattagaccggtcggagatgcactgttccaaaaatggaccacttcatgagtggtagaaataacagaataggagatgataaaatgggcaaggagttgaacggatcaatttgacttctagtcttcaatacaaaaccaaactactctttacaaatcaatatattaatacgatttttataataattttaattataagactaagatttgtaatttagtggtttttgttattatcgtagttatgttattatccggtttcaaatcagcgtaatacgtgttattgacaaataaatgaagtgaaattcaacatcaaattaaaatatgggaaagaacaaataacctacaaaataactcgtaaatagcttgcaaataagccgcaagtacatattttgtagatggtggttagaagtccaagtacgcgttttatagattggtggtcacgcctaccaatacaaagtcttgttgttattagaaagttaattgctttatttattacaactagaaatcctcgtttagtcatgagtcatcggtccatccctccacaattggcctctatataactttcccaaaacgaatcatttgtaaaataaaaaaaaataagatagaaactcactcctgacctctcgcatg

SEQ ID NO: 22423 - DNA, 3000 bp, Unknown; identical to SEQ ID NO: 5807
  misc_feature (1)..( 3000): 2750-1469P.txt file - cDNA_ID_2053844; gDNA_ID_1620819; Annot_ID_169397

SEQ ID NO: 22424 - DNA, 3003 bp, Unknown
  misc_feature (1)..( 3003): 2750-1469P.txt file - cDNA_ID_2054192; gDNA_ID_1620831; Annot_ID_169683
tcttaaattaagagatgctatatcagaaactaatattatattttagttaaaatctatttaaattttaaagtaaactatatattggatacaatataaggtggtgctaaagtcaatattaattaattttaagtttttaccaaaaacataacacataatcattgtaatatctattatgaatattgaataatcatactctagaaacttcacttaaattttatttataattaaataacaaaattcctatatataaaagataagatatttaaattaaaatttcattataaagcctgaaggatcctaatcatgattatcataaaagtgtatatatgattaaaaaagtttagttctcctaacagatatcagattattatatggtatgtatatacttttttttttcccctaattcgaagatgcaccaagttctatcttaattagatactaggcatcttatattttatatatatatttgtgtgctcagaacaaaaattaaaaggaagaaccaaaaacttagcacatcagaaatcgcagagcccttctctagcactcaacacgaagaaaaagcaaaagatggattctttgcaagaacttcttgacaagaagcaatacgacgaagaagcaaaacgtccatgtcaagaagcgatgaagaagcaaaacgacgttgctcttttccttgcgggggaagtaatctctgccgcagacaaaaactctaacgtcgtcttctctcctgcatctatcaactccgttctcaccatggccgctgctacctccgacagtgaagcactaaaatcttgcatcctctccttccttaggtcttcttccaccgacgagctcaacgacatcttccgcgaaatagcttccgtcgtcctcgtcgacggaagcaaaacaggtggccccaaaatcacggtggttaatggagtgtggagagagcaatcacttccgtgtagtcccgagtcgaaagatctctttgagaatttctacaagtctgctttcgctcaagttgatttccgatccaaggtcagtttctgatttcgaatttgctttgattaaattagggcaagagattgtgtgaaacgagtgcttagagaaactacatatcgtattcaatgttttggtttgttgttttgaagtttgaagaagtgcgtgaggaggtgaattcttgggcattacgtcacaccaatggtatcatcaaagatcttctacctcctggatccgttacaagcgaaaccttgtggatttatggaaacgcattgtacttcaaaggagcctgggaagacaaattctataagtcaatgacgaaacacaaacctttctaccttgtcaatggcaaacaagtacatgtgccattcatgcaaagctcacaaagtcaatatgttaaggcttacgatggtttcaaggtccttagacaaccataccgacaaggcgttaatgatacaagtcgccaattctcaatgtgtacctatctcccggacgagaaagatggattggataatcttgtggagaaaatgacatctactgatggattcttggacagtcacattccgagttggagagttgaagttggtgaattcagaattccaaagtttaagattgaattcggttttgaagcttcaagcgttttcaatgactttgcgcttgatgtatcattataccaaaaagctatgattgagattgatgaagaaggtactgaagctgcggctgctactgctctagttggtgcttgtggctgcagcctttataggcctcctcctcccatagattttgtggcagatcatccattttttttctttattagagaagacaaaaccggaactgttttgttcgctggtcaaatcttcgatccttccttatcttcttctgcttaagatcggcctaaataggagtttgggattttaagatttggtttttcatatgatttttgagttttgtttttggttttgctaaatctctatttgctttatcttattatataaagtattaaagttagtaactcaccacagtgttaattttaacggtctcagattttcaacatgtgaaacaaaaaactcatttatttattttaaaagaggaaatttatttatttaaaaaaattaaagaagattcttttttttggtgaagaaaaattaaagaagataattataagaaaactataaatatcttattaaataaaaataaaaaatattttataattctaattaatagctactaattcttgaaaacatgcaaagggaaatttactaattcttaaaaaaaggaaattttcctttaatttattccaaaaaagtatttctaaaaagtcaagagattgaaaatatgaaaactatatctcttattaaataaaaataaaaatggataaataaaaattttaaaaaggattttaaaagttatataatgttcatataaaataatataactaagaaaaatttacattcaattattaattctaaaaggaaaagaattgtgaatctcaccaaatcaccagttatttattattttaaaacaaataatcgaacaaatcaacccaatatcctaaaactttcctcaaatctctcaaaaacttcaaataaacaaattccacaaaatattctaaatttcttgttccaactggaaaaattaagaagaattttaactattttttgttttgggatttatctttatacaataaaaaataattacatttatttcaacgtaaatttacttttgttgactctttttagttttacctacctatttgaaaaaaaaaaaaagaagaagaaatattaactcttttttccagtgagtgtattgaaatatgaagtttatctaaattaaacctttccggattccatcattcaactaattaataaagaaatctacattttaataataatttgaaatttcctaaaatatcatcaatatgttcaatacaaaaagcacatccaccccttaactggtttacatcatgtaaattacatgtctgagtcctctatcttttctcttccgttatagtcttatagatcaaaaatg

SEQ ID NO: 22425 - DNA, 3003 bp, Unknown
  misc_feature (1)..( 3003): 2750-1469P.txt file - cDNA_ID_2054208; gDNA_ID_1620831; Annot_ID_169669
gaacatggatacaatgaaagcgagaagtgctaccggatctccagagactgatgttgatctcaatgagtatgaagcaggattggggttagctccggaaggaagagtccatggtggaagtttgatgatggcgatgttgggtagagatggtggctctggctctaccggtgggccaaagaggtggatgtaagttgtcttcagtttggttccagtcttgaattcaatgcgtgtgggcaagtgagagtgaaagagtctgtggttgttctagttttaggtttgcttagagtaaaaaaaagggtccaaagtctgtgtcttattggtctttgtagatattgaattaaagggtcgaagcataggttattgtgatgttgtgaattatacaggtaaaagcccacctgtggaaattgtcaaaaacagtcttatgatgatgatgataataataataaaactcatgtcttttgtttgcaaattgcaattttatcggtagggcaggtttgttgggatcatgctgagtcgatgccagtgtgtttttactttttagcagttacgttgaaacattcacaagtaggtacttaatatgtagctatatattaaaggactggatagtacaacaactcatgggaggttctatatctattttatcttcttagagatccctttattgtatagacgcgaggaacacttgtcatatatagtttggatcgattttacgtcccacgggaccattacttaagacgtcgtaggagctgaccaccagtacgaagaaccaactcattgatatagtccacaaggaattggacttggtcaaggtctttgatctcagggccagtcttatcgtactccacactgatatcgacgaggctatacaagccaatggcggaatcattaacttttgtagttgatgtaatcatcttatagccttcaaagaattcaggtacggtaaaccgttgcgtcatgcttctcgtttcgtgatccactgactcaatggtcatgtgttctcgttgccaaggccttatctctaataaccaacataaacaattacgaattatgaacaaaacatatgaataaggtgagagttattataaatagatacctgaagggttctaattagatatatgagtcatatggtagaaaaaactatcccagaatagttttggtggaagcgaaaacagaaactgcatctcacaaagtcgtctcaatgccatttctctagctacttgatgtttgccttttgtgagttttataaataattatggtcttgatctcaatgtaacatgcatgtttatatagccaaatgtttatgaaaaacatgttgcattaatttttcttcagcagattacccattcaacttttcattagatatgccatttttctacatttaacaaaattcgttggccatttgcataattgcattctctgcttcacttaatcaaggcaacaacacttggatggaagaataacttgagcggaccaaatttatcaatgaacttgaaccgatcaaattaacattgctaatttttcttcattaacttattttcttagcaataatatataacccaaaaacttatctctgaacaaattaattaggaagtaacgcacaaaaagaaatgcacaaaaataaatgtcagaagtgggatttgaacccacgccctctttcgaagaccagaacttgagtctggcgccttagaccactcggccatcctgactttttgttaaacttatacgtatatagtgtaaataatcgtataattttcaatatccataccaatcttcagactcttttttttggtgacaaagtgtatgtattattttcagaagctatatgtttttcctataaaacatccaagactggcccatacatatttttaagaaaccctatagtgtgtatatgacttcaaaatttcgaatggttagtttttctttcgaggaccaaaacaaaaagcccattcaatcactagaaaaatatcactagtcaatcaatagaccaaaagattgaaagtaggatatatttgtttaataatgcctacgattctgcgaagacaggagaagccatacctttcaatctaagccgtcaacttgttcccttacgtgggatcctattatacaatccaacggttctaaatgagccacgccttccagatctaacacagtcatgctttctacagtctgcaccccttttttttttagtgttttatctacattttttcctttgtgtttaattttgtgccaacatctataacttacccctataaaaatattcaattatcacagaatacccacaatcgaaaacaaaatttaccggaataatttaattaaagctggactataatgacaattccgaaactatcaaggaataaattaaagaaactaaaaaactaaagggcattagagtaaagaagcggcaacatcagaattaaaaaactgccgaaaaaccaacctagtagccgtttatatgacaacacgtacgcaaagtctcggtaatgactcatcagttttcatgtgcaaacatattacccccatgaaataaaaaagcagagaagcgatcaaaaaaatcttcattaaaagaaccctaaatctctcatatccgccgccgtctttgcctcattttcaacaccggtgatgacgtgtaaatagatctggttttcacggttctcactactctctgtgatttttcagactattgaatcgttaggaccaaaacaagtacaaagaaactgcagaagaaaagatttgagagagatatcttacgaaacaaggtatatatttctcttgttaaatctttgaaaatactttcaaagtttcggttggattctcgaataagttaggttaaatagtcaatatagaattatagataaatcgataccttttgtttgttatcattcaatttttattgttgttacgattagtaacaacgttttagatcttgatctatatattaataatactaatactttgtttttttttgttttttttttaatacatattttgcttttggaagatcaaatg

SEQ ID NO: 22426 - DNA, 3000 bp, Unknown; identical to SEQ ID NO: 5914
  misc_feature (1)..( 3000): 2750-1469P.txt file - cDNA_ID_2054212; gDNA_ID_1620831; Annot_ID_169668

SEQ ID NO: 22427 - DNA, 3000 bp, Unknown; identical to SEQ ID NO: 5909
  misc_feature (1)..( 3000): 2750-1469P.txt file - cDNA_ID_2054231; gDNA_ID_1620831; Annot_ID_169652

SEQ ID NO: 22428 - DNA, 617 bp, Unknown; identical to SEQ ID NO: 6084
  misc_feature (1)..( 617): 2750-1469P.txt file - cDNA_ID_2054329; gDNA_ID_1620843; Annot_ID_170127

SEQ ID NO: 22429 - DNA, 3003 bp, Unknown
  misc_feature (1)..( 3003): 2750-1469P.txt file - cDNA_ID_2054333; gDNA_ID_1620843; Annot_ID_170126
gtgacttagtgataattggcaaattgaccattataaatgttttaatggtaagaatacaacttctgatctcgggtaagacacaagtcgagatccatggttatattgtttacttgtccggtaaatatttctgaaaagtgtcaacttcgaatttttgaaaatttgctattttaatttgtgccagtttattaagttgcaatgctctacgtcgcaagttggaataacaaaataaacatgaacattatcatgtatgataatgtctacaaatatttataacaattatttggataataaaaagactaattaaaactcaaaaagtttactacataccatctacgaaatcggccaaacaatccctttgttgaaaggcaagcatcctctgtgaagtgtcatacccaactgcatgatcaacaaaagctgatgctccaagcacattaatcctttcctcatctttcatcgatgatctgaccaaagccgtgcagagagaagatgggctgtcttggagataaagtcctttgtttgagatagtgtaatctaatccttggaaatgaagagtgagtttaggcaatgaatctatctctaacccaacctcggttgtgaaacacattagttcgttcacttcgtatgcgaccgctggtccaatctgcgccgttagctcttccttcacctcctcgtagagtgatggctctagactcgtgtagtaagtcccaacgtctattgctattccactactctcattgcttctcattctaataaaaaaaaagatcatgagaaacaatataatggatatttacatttagagaaaaaagagcttgattgttttaaatactaacttgcacgtttgtggttttatcttttatgtgaaacgttagaaaaccattttcttaaaatacaaaatatttttcttgtttaaaagtattattcaaataattaataaaatggtgttcaatatgtaggttttatttggaaaaaaaaaaacaccttttaacgcaaactattaatcgaaatccaaatatcaaatgtttgagtctatgaaatttgttgttaaaacgtatattatatcaaatgtttacgtagctatgttagctagggtttaaagtttaaacaaattaaccccaacaaaatgttagagcatctacattgcataacctctcattgatgtctccaagatcaaccatggtaaaaatagactaatcaagattaaaattaaagacattttcctttttaagtgtctaaattgtcttaatgtcttagagaagatatttttgacatccaaaaaggaaaatgtctttaattataactatggttagtttttaagacactcatgagagattatgcaaaggggatagtcgtagctaggtttaatggagtaaattaaaaatataatcaaaacatcaaacgagtgatatgtttatacctctgttggccaagactgatcccgaagagagcaacgtgatacgagtaagcttccgtccccgtcatgtttaacatcggaaccaacaccatatcgccgccgtacgaagccgctgatccgagacggatgtagttacgcgacccggctgcggaaggccaaagacagtgtgaaaatcttgtgagacgtagctgagagaggagcgagaaacggtgagtcgttagactaagtctcccgtcgacgccaccaccgtcttcctccggcgtcgcacggtttctagccccgcagccaaagacaaaccctcgcactatagagagagagttttcttggtcggtgattgaggaagttaactgaagtgtgtcggagacaaggtagccggagctagagggagaggcctcgtagcggcagaaatcggaaggagtgcagagaagagagacagaagttgttgtgtttgttgttgttgcgttgaaatagttagtgtaattggtggagacatgaggacaaagagaagagttattgcaagagattgtagagaaagtgttggaagatttgtctgagagggagcattggtggtcatcatcattatcgaggcatgtgagatgtgtagaagagtctagcttgaggttaaaggttcgtgttggggttccaatggtgatctcaacgtaaagattagattcgaaaggtaagaaaaagccgttcggtatatcattcgggagatcatcttcaaggctagagttatgagttagtacagtgaagaggagcagaagaagaacaagaagaaagagtgagtttgatgaaaccatgtttctttggttttgtatagcttaatgctcccaaaacattcttaagttattagctactttttatatgaggtattgtatttaaattatccttgttttttacgatagtgttgcaccttggcttgcatgaaataatgttttacgctgtcagaaaaaataaaacaataataataacgttttaaatgtttattagtatgaaaattgcctaacatttttataagttataacatttttataagttataacgtatataatcgacactaatttttatatgtatgactaatactatatcttagaactaaatataaagtagtttgtacttacacgttacaactataatttttaaataatttagttacagtagtatatgtttttgttatttctacatgtggcatgtgtggtttatatatgcaggtgggttggttactaaacgcatctaccgtgacaactgacaagcatatattagatgacgtggcccattgacgatcacagtaacttgggcttattgggcccataacgcgtaaaataaaaagcccaacagaatcagaaaaagagatgtgtgggtcccataggaatctgcggtatagaatcaattgcttcgcgggggttttacttttcgtctcatcgcaaaaacgcatgacgcgttttttctccgtagatctttgtcttcgtcttcgtctttgtctttgtaattcttacgttaagctctctcacctacccgaaagctgcgaacttttcctagaaagctaattcaaacgtagaatattctaatcccaccacttaattttataaatg

SEQ ID NO: 22430 - DNA, 3000 bp, Unknown; identical to SEQ ID NO: 6083
  misc_feature (1)..( 3000): 2750-1469P.txt file - cDNA_ID_2054341; gDNA_ID_1620843; Annot_ID_170124

SEQ ID NO: 22431 - DNA, 3000 bp, Unknown; identical to SEQ ID NO: 7046
  misc_feature (1)..( 3000): 2750-1469P.txt file - cDNA_ID_2056932; gDNA_ID_1621124; Annot_ID_56346

SEQ ID NO: 22432 - DNA, 3003 bp, Unknown
  misc_feature (1)..( 3003): 2750-1469P.txt file - cDNA_ID_2056946; gDNA_ID_1620748; Annot_ID_49749
tcttcctaatgccgcttttcgaatacactcccaatgtggtcctcggtgccatcattgtgaccgcggtcattggtctcatcgaccttcccgcggcctgtcacatatggaagatcgataaatttgatttcttggtgatgctttgcgcgttctttggtgtcattttcctatccgttcaaaacggtctagccattgcggtggggctatcgttgttcaagatattgatgcaagtaacaaggccgaaaatggttataatgggtaatattcctggaacggatatataccgagatcttcatcattacaaagaagcacaaaggatcccgggatttcttgttttaagcatcgaatctcctgtcaatttcgccaattctaactacctcactgaaaggttagctatgaaactacgatcctttctatatagattttggaagttcggatacattagactttgatctcttaaatgtttatgaaccctgatgtttattagattgtaaccacatttcttaatacattttttttgtcaacaccacatttcttaatagctatgtttcatttactaacattctctgcttttgtgttgcataaattttttgtagaacatctcgttggattgaagaatgcgaagaagaggaagctcaagagaagcattctagcctacagttcttgattcttgaaatgtcaggttagtcttgatagaatctattagaaacccgtataggaaatgtgattagacttaaaggcaaattcactcattgctaattagttttaattttctaatgcaaaaccataaaactcaagaaaaccaatatatttcaactagctaactttgcttttatatatgttaaagccgtgagcggtgtagacacaaacggagtgtccttttttaaggaacttaagaaaacaaccgccaagaaggacatcgaggtaaaaatagttgttttcacaatccgattttgtcacttatccaaggaaactaattagattttgatctaaactggatatttattttatgtgtgaagcttgtgtttgtgaaccctctaagcgaagtggtggagaagcttcaaagagctgacgaacaaaaagagttcatgaggcccgagtttctcttcttaaccgtcgctgaggccgttgcgtcgctctctcttaaagggccatctctcagtaacgtttaactataattttttgtatcggtccaatattgatatttaaccgatggttaaatttttctttttgtctctttttcatcttttaatttcagtacagatgtaatattacgttcttctctctctttcttcagtgatgattttggtcaagatatgtttgtatgatttcgccattttgtagtttactaggccatgtttagtctccgagaataaaattgatctagaatcgaattgatatcttagctagatcaaacggatgtatatccaaattatttatgaaataaactgattaaataaaaaaataaaaataatatttttatttaagataattatgttttataatattagaaaatatgaccaaaccatgagcagaattgtgttaagaactttgccaagttagagcttacattatatatcaaaagtcaatgtgtaattgtcaagagggataaaccgacgcggatgaatcgaagaagcaattgctttcaagaagacttcaaatcagctatgtgtctgcgattataattgtgtaaacgttataagcaagaaatttatctcaaaataaaactggtctataaatcaaatcgaattgaaaatttagctagattaaaagatgaaatgaactgataacataaactaatagatatttttaataagatgttactacttttgtgaaatgataaaatatttctgaagttaatcgaattcattcaaagctatgataacattgtgacttctaggaaaaaacaattcttgatacggtcgcggaaagatcttgataacattgtgacttccagtcttccatatggcataaggtattcttttacactaatactttcccgacaacaacaacgaaaaactccaacctttttttaaaaggccacatagaatgcatgatagaccatctgaaagaaaatggacagggtggcttaaaagtgagatttcttgggattgcataggatgttataattaaccctagcttgaaaaaaaaaagacgattagacaataagaaatagaatttaggtcaacttagttcggcgaatatgatcttgcattgcaccttctttaccaatttatagtgatcttttgctccttataagcacatgtttaaatcaccactacgacattgtttctgtttgggccaaatgcacacttgtattttatctcacaacgagcttatgagaaatcaatcctagtaatacgttaagtggcccaagaagttttggaccggcatttacgtgtatataaaaaaatattatgattacttttagatgaaaccacacttaatttcttcttttttcttggtaaaccacaatatctctttattgtttttatcaaggattcacaaaattcattgaatggaaattttcatttatgtgtgacatgtagacagtcagtccactctaaaaaatctcagtcaatttcgtaacaaattcataacctatttcaaacacaattcataaccataacttataaatactacataaatgatatttctttatatcatcttaaatggtacataaattaggggaaagctaagatatatatagtattaaaaagtacaaaaatagataaggtttataaatgtttaaagaagtaataaaatagaaataagaactaattaggtcgtcatgtgtttgctgtataaaaagctgtaaagggacatctctcgtaaatctaaaaatcatcaaatcttctccttctctctctctctctcacacactcactagcttctctgttaaaagcttccgtcatcacatagagaacagagactgacactaactcacttcctaacggtttccacactcaaaattacacttttgccactccggcgaacaacaatatg

SEQ ID NO: 22433 - DNA, 3000 bp, Unknown; identical to SEQ ID NO: 1340
  misc_feature (1)..( 3000): 2750-1469P.txt file - cDNA_ID_2104863; gDNA_ID_1620388; Annot_ID_155514

SEQ ID NO: 22434 - DNA, 3003 bp, Unknown
  misc_feature (1)..( 3003): 2750-1469P.txt file - cDNA_ID_2104905; gDNA_ID_1620528; Annot_ID_159626
taggggtgagttgtgtgatgacatacatacgtgggatccaaacaatgaggcgtttggtaataacatggattgtgagacttttcattcaaccaaccaaaattagagtacatccacaacaacgatggtaccccctcatgtgatcctagaaaaaacgaatacattttctttaatttcgaaatattcaatttggttttacgtatcatatctggtttcatgtgtttctctggcctgttcattttcacgtttaccatataaatggttattaatgactagcgaacaaaataaatatcgtcatgtggctacttgctcataattattaaggtaagtcgtttttctacacttgcggcatagaatcaacaccggcctttcatgcctttatcctttaccaacttctcattacatttggccttctcacattaaaataaaaccaggttcagtattagtatcaacggttggattttactgaatccgcagagccttgttacttctttttttcttcctgataaagccctgttacttgttagctagtgtatgatttatttaaacaccgaaaagacccgtgattaaaccaaataatgcctccctgtattattcaactctgtcgagttattatgacaattattatatataaaaaatagtagaacgccgccatgtaacaacatattgctgtttgaatcacagtgcacaatttacattggtaataaaataggggtcgaggtggaccatgctaattacataattataggttattttctcacttttttgcaattgctatattaatgaatcaagacaatgtaagaaaaattttgtaaggctgtccatgaagtcctttagggttgttataatattttttttgtcgtcacgttgagattgttataatcatataactaaaattattgggtgcaaactggcagtttgaattaatctcctttcctcctcctatgtctttgtcgttcgttacatatttctcgagcagttaggattttctactagatattacttttacttttatagtcttaatttagaagttcggtgataccgactaaattagcaactatattacaaaggaataaaataacaaacatatcactgattgttcaatatatacacacgcgtagacgaagtgatgggagatggtgttaatccgtgacactacgagtacacgacagtgttacggatatgatttaatgagataaatttgtttataaatttgagtttaaagaagacaagagacactttgtagcttggattggaattcaacgcaacacagtgtacacgcatctctttcgatttggctaatccaagttatatatatttgtcatgttttgtgtctctctatcttctaaaatacagttttttaagtttttaatttgaaccgacgattataaaatctaagaaattttagaagaatccaaggacgcaaatgacagccaataagattatgacagctatacatcttactctcgccattgtgactttgactctctgcccctcttgtcctcaccacgtataatccatccaaccatatagtattatacctaccctcaatcatatcaaacgtattttggtcgttaatttgtctgtttcttataattaattattgccgtaagtgttacccttaattacgtttgcataacgcgcaaaaaaaatacgtttgcataccttcggtttcttcctagttgtcttaaatgagtaaaataaaaaccgacttaatttgttggatgcaaactctagttttgttactacttagtctatgatgtcaaacaaaaaaaagtctacgtactagttactactactaacccttaattaggggggcttttcatttttattaatcttaaattaaacaaaaagaacaacgaaataacattgaatgcaatttcagtttttgagttgtaaaacaaataactcgaggaggattcaacagtaaaaattctattgaaatgaagtgagaaattcaataatttgagaacagatctttctcagtatatctgtcattgttgaccattagctacatttcaaaggtttacttttgttttcttgttgaatgaactaactaaaaagacgaaagaaaaaagtgaaatcatccgggagtatctgttctttaaacattacgtgttgaatatataatttagacgaagaacagtagtactttttattttagaatattagaggaaataaacaaatttaagagaatgttttggtttaatactgtgttctgtttagccgttttatgaataatcgccataatgcatgtggaattcaaacgtgggcgtgtttcttttcgtcttaagtaacactttaagcgtctcgtaaatggttagtatttacgattaaattagaacaaagttaactaagtatttgtcgttaatttactagataatgatttttaaaatataagtttcgagttaatacaaagggaagtaaataatatggcttatacatttagattacgttattttagttttggatctaaatttgtaaagaaattagctaaattaaaggggaaaagggatatgttttttttttttttgttaaagggatatgtaatatttagtcaacgagaattggttaattgggaaacaaaagttattggaagagatcaaaaattttaaatattaatttttgagtttatacaaagggaaagaaatcttatgatttaaacatttagattacattattttaattttcggatttaaatttgtaaagaaattagctacattaaaggggaaaattggagagattaattgccccccataaccagaattggttaattgggaaacaaacaattttagagggggcaagagagaatctttttatggggtgcaattaatttaattccttaaaatgcttaagaaaattcaaaaatttagggagggacaactgccccatattaattaacaaagatcatccccatgagagaaaggcgtttcatcaatgtatataaatactctgttttggaaacagaacccaacaggggacaaaaaaaatcaagaagaaaaaatg

SEQ ID NO: 22435 - DNA, 3003 bp, Unknown
  misc_feature (1)..( 3003): 2750-1469P.txt file - cDNA_ID_2104909; gDNA_ID_1621089; Annot_ID_55467
gagtcatgcacttacttattggtaccaccaccaacgtctcttatactctttcatgattctagatcaatttggatgattcttatttcttaacaacaattaaactgcagacgaagctgaagcttccattgttggaggacatagaagacgacatggatttctgtatgaagctagccaaagaagaaaacctcgtcttactaccaggagtggctttgggattgaagaactggataaggataacaattggagtagaagctcagatgctggaagatgcacttgagaggctcaatggcttctgcaaacgccatctcaagaaaacagaatcttcttttcaagctctgagcaatggcaaaatctaaaccactcatctatagagagactatacacaaccaaataaaaaatctgcaatttttgtggtgtaaaaaacaataatcatgtcattttcatataagaaactctatgtttcttaatcttatttctttgtttgagtcaagtagaaaaagacatgaataatgttgaatcaagactttatctttaccgttaaaagagacggacccactttgccgccgtcaaatttaaaaaatgcaaaagatttgtcttttactttctttcttcatcaacggctctctgatccacagtagccggagaaaaagcagagagctcaaattgtcggaattaagaatccccaaatcacatcttcaagaaccctaataaattcccagagattcctctcatttaatcacttcagattcgaaaaaagttctctctttttcccaaaaaaaactttctcatacaatggactctactaccacacctccttctctccgttcgaatactagatccgctttgcgtctagctcgaaacaacaaaactctcgtaaaatctcacattccatctctcgatttggttttattgtctccgaagaacaacaacggtactccttacccatcacctgtttctctcagttcaccatcttctcctgttactcttcgtgagattctccttttatctccttcccctcttcgtaaatcgagaacccgtttaagcaatcggttcgatatggaagctgcggaggctgctgtgacggcacgacggagtaagacgaagggagggcaaaatggtcttttggcctcgccgtcgccgaggaatttccggaggtcgagactaaggtcggaggcgatggtagatacaaaggaaaatacggagccaattgttgtcgtgaccgatgaaaagaaacaaaaccagaggaaacagaagaagttgggtcgatctaagaaggagaagcacagttctgttcctctgttagcttctcctagtccatcttcagatcaacgtatgtccttcctctgtctattagctcattcgatttcactttcgtgctctaataattgctcaatgatttgtgtaattcagctcaagatgtttgtcaaggtgatttagagcggattagagagaatataagcgatttgattatgtggagagatgttgcgaaatcaacactttggtttggttttggctgtatatgtttcctatctacttgctttgctgctaaaggatttaactttaggtaacattgatttctctgtcaaggtttatctttctagctttaatcatttttcacattcatgagttgataatgaaactttgtgtggtttgaagtgttttctcagcgatctcctatcttggacttttgtttcttggggtatcgttcttgtcaaatactcttcgccaaaggtacaaacttttaaggtcccagtacataaatatcagcttgaactgcagttgactgaagttttgatccatttgttaccataaagggttactgaagaagcgcggagagagcttaaattgagtgaagatgatgtattacgaatagctagacgaatgcttcccatcaccaatttagcaatttcaaagacgagtgagcttttctctggtgaaccagcaatgacactcaaagtagaatttacaaaactttgccattctcataaaacttctctccaatgaatgtgactctcacgttgattttgtccttcttacactgtttttactttgatttcaggtggcaccttttgttctaatgggagctgagtatggttacctcataacattgtggagattatgtgcttttggtatgattgttgaaacactatatgtcaacattactccaaagaaagctaaactgttttctttagttgtatctagtagaattgacacagagtatgcattgtttctttaaacaggtttcttccttagcttcactattccaaagctatattcatgttacgcaagtcagcttaaccaaaaaggtaaactctattaacagactgcgtagctctttgatggttccaatgattgacactaaggattctttgatctttgcttatgtgtagttgagtgtgcacaaaggagatttgttgaagcttggggagtttgcacacacaagaaattcgtagcaggctctgcagttactgcattctggaatctaacttctctcaagacccgttttattgcagtgtttatcatagtagtagtaatcagatacagacgacagaatctacagttagattccgaggatgaggaggagaagaagcaacaagaaaaaactcacccggagcaacaaaaatcgccggaggataagtcaacttcaccgcggtcagcagaagaagagcaagcgttggtgctagttgcagaaaccaaagcaccaaagaagctttattagtctagtcactagtgtcttttcagtatccacctgtgtaataatatttcacatttacgtaataataaataaagagcagtcattaatatcaaataataaattgacacgtgacaagctcatgaaactgtgagaagcaggtgataaaaactctcgtccgtcttgggagagagcacatcgtcgtcttttctttataaaccctaaattcccatttctcttctccaaaagttttatcgattccaccaaattagggcgaacgcgaaatctgggtattgtaatttgaagcgatg

SEQ ID NO: 22436 - DNA, 3003 bp, Unknown; identical to SEQ ID NO: 22435
  misc_feature (1)..( 3003): 2750-1469P.txt file - cDNA_ID_2104909; gDNA_ID_1621089; Annot_ID_170631

SEQ ID NO: 22437 - DNA, 3003 bp, Unknown; identical to SEQ ID NO: 22435
  misc_feature (1)..( 3003): 2750-1469P.txt file - cDNA_ID_2104909; gDNA_ID_2926192; Annot_ID_141123

SEQ ID NO: 22438 - DNA, 3003 bp, Unknown; identical to SEQ ID NO: 22435
  misc_feature (1)..( 3003): 2750-1469P.txt file - cDNA_ID_2104909; gDNA_ID_2926192; Annot_ID_201172

SEQ ID NO: 22439 - DNA, 2055 bp, Unknown; identical to SEQ ID NO: 9667
  misc_feature (1)..( 2055): 2750-1469P.txt file - cDNA_ID_2104915; gDNA_ID_1972165; Annot_ID_179729

SEQ ID NO: 22440 - DNA, 3000 bp, Unknown; identical to SEQ ID NO: 8272
  misc_feature (1)..( 3000): 2750-1469P.txt file - cDNA_ID_2104927; gDNA_ID_1621202; Annot_ID_174989

SEQ ID NO: 22441 - DNA, 3000 bp, Unknown; identical to SEQ ID NO: 1054
  misc_feature (1)..( 3000): 2750-1469P.txt file - cDNA_ID_2104946; gDNA_ID_1620352; Annot_ID_154351

SEQ ID NO: 22442 - DNA, 3003 bp, Unknown
  misc_feature (1)..( 3003): 2750-1469P.txt file - cDNA_ID_2104953; gDNA_ID_1620364; Annot_ID_154772
ttctagcgtgaatcttcaagttaagagcacgacgatccaccattgcagcttcttctttcatcttcataggtttgaaaacctctgtgacagatggatcaagcaaactaatggagcaactaagtgtaacatcaattgacaatgcctcttcccaaagctctcttcctttctcaaagtttcctcctttacatagttttggtatgagcagatcataaacctgaccataaccacccactgagcttctcttcatcttctcaaacaattgaagagcaaagttaacccgctcgaccccacaaagaaccccgatcagatcataatagaatttgcgttcgggtctaaatcctctctcgatcatctcatccacaatttggttgcctttaccaaaccttcctgtcaaatacaggaccctcacaacgaagtaatagctccctgtatccggatcacatcccgatcttttcatctgttctaaaatctggcaggactctctcaccctcctagtccttcccaaacaagagagcaaaatgttgtaactcatagacgtaggttggattttgtaagacctcatctccaacataatattcaaagcttcaggaacaagcccagacgggtttcgattcacgtttctttcgcaaaggcaggtcagcaacgagttgaaacagaacaaatccggtgtaatccctgctgatttcatatcttgtataactcttcttgcttccttcacgtttctttgtaccgaccacccgaataaaagacttctatacacagacaattcattcccggatattacatccttgtgatgatgcataactcccaatgctctcttcacatgtcctctggaacaaagagcgcttataatagccgtcacagtgaaaccatcttgtgggcaagaaaatttgtccaagatcttgaagatacctattgcatcttcttccttaccaaccttaaccagagtttcagcgacaatgctaaacgtttgcttgtccatcgcccgattctccttcctgagatctgataagagtatctgcatagctgtgtgatccttcttctcagccaaaactcttaggacatagttgaattccttgtcgtgtaaactagatcccaagcttttacacgaccaggagaaaaacctcaacagccttctcggtgaagtctcgttcttgcaagactcaatcacttgggtaacaaggtttgatgatggagaaacagaaacctggttcaagttttcttcaaggtcatctagaccaccaactggagaagaaactatccgaataacttcatgcaacgccgtttccgatcggtcaactaaatggtgagagcaaaagtaacgtgtcagttttgcagtactcgttagatacgtaaacctgtttaatctgactgtggtggacatcatcttctctgaggaatttcatcaaacacttgatatgcgtatgcttcttaaaagccgccaaatataaaccatagaagggactctctcctgacttacatgtttctcagagtatttacaacttcgttgtaaattctttcagcaacatgaaattcagatttctattaaaagacctaaatttgcagatttcatgagatcgctcggctcaacaacaatatatattcatttgttggaaacattgcccgcgtgtctgaaaagggcattttagtcttttacattccatcacgcttcaaattcagaaccggataaaaccgataatcgtgagatacgatggttataacttataagtcactaaccggaatgattactctcgaaggccgccgatgcatattggaaaatcgaactcccgataaaatagttctgaaattacacgaataattaacatcataaagtcataaacaagttattggtcaatggtcgatggcaaaacgtaataaaagttggaccgggacaaaacgtgtcttacggtggatgaagttgagaatatatcatgcattattggtccacttgtactaacgatattcgcagctactaatatgagccaatcggtaatacgaaatattttagcttgtcgactacttactttctatataaaagtttagcctactaattatctctttttatgattatgacaacttgattatttgtttcccaaccactgatgatgagattaaccatcttttttgctaagaaggtaaatatttcatcttgctaatgtcctgtttacaagacaatttgcacacatacacttataacattagaaaaaaacacttgaaactttgttacaacatatcatttagcttgatttttcaatcactttaagaagttaatgaatcataatgcctaaataagtcctctataacaaccatgaaaggagtgttatatctataaccctgtgcttttagaaagaatcataatttttaggagtcttttgtgatgagaaattgagatgtaataaaagtaaaattttctatatctgtatctttcgttttttatttttattttgtttgtatctttaattcttcagtacctaaagataacagaaaaataaaattctgataatagattttcttgttgttataaatatattttaataaacgaaacgaagccgaatcctaaaatttggtttctgatggtttggtctgatctggtcatatattttaaaagaatttgcaattttttctttctgtcgaccttttgatatgtttgttgattttgatatggagatgcatcttcttatcttgtatcttaccacaataatatcaaaaacaaaaataaatatcatgagatattttctccaagatgacgtggccttttctctatctcaaccaaactatccaacacaacctttttttttatggcctgcactttttattgtccacgtcatctccttggcctaaaatatcccaagtcccaccattaagctacacaacaacgcgtaagaaaaagacttaatctccaccgtccaattctatcctctttcaacggtctctgatttaccatctctctctctctttttcgcgtctcataatttgaccattgattgacaaaacaaaacaatg

SEQ ID NO: 22443 - DNA, 3003 bp, Unknown
  misc_feature (1)..( 3003): 2750-1469P.txt file - cDNA_ID_2104994; gDNA_ID_1620373; Annot_ID_155052
ggtagtcaacgttttgcattgtgggacggttcaggaagttgagttcattggatttgagaatctcattcgccatctcggctgatgagacaataagattaggaatagagccaatgaagagatacatcaaaggtccgtagcggattgagagcttgtgaagtgcttggtgagctatgggaccaaggaggtgaatgtgaccgatgatcggtaaagctgttgggcttggtgggagtggaagtctgtcacgtaatctgttagtaatagcttggatcaagactgtgattccaagacatacaaggatgattacggagaagtattgtaaatccaccattttcgtttgtgttttgtttttaggagagatattatcatgttttgattttataggataggtttatagtcatgactcctaatggtatcaaatgtcaatcccaacttcaagattctttcttttctcatgttgtctttgttctgtttttgtctcttttgtgaaggtataatctctgtttctgatcctgtttcatgtttatttatggcttgtctgtttataaacaaataaaaatttaagaatttacttgactgttgttaagctttcattatcagttgacaaaagaaaaatgttttcattgtctaggcttacacgtcattttcaggtgtagttagattagtaatcaaggttggtaacaacagactgtaagatttagagcttatggaaataactgaaacattttttttccatcaatagtggtaactggtaagcttatgaaaacagaacataaaacagagcataaaacagagcacagtacatatgattccaaattcctaatgatgtttatctgcagaaattcacttagtttggtatccaaatggatcaaaacataattcaggagaacacataagtgagcttcctccagcagtccctgaagccgaaaagccggtaggtaacttgatcttgattttgtcttcatctcccttcaccgtccaattaaaacactgcacgagtgacccaattgtgagactcaacaccagagaagcgtgagaagctccaagacatcctcgtcttccgctcccaaacgcaagataattcacatcttggccttttaattccaacatatattgctggtagtaacccatctttctctctgtatcttgttccaccacaagaaacctctctggcataaacttgtcagggtctttgtatgtggtcggatcacgcattatcccgtaagcattgatgaagatctttgtcccggattttacatcgtacccgttgatcttcatgtctgtgttgctttctctgcgtagtaatggtcctactggatgaagtctcaatgtctccttgatagctgcttgtaggtaaggaagcttctgcaaatctgattctttgattaaccggttcgttgttcctacaaccgatttgatctcgtctctgatcttcgcgaagatatccggatggttgattagctcagtcattgtccattgtaaagctgcagaagtcgtgtctaagctcgccatgaacaactcctgcaaacgagagaccaaatattcttattaaggctaatttaacgaagctaaagaaaagtaatgcaaatagcttacaagaatgaagaacttgatctgattcatagtcaatctgagttcggcttttgggtcattatacgtgtccaacaagatatcgacgatatctttatctttctcttcttcctcattgctcttatcgttttcatattccttcagtatcttctcaaccaactcatcataccgccaaatagaggatctaagcttcttaccattcccaaacaaatccagatcccgcaatggtccaaatagctccatgaatccaaaccttgtggcgcaagccataatatcactcactatcttcctgatctctttgggaatattcgagttttggcggcaccttttccccataaccatctttgataagatctttgtggtcaaagcagtgaactccaaaccgagatcgcaagcctctccgtttcgcgacctctcaaccagcgtgctcagtaaagctaacgtttcctcttctcttatgtcgacaaatcgatcaagctgataacccgcgaatagcttagtcatgcatagcttcttcatgaacctccagtaagatccataaggtgcattaaagaactctgatcctttataaacattgaactgtctcggaccaaacacaaacttggaagcgaaatcagggtcgtgagtcttgaggattagcttagctgtgtcggaatctgagacaacgaggactcgtaatgatccgatgcgtatggtcatgagaggaccgtaagtatgagccaaggcttgaagagatcgtggtaggctagaccggaggagatgcatatgaccaagaacgggaagtcctcgaggacctggaggaagacctctgcggctagaggagctgaagagtctatggagaaggaagatggttacaagtgtgaagaagagatatgaacaagaagtataattcatatccaaattcaatgtaaacatatttgtttgtgctgattattgtgactgggatcaaacaagtataagacgatgttagtatataacaaaagctttatgtttgtttgaaaatactataaaaacttgtcttgttgccatgaaggatctaaaaatacatgattctttgatgatagtgaccttgacttaaaattgttaaattatgcattatgttcaattatgtgttagaatttattgaaaatcatataataaaacattacatttttcatcaaaaagataataactaggcctcataataatatgttattaatataatattattttattttttataaatgtaaaaatcgaataaataaggattacaagcaaaaaagtctctgaaaggaatccataaacctacaatggcggggaacacggaaatattggcgcccagataatcttcttctgtgaagcattttaagtcgccgactccaatcaacagagcccagttattccatattatcgaattaattagggttcagagagatg

SEQ ID NO: 22444 - DNA, 3003 bp, Unknown
  misc_feature (1)..( 3003): 2750-1469P.txt file - cDNA_ID_2105010; gDNA_ID_1620422; Annot_ID_156618
gctgaagttgaatcacaccgtgttcatacactctatagaaattcaattgactctaccatctatatactaccatgaaagagacaacaatggattacaaatgcttttattttccttttacttaaatgataaatacagaatattttgaattcttgatcatagtttaacagttgatgtaatcatgagcggatctagagttatatttttactggatgcatataatttcttttcgaaatagatcggagacatttaaaagagcttacattattttattttatctgttttgtttataattagacaggacatgtggtacactggtatttatgttcatcttagagctcctcaagatcacgagttcgattttaacttttaagagtagattagactagtttaacttcttcttatctacgatccaaaaactaatgaatccttgttaaagtccaaggcttcttgattaaaaaacaaaatgtcttctttaacaatattttagttatatatacgagtcaattttctagtaagaaatcgtattacccgttagtctaaaatcgattaatttaagtatcaattgatgtgaagatggtgatacgtcgtattcattatggtttatttgtgtgaaatgttaaagtgtacaagtcttatcttatggaaaaacattctccttttgtataaatgtgatgttattcctgaaatatgatcagtctcaatttgcatagttaattaatcgtcttattagcttgtggttgtgcctattaatgaaacccaattgctaacaattcatcttctttcttcttttggctcctactgaccaaacttacccacatataaaactataggtaatcaatctatctcaaagcattgggccctttgactactttcaacgtgtatatctaaatgttctaaaacttatcaatgaagcaaaacgttccacaattttacatatttgaaataaatcggtttttcaaatgaaaatacttaatgtttttttgggatttatactcaaactaagcatcgctaagccaatatatatagactaataatttttaagaaaatgacaaacatatatttactaaaaagttatttctcaaaactaattaacatattttcataatattcttttattcttttattgtagtacattgacagcgttttaaatattagtactgacaacttggagattctttaaaaatctaaagaatttgtttggcaaattagtcatttccggagaatatttttttttctttgactaaaatatatactttatattcaagattttaaccagatatacaaaaagttaggatcaaagacaatcattctagatcaaccacattaagtattacactaagcaatactactttctttctcaaaaagatgtttcagccaaaaaggaaacccgattgctacatacgattggcggcgatcctccattgtcacgctcttggcaataagatgagctccaagattagagcttcttatttcaccacacaatctctggagaatgttctaaatgagataatttttgtggacgttgtgcaaatatcacacatgacaaaaaaaataaaaattggtataatcgtatgaatgatctttcaaactgtcttttattcgaaagatgattgtatatgtggatagatgtcaacacaccaacaaacattttgatcctatctgtatagcgaacaaaatatttgtgagaatattgaaccaagtcttaacaatgggaagattcatatcttagagatcagtgcaaaatttgagggatcaaaagattaacgtcaagtgtgtcatcagacgaactcctacttttatgatacccataatctttcaatctgttccgatttaaaaattttaaatgtaattactgattgtttgtaattgataataaaaaaaaactatttcatattttcaatttctaacattattgtttattgtttgtaattaataaaagaaaaaaacatttaatagtttttcatttttgacattatactttcttcaaatctaaaactaccaacgatgatatttatattttattaatccatttattctttgatattttcaaaaatgtccattaatgttttcattgttactattactaagtaataaataatataaataaacactgacaaactgaagttacagactataaataatttaccatactaaatgtaacatcaaagctttcatagctcagttggttagagcacccgtttagtaagcgggaggtcttgagttcaactctcaatgaaagcatttttctccttcttcttttttattgaacccataccctcgaaagctttttcttttgttattttttgaagtctatttctcttttcactgtctctcgcaatctccgactctctccttcttatttcgtcgccgtcgctactctttctcgtcggtaagttcccctctgtcatttccttcttctccaacatctaatcttattgtcgattgtgtaaattgctatgttttccagttatttactcgggcacgaaacatgttcgatgaaatgtctcaaagagtatttttttagactcataacgaaactgcttatctctttgcttttgttcgtgattttgtattgcggttctaacgttaatatgaactgggttagctttcaaattgtaaaaaaagtttaccagattcgtctggatctaatgctcatgttttagttttggaataaaaaatgtccagtctttagaaactattgttaaggaaacggaacctagttttggagaatcgttagttagagttgatcgcattgacatagcaaccttaattttatggtctcatagtttgcagattctcgtatttcagaagctactgtatttcaacatcaaagtttgtacctttctatgatgcatttaccattttggctttgaagaagatatatctgaattttgattgaaatgtttacgtttttttgttaaatctatcagactataatgagtgattttgtttcattgtgttgcttacgttaaggtggtatagtgtcaactttcaaggaagatg

SEQ ID NO: 22445 - DNA, 3000 bp, Unknown; identical to SEQ ID NO: 1156
  misc_feature (1)..( 3000): 2750-1469P.txt file - cDNA_ID_2105020; gDNA_ID_1620364; Annot_ID_154775

SEQ ID NO: 22446 - DNA, 3003 bp, Unknown
  misc_feature (1)..( 3003): 2750-1469P.txt file - cDNA_ID_2105036; gDNA_ID_1620463; Annot_ID_157825
acctcaaaagaaaaaaacaatcatatgaaatacagctttaaagtgtcttacttgcattctagtgaagttgtttgcagattgtgaagctccattaccagaagtgtgaagatcccgctctgacgacgcactgggaagatcataaacaagaattcgttctagcctctaggaagaaacattctaaacagaaaaagctctaaaacagacttctttgcataacagtctctatctacgtcgttttcatcatagagacgtttaagcaaacattggtgtgcaagaaacatcgagagataatctcaaaaacccattaatggatttaagataaagattcaatattagtgaaaagattgagcttaaactattgaagcgagagtaccttttagagcggccatgtttatgagaatccaggcaatgccaagaatctccgtttcttctctgcttgttaccgtctttattcaaatcaaaaccacccatatatctcagccaaaaccttaaactcagatgatgaaagtaatcaaagtctccaaaagaatctcagtaaaagaagaaattgataaaggagtgaattcaaatgcagcaaaggagaagaaagaatgaagaagtaaatgcagagacgaaaactgaaactgtagcttagcccataagaaaggggaccaggttagtagtatcagagtgcctgccaaaattcaattacatttcactttatggttgttgtattgcatttaattcgattttttttttgtctcattttaaattcatagttccatttccctccttttttcgagaaatacaacacttctaggttaggaaaattcgcataaatagttatactcttaattttctctggtcaaataatattaagaacacgctacagtaggacagtgcagtagttaatgttgtcatgtcggtccgagtacattgagaatttaatgttccgatataaatttccttgttttttcccaattttgaaaagtccgttaaattttcatatttattcaacgagacactgtactttcagtttccaccgaaaaataattcattactcatcatttattcaatgttcgataatttcttggaagcagacagcatttgggcctcgagatttaaattggcccaaggtccacgtttacttgggtcaatcacagtcaaaacgttttcccggggtttctctcaatttttttgtcaaagtctctcaacttttaaaaatacaaacactgggatcctccacggcatgcaaaaggatattataatgaagatgaaatcaaattggtataaaaagttggagaaaggtataaacactatgtatgtggctaaaaatagctagaaacttataatttaggtgaaagaagatttgagtaacgttgttgttgttatataataagatgaaataatgacaagaaatctgaaataatatgcgaatatgccaccgacgggagaaatacacgtggacggctgataaagctttgtgaaggaatcccacaataatataagaagatctgaccaaaggttcctttctggataagccgctctcctcgtgtccacgtggcattttcaaacgtgggacctcctaatctatatcactaaacccatccactcatattatctctctttctatcatctaaaatccaaaatgttcgtccatttttttttttctgttcataaacaaaaactgcattgccttttaatttattcttcttctaatccatacaaatgattatggaactataaatctataataataatacaattaaccacaaaataaaatatatcttagtattataagatatgacttttggagttagggggtgtctaatacaaatattatggtatttgtaatcttagcaagaaatgaaatcacaatcatgtttatctttcttaagataacatattttactcagtcatgggtctacttttattttcagtttagattattaaataaataacaatagttttgtcgccttactatatgaccaaaaattagattttctctatgtgtaggatgttggcatttgtttaccatttttcttatgataacttattaaacagatgtcatattttacttatttgtgtttataactgttaaaatctagtcaagctttctgtatggaacgcgtgaagggctattaagatattttaaaatgttgaatagtgtaattaatcttgtggctaataatattcatgccaattgttaatttctggtggagggttaacacttgtacataaatacttaatttttctttttgcagtttttgtatagatatccatccttatataaatagaaaaatataaggaaattgtaatgatttagcataagacaattggataatcacaaatgcattaaacctattaactagtctatatagaaagagttattagttacagctatactatttgtggtggcattaatatatagtaacttatttaagatatatgtcataatgttaaaaagaaatcacagagaaagctgttattttttttaatcctaaatttaaaactttggatattgagattagcctgtaatacatctttttccaaaaaatttatacaaaaatggccattaataattaatagtaatagctagttggacttcttagttcaaagtaattcaacattttttctaaaataaatcttctaataatagaacacgttggattgactaattaagtcaaatatgaaatatggaaaaggaaaaaaatccaccaacgatacaccaaataatttccgatttttatatatataaataaacatactaagagcaaaagaaaaacaaactgaaaataaaaaaaataaataaataaaaaaaaaaatccggccagataaatcgaatttatgtaataaatccgaccagataaactgatattattgtctttcttccgctcctttgtctctctatctctttctcacaattagattctgtgcttcttctgcgatcaactaagatccgatccgcgagcgtttcagacttcgatcagatccgattaagagaagcaaatcgggtcgggtatg

SEQ ID NO: 22447 - DNA, 3003 bp, Unknown
  misc_feature (1)..( 3003): 2750-1469P.txt file - cDNA_ID_2105044; gDNA_ID_1620417; Annot_ID_156480
atagggattttggaatatggtcacttaccaatgtaaagccttggccttatgatataagtttgttttgtgcttgtaaacatgtagatgacaaagattgacaagaagtagatgacaaaggcttttatcactcgcgactcgagaagcatcgcattgtgcaaagcaaacagcttatccaaagctacaaacatgtttgcttgtttagcctcaaacgctacctgcaaaaacagattgttatatattgattttatgtgacatttgcttgtacagcttttgaatatttgttaagatttgggaggactgacctgggcttccaacattgattttgaattttcaaacaagtgatcatgaacctcctgaagcttttcttgccgctttgcaagatcttcttgttgctcctgactaaattctttcaaacgttgcaatgtattcctacaaagttgcagggaaaacagaacacaattagctcttggagaaaagtgtcttgcctttgaatttaaactgataaaatgtgtatttgaaacttacctactctcttgcagtgcctcagactgaaaccgggtaagaaactgaataccgtcaagagccacggtttggccgtctaaaagcttctgttgtttatccaacgaactacgagtctttgttccgatgtcatcggttgtactctgcaaatctatcattttggttgataggttatttccaagtacacttatttccacctcaatctgctctgtatcactcttcaacttatctactccttcttggatgttagtatacgcatcgaggaacatgtccattccatctttcaacgtttctttcatctttacttgaccgtccctgagagctagctgtgattctgcaatgttcttctgttcttgagagatttctactgtttgttgagataatccactcacactagtttctaaggtgtttgtcacactagccacgttttgaacccgaacatctagtgaccctaaagaatcatgaatcatgcttgaggtctgtattaaagcatcagatttactctccaagatatccaatttatcttctgtatactgagctgtattcttgagctcattcacaagcctctctatctcatttttgaacgcattactcctgccataccaaaaagaagcaaattgagaatccattttggcaaacaaaagtaataacagctagaaaaatattcatggtaaattgtttttcttactgtaattgttggcagatggtgttggtttcaagcaagaaatcgagatagatcttatgctcatgatcatcaagcttcttgaggcaactcatcattactgattcatctttacaggttggaaacgccggtcttcccgagtctttgatgaagcaatcgctcaaataccaagcaaatctctttctcttttcttctgtagcaatcgtttctttgcagccagccaagaggtaactataagcattttgccagcaactggttagaccaacaagcttgttttcaaggacttgaaccgccttctgatcactgaaaacttccatggagaagtcggggttggatttgcgagaccgagaaaaagaagaagagtatggatcttctgctgaggaagaagaagaagagaaccatccccaactgtggcatgttaatggagaatctaaaagtatgatcaatagaagaaacagaagacattttctgctgaaacgatccatttaatcggatttgagatcttcttcttctcgaggagccttgtgattgatcacctacgaacaaacaaaagagacagaacattacattctgagaatgttgttgtttatataacagaaaacttggagcgcaagaaaaggaagccccttgaacttccaattagataaatggaagttttttctttttttggtatcatcgtcataaataaagttcataaagtttataaaaaaaaagattattggcaaatcaagttgcagatttaaaaagaagaaaataaatctcattaaaatcttcagaaaacaatctttctaaaataaggaagaatctgtatccactttgtttttcgttttctgagattaatacatgcatttgaagtcgtatcaataaagataaaccaaaaaccattattactaagaaacaatatcgaaaaatagtctgaaaaaatcacagaaaaaagtacaatccaaattttatcgtaaaagagaacaagaaaattacacgacaaggttaacttcaagatcgatattgggagaaaaacatataagaacaaaaaaaaaactaaaaatagttatatgacttcgaatcagagaagaatctctacgtttttgtcagtcaatttcataacagagaggcaaaacaaactaaagtaccaaaaataaacacgaaaaacaatttcaattctaaagaataattttctcaaaaaaatatttgcatgaatgaatgatgaatctaaacaaaacacttactttaacataagtttcaaaccaataaattaaagaatgagaatacagtgatacaaaaaaaaaacacaaagcttaccagaaaacagaagaattggagattgtttttgagtcggtgattatgaggaaagtgagaaatgcaaattataaagtaacgaacgtgtttgacaaaaagatggaaacgtttcgggaacgtttggtttacttcccggtttaatttgattttggttatgtgattaatttattttcggttcggtttaattgtatttggttcattggtataagaattttttagtcaaaagcaaaatgccaaacaatacacagagaggaatgatggaatcttcagctttaataaatctgcagactctcaaaattccgattcatcttattgaagaacaattttccggcgaaacagccgatgaagtctcgcctgaatcttctgtacctttcaccggcgattgacttcacttcagaatcgagagagaagaaatcgatggaaaactaaaaatagaaagagtttcaaattctcgctctctcttcaaaaccgcaaatcaagggaacgagagacgagagagagagatg

SEQ ID NO: 22448 - DNA, 3003 bp, Unknown
  misc_feature (1)..( 3003): 2750-1469P.txt file - cDNA_ID_2105048; gDNA_ID_1971795; Annot_ID_175616
catactttgatctccttgtttcattgtgtgttttatttatcttctttagggcttcttcgttgtggcgcactatattagcctgaaaatgaaatgcttgtaagaaatacaaaccgaaaaatcaaattcgagtatggtttgacagatttcccatgcgcaacacatctaaagacagatttataaagacaactgaaaatagagtgatgactctctcaagaaccaaaagggacaaagtaaaagaaggtgtaacctttgtcaagtgaactgcatcctgaagttcttcaagggtatcctttatttgatcaccttgaactattaagtcttccacaatatcatgtgaaatctacaatgtacaaaaacccaagtcagtccgataactgcaagactcagggagaataacatttccggctacaaatgctaattgcaaggacctgatttctcttagtgtgagttgaaagcattttacttaaagtcctcatggtagagagcggaccacggatctgccaatacgcaagaaagaaaaatgcgtaatataaactaaaaggagacattaattaacataagatctatgtgtactaagttaacaagtgcgtggcttgtacctgctccactagcttactcatcctcacattgttttgccaagatgactgttgaagtaacattgttttctatacatacccaataataaaaaaaaagatcaataaggattaaagccaacaaagacggtcaagcaaaaacataagaacaaaggaaaagacaggatataagaacaacctgatccatgacataagccatagcgagagtccgagaaatattaatcgcatacgatctctgctcttcagtgaaaaccttaacagaaggaagtttaactctaggtgattttgtattagctgaagcaggcaaagcataagcttcctcaggggaaagaaactgatttacaccatgcggtttttcctcttcctcctcctcctcctcctcctcggcttctactggtaactcagcaaccaagaaaccgacaacaaacgggtgtttcaccattggaaacacagcagctctatgtttactcacaagttctacctatcatccacatattatgtcaacaaaaaaaccataagtaaacttgagtttaacgcagaggaagaagaacacatacttgttgactagaaagtgatgcttcagctgctcgtagacccgcagggataccaaagtttccaactaagatcacaacgtctccagcattaacacttggataacaagtgacacgacgcaactctaatcgatccatcacatagctaccagctggtcttacatatatctaaaccaaaaccaacataaaaattcaacctttaatctaacaacactctattttcaagcaacaatgatgtaaaaaagcagagacgcaccgagagtactgcgtttggatcaacgatttgacgaaagagatctaattgctcaagacaaagccgttgaaaatcaggacttggcaagataatcttagtcttgagatggtctttctcaatcatctgtgtgaactctacaggagttgttgaagctccacgaatcgcggaagctatagcggaagcagaagcaaccatggtctctcctcctccgggttctgattcttcattagatacagtgtggtttacgtaacggagaccgcgtgtaaatatagaagacgacgacgaggaggaggaagaagaagaggcattgaggagcttaagggagggattagaaggtctagggtttggaatagaattggagaagtgtagattagggtttgatgagagaagggtctgagaagcgattgcagaaagaagcatcactacggaagacgacagtggagtctttactttgtggctgagactgaaactctcgcgaggaagacgatcgatatacgattatagtttacacacaaaacaactacaactaaacggcatcgtattaacagacttgtaattatagtttacacaaaaaacaactacaattaaacggcaccgtattaacagacttgtaacagtttcagatgagaggaatgtaaaacggcgacgttttgccatctgatacattaacctctaagaagaacattcagttgtttttaaattattgtaaagtttttacgacgtttaaacattttcacaaagtttcgataatttatgttaagcatcacttcgaaagttgtgatgactggtgaacagaattcactgggaaaaaaatattagtagggcattaacaatacatttctattaacaactaggggtatttttcttaaattttcatgtttctactaatgtttaaacacacgttcttccaaacttgtagaatggtaacacatctattaaagtaagaaaacactatgttgttccccatagctaaaagaggccaagaaaatgttagatggtcaatcagtgagcttactattaatcatatttatgtagccatagccaatcaaacgaagcaaagcccttttcaaccagttgaacaaatccaaacaagcatgtttcaaccattttggaatccaaacaatcatctctacgaacgaaaccacacaacaatctcacaaccctgtttcattaatgttgcgataatcgtgagagtgtatacacgacaactcatgcaaaaaaagataaaagaagatttgagaaaaaaaacgtgatagaaaatagagacaacaaattaaaaaaactagatatctacaacgaaaataaaataaaatatgaaaatggaaagctaccatataaacttaaaaagaaagaaataagaagagaatcctccaaagaaagaaagcatatttgtatgatggtaaacttacaagtattttcgtaaacatattcaaaatgtattgatttataactaaccctatctcaataaaaacatatcacaaatctctgatttttgtgttttgccaaccttctttctttttctggtaggggtaacgtttctcttcttttgaggataaaagtcccgtgattgagttttggtctctttacatctttagctttaccaatg

SEQ ID NO: 22449 - DNA, 3000 bp, Unknown; identical to SEQ ID NO: 1465
  misc_feature (1)..( 3000): 2750-1469P.txt file - cDNA_ID_2105052; gDNA_ID_1620406; Annot_ID_156104

SEQ ID NO: 22450 - DNA, 3000 bp, Unknown; identical to SEQ ID NO: 9971
  misc_feature (1)..( 3000): 2750-1469P.txt file - cDNA_ID_2105059; gDNA_ID_2096296; Annot_ID_195562

SEQ ID NO: 22451 - DNA, 3000 bp, Unknown
  misc_feature (1)..( 3000): 2750-1469P.txt file - cDNA_ID_2105063; gDNA_ID_1620769; Annot_ID_50182
aacaaatagcgacgtctctcctagtttctcctttccctacaaaaccattgcagcccacatatctctttataagcaaatcagtgtaagagattggaagcagatagtaaaacagagataaataagctaaaccttaagctctggtaactcaattacgcaagcacattcaacaatcttcactcctactcgttctgcaaaaccaaccaattgtgggagtgagaaatagtcaagtttaactgaactgcatatgctgcattatcaaatcttggacttaccaagtagtcggattgcagcagcgagagtcccacccgtggcaatgaggtcatcaataataatagcacgctcaccaggctctactgcacctacgtgcatctcaatcgtatctgttccatactccaacgaatactcctccgaaataaccttccctgttaaaggaaccaaatgcagaggcagtttagaaattaacgtccatggataaacaaggaatgcgacaattatttgacactgctcataagtttccaaatggcttaatacatttcttgtaactggtcaagatacacaactaagtccattgatatgtaacagaaaaaataacaaccacttaagttactgcaagttaccacaaagaaaaatgatctagcaaatgagtagcatcatattgatcaaagacactgcaagataaaagtcaccttgctaatgttcgagataatgataaagtgtagacttggagcaagaagccatttaaactaacaacttcctaattgagacctttcatgtaacttaatgtcaaaatcacaagcaactagaggaagaaataaaaatgtaccaggtagcttcttgggcttcctcatgggaacaaatttggcaccaatagccaacgcaataggagggccaaaaatgaaacctctagcttcaacacctgcatttaccacaacatcaatttaggcagaaccaaaaatcatccaccaattcatttcaacttttcagtttaagctaaagcactcagtatctaaaaaggccaaaagaaactaaatccacaagctgttaatcgattggagtaccaaacagaaccatacgagttgttacctgcaacaacagatatgcctttatctttgtatctatcaacaaacaaagcaatagtatccttaaaggcctcagtgtcgagaagaagcgtcgttatgtcctgaaacatgattcctgccaagtatccaaattaaaaccttaagatcccaacgcagatcaagactagagacgatattaatcggtataaatggaaaaaatggagacctggtttagggaagtcggggatgactctaatggaagaggcaatcttagcgattctgggatcttgcacatcttcagtcgccatttcactgtcccgactggctgctgctttagcaaaatactcggcgtcagatttgcaaacacagagagaccctaaagactcaatagagagacacagtgatgaaaaaatgaccaatttatcccgaatggtaacgctttgacggaattgccccacgcaagcaaaatatctttttcaaaaggaaacaaaaagtttaaaagggaaatagaaggtggtggggtctaccggcggaggagaagaggcggagtgaggtggttgaacggtggtttgagaggcggatcgaaggaggagcacggtggtggttgttgagaagacggttgcaaggaacagcacgagcaagacagagacgatgagaaacaagtggagaaattattattgtttgcattgtctttggactgagagatcttaaaagagaatgtaaattactttaaacacggaataatggacaaaagccgtgatcaatgacttttcaagtcttaaccaaacctataactcatccattgtttgttttttctacatatttcttcacataaaattggatgatttagaatctttcagagtgttcacactccaacagattattatccacaatgttatggttacatttagagatatataacaatgttcatttcatcgttgctaatgacataaaacgatcaaaaactgaatcatagtacttcttttacagtgatctcaaatatattaatcgctaatcaatgaattatgtcacctataattgtcgtattaccaacaactataaaacatatatataaaaaattgttgtcgttaactagttgttgatagtggccactctaaaacgatcatgacctactacggaagttataactagtcaacgttggacgttagcaaggcccaatggacattaactcagcccataatagcacgcgccttgtgatgtgcaccagtttccgtctttggtcgttgaattcaaggaaaaaaaaagtacatcacaagcaatttcttacttatctgtgacttgaagctatttctccaatttcgttttccatcgacactctatttcattttcaccattcacgtcttccttctgaataaaataaaccctaaaacctaataccgaagtaaactcgtcaaccactgcgcccatgacctcccaacgatactcttcccttatattcttcctcttccttcttcctttctgcgatccaaaccttcaaacacatctccggtagatatgaaaatccactcttgcctctccgccattcttctgttcctcttcttctctgcttcttccgctaaacaaaatgttcggacagagcgaatttcaggtacttgttcttcttgctccagcagattggaatgtagagttgaattgattaatccttgagggtcgctcaaataagtttgaaatctgtcgtttctccagcatttggtttatagacatataatttgatttgcttaagaagtcaatgctattgattgaggaactatgtaacagctgtgtaagagagctcaaaaaggtgtgtttttgaaatgcaggaagtgctggtgatgttttggaggatgatccagtgggaaagcttaaggtttatgtatatgagcttccaagcaagtacaacaagaaattactgcaaaaggatcctcgatgtcttacacacatg

SEQ ID NO: 22452 - DNA, 3000 bp, Unknown
  misc_feature (1)..( 3000): 2750-1469P.txt file - cDNA_ID_2105063; gDNA_ID_1620769; Annot_ID_167438
tatagatttgttaccttcctaagcttattgtcaaattatactcatcagcatgggacatggacgagcattgtgatttgtgtccttacgagttgagaagagaagtaacgagcaaggtgctgcgaaacttaaaagaagaattgcgttaccaagactttagcccctgttggagtctactattacaacttgattctataaataaaacccataacaccttattaatcggggattttaagtggaacaataggaaactgcaatcgaatcctgacattcaaatgccattttctagtctgaaccaattatgataagttgaaacaacaaggatcaaatcccacgcaaaatgtctcaccatacatgaaaaatagcatcaacactcgatccaataaccttctcttccagtttcttgttaagcagccgactttacaagaacaaatagcgacgtctctcctagtttctcctttccctacaaaaccattgcagcccacatatctctttataagcaaatcagtgtaagagattggaagcagatagtaaaacagagataaataagctaaaccttaagctctggtaactcaattacgcaagcacattcaacaatcttcactcctactcgttctgcaaaaccaaccaattgtgggagtgagaaatagtcaagtttaactgaactgcatatgctgcattatcaaatcttggacttaccaagtagtcggattgcagcagcgagagtcccacccgtggcaatgaggtcatcaataataatagcacgctcaccaggctctactgcacctacgtgcatctcaatcgtatctgttccatactccaacgaatactcctccgaaataaccttccctgttaaaggaaccaaatgcagaggcagtttagaaattaacgtccatggataaacaaggaatgcgacaattatttgacactgctcataagtttccaaatggcttaatacatttcttgtaactggtcaagatacacaactaagtccattgatatgtaacagaaaaaataacaaccacttaagttactgcaagttaccacaaagaaaaatgatctagcaaatgagtagcatcatattgatcaaagacactgcaagataaaagtcaccttgctaatgttcgagataatgataaagtgtagacttggagcaagaagccatttaaactaacaacttcctaattgagacctttcatgtaacttaatgtcaaaatcacaagcaactagaggaagaaataaaaatgtaccaggtagcttcttgggcttcctcatgggaacaaatttggcaccaatagccaacgcaataggagggccaaaaatgaaacctctagcttcaacacctgcatttaccacaacatcaatttaggcagaaccaaaaatcatccaccaattcatttcaacttttcagtttaagctaaagcactcagtatctaaaaaggccaaaagaaactaaatccacaagctgttaatcgattggagtaccaaacagaaccatacgagttgttacctgcaacaacagatatgcctttatctttgtatctatcaacaaacaaagcaatagtatccttaaaggcctcagtgtcgagaagaagcgtcgttatgtcctgaaacatgattcctgccaagtatccaaattaaaaccttaagatcccaacgcagatcaagactagagacgatattaatcggtataaatggaaaaaatggagacctggtttagggaagtcggggatgactctaatggaagaggcaatcttagcgattctgggatcttgcacatcttcagtcgccatttcactgtcccgactggctgctgctttagcaaaatactcggcgtcagatttgcaaacacagagagaccctaaagactcaatagagagacacagtgatgaaaaaatgaccaatttatcccgaatggtaacgctttgacggaattgccccacgcaagcaaaatatctttttcaaaaggaaacaaaaagtttaaaagggaaatagaaggtggtggggtctaccggcggaggagaagaggcggagtgaggtggttgaacggtggtttgagaggcggatcgaaggaggagcacggtggtggttgttgagaagacggttgcaaggaacagcacgagcaagacagagacgatgagaaacaagtggagaaattattattgtttgcattgtctttggactgagagatcttaaaagagaatgtaaattactttaaacacggaataatggacaaaagccgtgatcaatgacttttcaagtcttaaccaaacctataactcatccattgtttgttttttctacatatttcttcacataaaattggatgatttagaatctttcagagtgttcacactccaacagattattatccacaatgttatggttacatttagagatatataacaatgttcatttcatcgttgctaatgacataaaacgatcaaaaactgaatcatagtacttcttttacagtgatctcaaatatattaatcgctaatcaatgaattatgtcacctataattgtcgtattaccaacaactataaaacatatatataaaaaattgttgtcgttaactagttgttgatagtggccactctaaaacgatcatgacctactacggaagttataactagtcaacgttggacgttagcaaggcccaatggacattaactcagcccataatagcacgcgccttgtgatgtgcaccagtttccgtctttggtcgttgaattcaaggaaaaaaaaagtacatcacaagcaatttcttacttatctgtgacttgaagctatttctccaatttcgttttccatcgacactctatttcattttcaccattcacgtcttccttctgaataaaataaaccctaaaacctaataccgaagtaaactcgtcaaccactgcgcccatgacctcccaacgatactcttcccttatattcttcctcttccttcttcctttctgcgatccaaaccttcaaacacatctccggtagatatg

SEQ ID NO: 22453 - DNA, 3000 bp, Unknown; identical to SEQ ID NO: 9231
  misc_feature (1)..( 3000): 2750-1469P.txt file - cDNA_ID_2105067; gDNA_ID_1972023; Annot_ID_178125

SEQ ID NO: 22454 - DNA, 3000 bp, Unknown; identical to SEQ ID NO: 4412
  misc_feature (1)..( 3000): 2750-1469P.txt file - cDNA_ID_2105071; gDNA_ID_1620704; Annot_ID_165195

SEQ ID NO: 22455 - DNA, 3000 bp, Unknown; identical to SEQ ID NO: 4412
  misc_feature (1)..( 3000): 2750-1469P.txt file - cDNA_ID_2105071; gDNA_ID_2926204; Annot_ID_202087

SEQ ID NO: 22456 - DNA, 3000 bp, Unknown; identical to SEQ ID NO: 4412
  misc_feature (1)..( 3000): 2750-1469P.txt file - cDNA_ID_2105071; gDNA_ID_2926206; Annot_ID_202183

SEQ ID NO: 22457 - DNA, 3000 bp, Unknown; identical to SEQ ID NO: 6051
  misc_feature (1)..( 3000): 2750-1469P.txt file - cDNA_ID_2105085; gDNA_ID_1620839; Annot_ID_170024

SEQ ID NO: 22458 - DNA, 3000 bp, Unknown; identical to SEQ ID NO: 6409
  misc_feature (1)..( 3000): 2750-1469P.txt file - cDNA_ID_2105089; gDNA_ID_1621093; Annot_ID_170811

SEQ ID NO: 22459 - DNA, 3000 bp, Unknown; identical to SEQ ID NO: 6409
  misc_feature (1)..( 3000): 2750-1469P.txt file - cDNA_ID_2105089; gDNA_ID_2926160; Annot_ID_198718

SEQ ID NO: 22460 - DNA, 3000 bp, Unknown; identical to SEQ ID NO: 6282
  misc_feature (1)..( 3000): 2750-1469P.txt file - cDNA_ID_2105093; gDNA_ID_1621088; Annot_ID_170553

SEQ ID NO: 22461 - DNA, 3003 bp, Unknown
  misc_feature (1)..( 3003): 2750-1469P.txt file - cDNA_ID_2105093; gDNA_ID_2926213; Annot_ID_202744
agtggggagccatgggatcagatgtggttagggcctggggatttgggagagaagaattgcaggaaatgagggagaatctgtcaaaaatggtatctgagctgaatcctcagtttttcgaatcttcggattcagattagttatgtcttaaaacgaatatgttgtatcatctttaaagattttttctggtttggtttgaaactttatggtcaaacccgttgttgattgacttatcttctttgtgtaagtcgcttgagagagttgatattggaggcataggagagaagcattgtcaaacaagaacaaaccgatatcaacatttatagttccaatgggattcttttgatcaatttgaaacattgctactttccgactttcctttcctgtctactttttttgtgcactatagagttagaaacaacttctatcatctgccagaagcatgatagtgatgccactctctttatccatggcttaagggatcagtaacctgatgcaccttacgagactctgagcttgagtactgtcccacggctcgggcataaggaattgattgtttcccggctgcaagcgcattcacattttcaactaaatactgtcttgggagcctcccgaccacattaccttcttcgttcccttctctatcgaggaaggcgaaatgaggaataccctcaacaccaaactcatccaactcttgctcccatttcgtgttgtccacatttagcatcacaaagttaactttgtccctgcgaaatcacaacaccacaagtaaacatcaactttagcctacaaaacgtcaaattagtgtctaaaaagctccatgttccattaaactaacatgagattaatggtttgcctctgcaactaaaatctcaaagctctacctttttcattagcgtctatctacatagccaacaatccaatcctaaagatagttccctaatccattaaaccaacacaaaataagaactcttctgcaactagaatctttaaagctctagctagttcattagctaaatccattccaagacaagattccttaatccatgtttttcgaagctctagcaatgctcatcttaatctccagacaagttccctaatccgttctgcaactagaaagctctagcttgtctttcatctatatataaaggcttcattttgaaaggagattgattttgatcaaaaatcacataaaagacgattcattacttgtattgctgctcgattttataaacatcaggagctagttctcgacaaacttcacaccaatctgcatagaactcaacaacagtcggcttcccattcgataacgcctaaatatccattcacaaaactcattaagcattctatgagaatagaaacacagatgaagaatccaaaaacaaacctcctcgtaaggcaacgcagaagcggttaaatccttcaaagaaatcccaaaatcgagccttgtcgatacaaataacgacaaagccgcgattacagtaacagccgcaactcttctattgatatccttattgggagattcagggaatcccgaagaagaagaagaagaagagtcagcaacagatgatgatgattccacttccttcgatgcagatgaagtttcaccattatctattaccaatttctcctgaatcaggtaaaggctaaaactttagctaatttgccttcgacccatttcaaaaagaatcgaaattttcacctgtttggtttcggaagattctgggtttggtttgcaacgaacagcgcgaaatcgtggagctcctgtttgggtaacgaagaaagattgaagatttcgaggactgagattgaatccatgactagatggaaggtttaaagaaaatactaagcgagccatcgtcgggagagagtgagagagatgacaaaactgctactcatcagatcgttattatcgaaggagtagtagcttcttcgtctaaccaagctattagagccacacgctttttgttacaaagatttaaactttgttacaaaataatatgaaatgagtcactctttatattccacatacacttaaagtgtttttttttaccttgataaactttaatatttataaagctaagtggtaattttttctaaggacagaatatcaagtttagtttgtacatctttgaaatttaacatttaagttttgaataaaaagaatatatataattaaaatttgcgtttaatcaacggattacttgacgaaaaaaaaaaatcaacggattacttacaatattattcttaaaaaagccttaaaactaaatttaaatatgtgaaaatatgttgaacttataatacgcaggagttacagactaaaagaacaggatgctaaacgctttcaagtatttaaatttcaacatttaagtttgaaaacattttgttaataaacttttagctttaaaatatcaaaacagattatttttgaaaaaatcttaaaattaaatttaaatatgagaaaacatgttgaacttatgataacgcacgagttacatacctaaaagacgggatgttaaatctaaccgttccagtatttaaatttaacatttaagtttaaaaacatttttgtaataaaaatattttatataatagaaaaacttttagctaacaattttcccttttcggtaagacaacttcggtaagacaaaattacccttttccgttacaacggtcatatatttttttacagcgtaacaattttcctatggcctatgtgcgtcatgagtcaaatagcttgaacaaaagcggagcagtttagctagactaaccgttagtgggataacatacgcattttttattcgtatattttagtgtttaccgtgaatattttaattaaaacataaaaatattttttcccctaattctttaattttggttttcattttcaagtccgccaaaaaaagcgaagagagggttttaatacgattccactcttctcaacaaatttgacgtttttgttcttcgaaattcaaattcacccagaaaaaatctcaatccgcgatg

SEQ ID NO: 22462 - DNA, 3003 bp, Unknown
  misc_feature (1)..( 3003): 2750-1469P.txt file - cDNA_ID_2105097; gDNA_ID_1620815; Annot_ID_169222
agatagattatccagttgcacaaaatgcgaaggaaaaagtctaaatggctttttcagaagaaaataaaataaaattaattgtttagatgagaaccaaatctacacgttattaatagacaaaatctggattttcggtactaactagtactattaaccaacgaaaagacaaatttgtagtttaattttaatatttggagaacgtgtctatgttatctctatgtttacttattagttaataaagattaatattttataccaatatttagtaaagtattttatacagaatttcgcgaaaattttatgatcaaaaataataattgtcaaacttcaacaagaaactgagatctatgttttcttaggagaaaagaaaagtaatgtctctttgaattttagttaccatataattgttgtaaccatccataattacaaaataaaatattgttgggagtcttgacccaacaaacgtgagaagcatttaagtttgttttgtggcacaatccaaaacttgaaacaatgtaagactaatagcataactaattaacgatgtaatgatgacataatcaagtaaaatttccattaattctgtattaatgatctgaaaaataatgtaccttttgtcgaggtaatatattcggctgtgaatcagcggaaatgtattaacaaagctttctcacatgatcacacttcctctcacgtcgttaacacaaagacagatggaggattcgtttggttcactactactaaaacaaaagtaggccacagttttaagatatggataatttggtataaaagtaataattttatttaaataaataccaaaatcgggtttaacaataaatgtatttttcaaaatattttattttatcacattaatatagtgtagagctcaaactcaaagcaatagattcattatacgtaacatgtaaattttaattttattgccatgtattacaatttctgtttaataaatctgggctggccaacttttatatggatcactttcctttattacaaatttacaatgagcaacatacaggttttgagaaagtctatacattacagatagtattataccatgacaattgacacagcaaaagcacttaaaatcttcaaaggaagggaatgaagttatcttccatctcatgtgcttgaaccagaggatcaatgattttcttccatcctccaaaatttgaaggggaagcagcatcagacaatacaaacccgttaacgtagaaggttggtgtaccataaacccctcttgaagcgctatactgcaacacacaacgccacgaaagcaaaagatgaactaaaagtcactattgttcgttttcagaaaacaacgagaacagcctcagggtactatcgacaaataggtcacaaaattatacttgataggtaaagattcaggccattaaactctgtattcttctattgccctgacatcactcattttcttgtgtgtgatatagatgcaaggcagtataataagatgatgactatgcagccaatgaccttcctgtaagaaatttaagttcctaaaggaattaccttgaaggaaactctggttgcacgatccgattttttgtcgctgaagccggatttaagaaccgattgatatgagttccccaacgagactgttccaagttcgactattttctccacaactgcaggtcttgaaaggagttgtgtttgcgcgttgtaaaacaatgactgccaaaaaaaaaaacagtttcagtgaaccagataaacattattgaatacatgcaaacaataaccagcaactgcagataaataaacatatatacctaagtttttagtattaacattgaacaaacctgatgcttgaagaacccttccagcaaactgaaggtagcattggcgtgtacggtattcacaatgtgtaaggcccgtgatgttacataggcattgtcatggtagctgcaatttccaaaatccaagaaaaaagattcaatacaagaacgaataatccgacataacacaaaggaatcattcacatttccatggaacaaatcataaaacagacagtgaaacatattttaaagtccagacctttcttaagccacttgtcgattgatcaatacatgaattaagctcagagcaaagaatgaaggcaaagagagaattttagatcactgacggtaaaggaaggagatggaggagaagggcaacgcgagatccatagtgatgaagagcttgcttcagtggcggccaagagtctctactgtccgggcaaaccgggtcaaaatacgcctcaattagtatagtatccgggtcgaaacgatgacccggtgggtaaacgaaaccatcttgcctcaccggcggcactagctgcgcttgtactctcgtctcaacgacgaagacaaggaacaggagaaccgctcgaatcattattctctgactcacactttttctctcttcccagaatcgccggagatgattaaaacagagggacggtgtcggtgagtatacgcaacggctacgattactcggaagctaagcgagacagttacctctcctttcatctctaaccgttgatttcaattatggtgacgtggcagaaaacacaatctggtaatgggccatatttgtaatgttatagagtttggtatttaaactgtaattacacgtaaataagagccctccctctacaaaaacgatagatttgagatatggtccaactacgttcacagagagactcataaaccataactctctctccctctctccctctctccctctctctctgctcgaatcgaaccgttcccaggtatgtgctttgttgatttagatcatcagaaaattctattgcgtctctttccttgtaccaagttgtttcactttcaccggattttctactttctgcatccgagtttctatgattggatcgaaatttgaatttccattgattttgaattgcggactgcgtcgttgattgatttcaggagctgctttgatttggtttatcgttgatctgtgaaaatg

SEQ ID NO: 22463 - DNA, 572 bp, Unknown; identical to SEQ ID NO: 15284
  misc_feature (1)..( 572): 2750-1469P.txt file - cDNA_ID_2105101; gDNA_ID_2926123; Annot_ID_196698

SEQ ID NO: 22464 - DNA, 3000 bp, Unknown
  misc_feature (1)..( 3000): 2750-1469P.txt file - cDNA_ID_2105101; gDNA_ID_1620815; Annot_ID_169195
aaactaattttgtagatcataatcattttggttattgagttttatcttgcccatttattgaatgtgttattagtttcattgtaaaagatgttttgcttgatttgcataattaacacttggtttccaaattttggtgtaaggttatgagagcttcacttgacgctggtcacagtttgccaaatcctgatggtattctttttaacgggcgtggccctgaagagaccttctttgcatttgaaccaggtgagtttttttcttcttttaaaaatattacattatatctttaataatgtagtttacacacaaatgttctttttatgttgtctatatataatcacaggcaaaacatataggctaagaatatcaaacgtgggtctcaaaacatgcttaaacttcagaatccaagaccacgatatgcttctagttgagacagagggtacgtatgttcaaaaacgtgtttactcgagcctggacatccacgtaggccaatcatactctattcttgtcactgccaaaaccgacccggttggaatttaccggtcttactacatattcgccacagctcggttcactgattcctaccttggcggtatagctttaattcgatatcccggttccccacttgacccagtcggacaaggtccactcgcacctgctttgcaagattttggttcctcagttgaacaagccctttccattaggtaaagaaatactctttttttataccaaagaataaaaacttttatatgaaatatttcgtttagtatttgttcttgactaataaacgttaagtgtacgacacagaatggacctgaacgttggagcagcaagatcgaaccctcaaggttcgtaccactatggacgaataaacgtaaccagaacgataatattacataacgacgttatgttatcgtcgggcaaactacggtatacgattaacggcgtttcgtttgtctaccccgagactccgttaaagctcgttgatcattttcagctaaatgacacgataatccctggcatgttcccggtttatccatccaacaaaacaccgactcttggaacttcagtggtcgatattcattacaaagatttcatccacatcgtgttccagaaccctctatttggattggagagttatcacatcgatggttacaatttcttcgttgtcgggtaaaaattacaatatttaaatcataattatgtgtatgatgattaaattaggtgtactaattttatttgagtttaatgttagatatggatttggagcttggtctgaaagcaaaaaagctggatataacttagtagatgctgtttcacggtcaacagttcaggttaagccatatctaatctcgtaatttaaagtattaaaccagtgattagttttggttaattgattctgtgtgtgtttaggtttatccatattcgtggacagcaatattgatagctatggataatcaaggaatgtggaacgtgagatcacagaaagcagagcaatggtatcttggtcaagagctttatatgagagttaaaggtgaaggagaagaagatccttcgactattccggttagagatgaaaatccgataccgggaaatgtcatccgttgtggcaaagttcgataataattaattgtctgaaataataaaacctagaaaagtctattttaattagcaaaactaaagaacggtttaaaggaatgatcagagagtattaggatctgtgttgatcttagggtttgtggtttgattgcgattcgaatcacttgtgtaattgcagaagacggatggtaatttaaagagatgatcttagggtttgtggtttgattgcgactaaagactactagacgatgccgttttagattttaatgggctcacacagttgttatctgcaaaccggcccaggtctgttttgacttggtgagtgctaacgtgctctataagaagatattgtagccacatacgaacagctaacgtgctcccatttcctctatgttcccttgagtgacatacgttttcacaataagttgggagcaagtaatttaccaagaacaaatatatattttaaaaaatataggatccttttacaagttcaattattgattttgacgttacgtataaacagtagatcgaccatgacataaataaaaatgaaaaaataattggatcaaatctcagatcttactacagtctacatctacctagctacatgtgctatggcattatttgtttttcatgttatcatcaatattgtataaaagatccaaacacaatcagtgtgatgatatttttctatacttttgatcattcaaccgatttcaattattgtgtttgatcgtttacatagaaataggtacatatgcattcaagatctccagatcgtttattacgtcttgctacatgtgctatgtcactaaaacaactaagatactacatgcaaagttactgtattcattacgcattgatcgtcttcttctacgcactattattgaatttttgtttctcgatgttttcagaagtcataacatataatcaagggtggttgtagctagtcgtgatgaaattcgaatagtaaaagattcatcaaatggatcaagatttgaaactagaatgaatgatcgatacttgaaagctatcacacttaaatagttaaatggacgatataattcaacaatatcttaaataacattaatcattcactttgtagaaatttcaatttgacggtgctaacaacaatatgtgacatttttgtttgcagcaaaaaagtcaaatggtaaaaaaaaacatttttttaaaaagagagtatagtaaaaaaaacagaggataaaaaacgaacaaacggttaaagctggcaaagatcccatcttccccacgctgtcaaattttgtcactacttcccaaaaaaaactctcccgcctctctctctccctctcccttcttattctcctccttcttctccttcaccatctccagatcccaaaatcttcatcgatcatcatcatcatg

SEQ ID NO: 22465 - DNA, 3003 bp, Unknown
  misc_feature (1)..( 3003): 2750-1469P.txt file - cDNA_ID_2105101; gDNA_ID_1620797; Annot_ID_168506
aaaaaactaattttgtagatcataatcattttggttattgagttttatcttgcccatttattgaatgtgttattagtttcattgtaaaagatgttttgcttgatttgcataattaacacttggtttccaaattttggtgtaaggttatgagagcttcacttgacgctggtcacagtttgccaaatcctgatggtattctttttaacgggcgtggccctgaagagaccttctttgcatttgaaccaggtgagtttttttcttcttttaaaaatattacattatatctttaataatgtagtttacacacaaatgttctttttatgttgtctatatataatcacaggcaaaacatataggctaagaatatcaaacgtgggtctcaaaacatgcttaaacttcagaatccaagaccacgatatgcttctagttgagacagagggtacgtatgttcaaaaacgtgtttactcgagcctggacatccacgtaggccaatcatactctattcttgtcactgccaaaaccgacccggttggaatttaccggtcttactacatattcgccacagctcggttcactgattcctaccttggcggtatagctttaattcgatatcccggttccccacttgacccagtcggacaaggtccactcgcacctgctttgcaagattttggttcctcagttgaacaagccctttccattaggtaaagaaatactctttttttataccaaagaataaaaacttttatatgaaatatttcgtttagtatttgttcttgactaataaacgttaagtgtacgacacagaatggacctgaacgttggagcagcaagatcgaaccctcaaggttcgtaccactatggacgaataaacgtaaccagaacgataatattacataacgacgttatgttatcgtcgggcaaactacggtatacgattaacggcgtttcgtttgtctaccccgagactccgttaaagctcgttgatcattttcagctaaatgacacgataatccctggcatgttcccggtttatccatccaacaaaacaccgactcttggaacttcagtggtcgatattcattacaaagatttcatccacatcgtgttccagaaccctctatttggattggagagttatcacatcgatggttacaatttcttcgttgtcgggtaaaaattacaatatttaaatcataattatgtgtatgatgattaaattaggtgtactaattttatttgagtttaatgttagatatggatttggagcttggtctgaaagcaaaaaagctggatataacttagtagatgctgtttcacggtcaacagttcaggttaagccatatctaatctcgtaatttaaagtattaaaccagtgattagttttggttaattgattctgtgtgtgtttaggtttatccatattcgtggacagcaatattgatagctatggataatcaaggaatgtggaacgtgagatcacagaaagcagagcaatggtatcttggtcaagagctttatatgagagttaaaggtgaaggagaagaagatccttcgactattccggttagagatgaaaatccgataccgggaaatgtcatccgttgtggcaaagttcgataataattaattgtctgaaataataaaacctagaaaagtctattttaattagcaaaactaaagaacggtttaaaggaatgatcagagagtattaggatctgtgttgatcttagggtttgtggtttgattgcgattcgaatcacttgtgtaattgcagaagacggatggtaatttaaagagatgatcttagggtttgtggtttgattgcgactaaagactactagacgatgccgttttagattttaatgggctcacacagttgttatctgcaaaccggcccaggtctgttttgacttggtgagtgctaacgtgctctataagaagatattgtagccacatacgaacagctaacgtgctcccatttcctctatgttcccttgagtgacatacgttttcacaataagttgggagcaagtaatttaccaagaacaaatatatattttaaaaaatataggatccttttacaagttcaattattgattttgacgttacgtataaacagtagatcgaccatgacataaataaaaatgaaaaaataattggatcaaatctcagatcttactacagtctacatctacctagctacatgtgctatggcattatttgtttttcatgttatcatcaatattgtataaaagatccaaacacaatcagtgtgatgatatttttctatacttttgatcattcaaccgatttcaattattgtgtttgatcgtttacatagaaataggtacatatgcattcaagatctccagatcgtttattacgtcttgctacatgtgctatgtcactaaaacaactaagatactacatgcaaagttactgtattcattacgcattgatcgtcttcttctacgcactattattgaatttttgtttctcgatgttttcagaagtcataacatataatcaagggtggttgtagctagtcgtgatgaaattcgaatagtaaaagattcatcaaatggatcaagatttgaaactagaatgaatgatcgatacttgaaagctatcacacttaaatagttaaatggacgatataattcaacaatatcttaaataacattaatcattcactttgtagaaatttcaatttgacggtgctaacaacaatatgtgacatttttgtttgcagcaaaaaagtcaaatggtaaaaaaaaacatttttttaaaaagagagtatagtaaaaaaaacagaggataaaaaacgaacaaacggttaaagctggcaaagatcccatcttccccacgctgtcaaattttgtcactacttcccaaaaaaaactctcccgcctctctctctccctctcccttcttattctcctccttcttctccttcaccatctccagatcccaaaatcttcatcgatcatcatcatcatg

SEQ ID NO: 22466 - DNA, 3000 bp, Unknown; identical to SEQ ID NO: 2110
  misc_feature (1)..( 3000): 2750-1469P.txt file - cDNA_ID_2105144; gDNA_ID_1620489; Annot_ID_158558

SEQ ID NO: 22467 - DNA, 3000 bp, Unknown; identical to SEQ ID NO: 959
  misc_feature (1)..( 3000): 2750-1469P.txt file - cDNA_ID_2105148; gDNA_ID_1620341; Annot_ID_153976

SEQ ID NO: 22468 - DNA, 3000 bp, Unknown; identical to SEQ ID NO: 1789
  misc_feature (1)..( 3000): 2750-1469P.txt file - cDNA_ID_2105165; gDNA_ID_1620448; Annot_ID_157363

SEQ ID NO: 22469 - DNA, 3003 bp, Unknown
  misc_feature (1)..( 3003): 2750-1469P.txt file - cDNA_ID_2105173; gDNA_ID_1620377; Annot_ID_155176
aatacatctctctagctagagaaaaagaaagcggaaataaagatataaaaatatttggaaagaaagatactgggagcaatttagctacagcatgacgatgagtcttactttgattctgtcaacattattaacctgagacaatcccaaaagtctttcgtcccaatattgaatcttctaattttgatatctatgtgattttgcatatgcactacctgagagaccaacagtacctagaggccaacttgtcctttttattcacctttcttgcatgacttttcctatgttgaaaagttagactcctcttttacacttcatgtaccccactcctatacgtatttaatctaaatatatatacccaccaatcctctccatctacacaaacagcccaaatatcaaacctttcatctctatatctttaaccttgactgcttctcttcttctacaagaaaccagaaaaaaagaaaagaaaagaaaaagaagagattagggatgggtttcttagagttgttggaggtggcttcaatgccaatcgttcaagttcttcttatcagcgtccttggcgctttcttggcaaccgattactgctctcttctctctgctgacacccgaagatccgtgaacaaggtcaacctccgtctctgcttttcttttttctgtttggtgtcaactatgcatgcattcatatatcatcactaacaaacattttccctcgcagctcgtcttcgtggtattcaccccctgcatcatgtttgccaaccttgccgagactgtcacattgcaggacattatttcatggtatgcactaccagtctcctatcatccctctgagaatacatacgtgtggctttgatttgaccaaaattagttttgtaggtggtttatgcccataaatgttggaatcacctttctagtaggaggcattcttggatggttggtggtcaagctactgaaccccaaacctcaacttcatggcctcataattgctacttgtgcctcaggtaacattaaaacctcaaaatttaatctcaaggaggagagatatatccctgaattctcacatgaatcatatttactgtcctgtctacgtaggcaatatggggaaccttatgcttatactggtccctgccatctgtgacgaggaaggcagtccttttgggaatcgtagtgtctgcagatccattgggctctcctacgcatctttctctatggccgtaagtcaaacatacatacatatgatcttctgatctctgctcagacttaattgttgagttgatcgtgtgattaatttttgtcaagggcagctcgggggtttctacatatggacgtacagttaccaactggtaagaagctctgctacacagtttagagctcttgaagccgccgggttggtcaagtctcccaacaaggacatcgactctgatccccacgctcttctcctcaagccgcaccaaaaccaagaccttgaaatccaaggcaaacaaaaagtgtctaccaggacatacatcaaggacttgctccatcagattcttgaggaactcttcgcaccacccaccattggtgccgtaagtctttttaaaaaaagaagacatgattacgtttccaaccaacaactaataaatccactgctctgatgcgttgttatatgttccattcagattcttggcttcgtcttcggagcaaccaattggctaaggaatcttataattggggagaatgccccgttgcgagtgatccaagactcagtaaagctacttgggtatgaactcatcttttttgaatatggaaattacaattacatcacgactttgcgcctaatagttgacttggcagggagggcacaattccttgcatcacactcatactggggggaaacctgattcagggtctgcgttcatcagctgtgaagaaatcagtgattgtgggagtgataattgtgcgctatatcctccttcccgtggtgggagtcggggtggtccaattagcaggaaatctaggctatcttcctccagaccctctctttcgatacgttctcatgcttcagttcgcactaccgcctgccatgaatattagtaattactcaagccatcccccttcacttcattgttagctagatacggatgattaatcatacactatatatatatggattgcaggcacaatggcacaactgttcgacgtggctcaagatgagtgctcggtcatcttcttgtggacctacctggttgcatctttagccctcaccgtctggtcaaccatcttcctctccatcctctcctgagtctgatttgaaaagaaaatggagtttgtttggtctcttgtatggatttttttgatttgttaatactctcatagtatttttgttcattcacatgttgccaaataaaacagagaaagacaaaagtatgtatgtttcacagtgttgtgggcttttactcagaaaaaaggaagtgaggtatgggctcatagagaaagagagagcccaaaattggagaggcgtgttcaagttggccacagaagaaggggagacgtgcgatgcatcctccacgttgctttgcttcgattggttaaaacctcttcaatcatttctgaaacttctacatttcttcacacctgtcctctcctccttacctgtccgttttttgtttattgttctgctttttgatatactgtatcaaagatcgattaattaatttccgaattcaacagctcattcattagttgattagaaaatttagtttggttaagcacataagtaacacgagtcaaatgtcagagttttgtttattgcttaagcaaatactactatttcttaaattgagaaaccccaaacaagagccaatgaaagttttgtatctttttcttaatgacttaaaaaagggaaaaagataaaacagatatcatttgaccacacaaacatatacaacacacccaatcagagatcgatcgccattaacgtagactgtgactctcggctcttcttcactctcaatttcgatcggcatg

SEQ ID NO: 22470 - DNA, 3003 bp, Unknown
  misc_feature (1)..( 3003): 2750-1469P.txt file - cDNA_ID_2105183; gDNA_ID_1620512; Annot_ID_159137
tatgtttgtatctgattcgtgaaatcgaggactctgatgccataagattgaagaagtttccatctcacaaacatgcctcgtttatttcattgatctgattctgtttttttggaagagagtttgtttacaatttttatctgattctacagctcatctccagtactaggatccaattctagtcagattcatggttactcatcttcttgtttttttctgaaccatggttacttatcaactagaaccaacaaagacagataattatctgaaatatcaatacaagaatccatatttagaaaaaaaaattatttttaatcatcaaattaataattaaacagaagctggtgaaactaacaactatctgttaaacattagttgagaattgctaattttgtcaaggttttatgatttactaagaggtcgatttttcaaaaaacaaaaaaaatcgtaatgcagatgaattttaaagtagagctaattcattagtcatagagaaaaatcaatttagaaagatttatatagctgaatttggggatgtctttatttcaatatcaacaacataaataggcttaaggtccaaaggaacattaagatatttctagaacgtcttaagtttaactcaaactgatgtttctcagactgaaacgaaacagagaacactagccacaaacatgacaaagcaacataaattaaagaagatactactagttacatttattatttaaagagtactagacatgattttgggtctccgctggttatgtgcaaaccaaagcttagaccgtttcaagttctcacttgagatagtcgatgagccaagcgagcatgtccttgtgagcttccattgcagcttcaacttctgatggatcattttcattgtatctaacagtccaaccgtgtttgcatcttgggaatatcttcacaaaactcttcacctgaaacatatcactttgctcacaattatctacttgaagaagatatctacttccaaaaacacatcaactactagttgtgtttttgtaagtaatgaaaatattaccttgcataaagacatagagctaagcaaagtacctgaggtttagaagctaaaatatcttcgaactgcctcacaagttctggaggagacacttgatcgatttcagctcctaatacagcaattggaaggttgacctctgcttcaatcatatagtgagagtcataatcacaacaaatgagagagaactatcaagtaaggagtggccatatcaaagatctaaatacccttgatatcatccaccgtaacgcgagcaggatgtaacaaaacagtagcgtcaacaagcttttccttagctagttccaccgcaacttttgctaaagaataagaaacaaaaagtcttgtgttaactaatatacatggttgacttattatacagatcatggaaaacattttcataaaactgtggtgatgatgggaacaagaaaaccgaactcaccaccccaacagaaccctgctgctcctatactagttatgcctttgttcttcaaggcctccactattggctttgactcctcaaaccctttctcctacaaaatccatagtctggtttcagatacattgacacagaacagtacaaaaacactgacttaatcttagctttgcaatcaacaataagtagtgatagcattttggcactaataataagggattattgggatacttggactatttcatgctgggaaacaaagactcatttatgtttttgagaaaaattgaggattgaacatttaataaggaaaagaaactaactagttcatgatctttcatccaaataggaaacggacgatcctggttctcgggattataaggatctccatggaagaaatcaggaaccaccgcgtagaatccagcttctgcaaccttgtcagcaagtttcctatcaagggaagaacaatatccatgacaagttacagcaagaatgaaacatctttcgagtgactataaaaggtgatataaactataactcattataacaaagaatctgaagtaaaagactgtctaacaatcaacaaaagacaagctgattcagtagggattctctgttacagcacctcaggtttggagtttcatatcctgcagaagaaaacgttttagattctcaaatcaaaccaacaaattcagaaagaacatcaaacgtaattgggacaggtaaaaaggtttttttaccgaaaacatgagggacaagaagaacagcaagctttgaatgagtggaaccacagacgtaggtgtcaaggttaccgagtttctcgacatgacccgacccgctagttggatccagatcaggcgggttctcggtgcactgatgacctgacattcttgttttcgccgaaccaaaaaacaagacgactcctctctcgcgctttgggacctctgttttaaaaagtaaagccaccaaaccacctttgacctttcacaccagttatctacactacgtgtgcgtatctactcttccacctaaaaaaactcacgtgcgttaaataaaaactaacttttgcaatgttaatttttcttagaataaatttgctaaatggggtaataccttaccttgaatgattgaatgattctatgcacttatgcagagtaaaaaacaaaacccaacaatcaaagattattctaattcaattatcaattttatcataacaaacaaaaactcttttgacaaattatttatgtggcttcctctaattatctttaacttttttttgtttaattcacaatttatgtggtcagatattttttcttccttccacaaggtgttgccttgaaaatcacgtcggaagatcacgaggaatcgttttgcgtgcgccacccaaacagacaaaacaaaaacacttcttttgttggttccttgtcggtttccaagggtttttgtttagggttttcattttctttttccttatctatctaatcctctgtttctctccacatcaaaaaaaacctcaaaattaagagacgaattcgagataatg

SEQ ID NO: 22471 - DNA, 1197 bp, Unknown; identical to SEQ ID NO: 9630
  misc_feature (1)..( 1197): 2750-1469P.txt file - cDNA_ID_2105187; gDNA_ID_1972164; Annot_ID_179664

SEQ ID NO: 22472 - DNA, 3000 bp, Unknown; identical to SEQ ID NO: 2859
  misc_feature (1)..( 3000): 2750-1469P.txt file - cDNA_ID_2105199; gDNA_ID_1620610; Annot_ID_161887

SEQ ID NO: 22473 - DNA, 3000 bp, Unknown; identical to SEQ ID NO: 2856
  misc_feature (1)..( 3000): 2750-1469P.txt file - cDNA_ID_2105221; gDNA_ID_1620610; Annot_ID_161871

SEQ ID NO: 22474 - DNA, 2147 bp, Unknown; identical to SEQ ID NO: 9257
  misc_feature (1)..( 2147): 2750-1469P.txt file - cDNA_ID_2105228; gDNA_ID_1972029; Annot_ID_178198

SEQ ID NO: 22475 - DNA, 3003 bp, Unknown
  misc_feature (1)..( 3003): 2750-1469P.txt file - cDNA_ID_2105242; gDNA_ID_1620444; Annot_ID_157248
ctaaggtgactcatttgatgtagtcactaaattgcaatattttaagatgatacttgctctgacctaaatggtgtcagggaacactcttgacctcagttcaatgtggtactatttatatttgggagttgctttgtaaatgttgcaattttacatttaaggaacatcttctgacctttgacgtcattttgttatttaatccaaaattcatatactctattttctctgcagtcttaacattttaaatttatctcatcttattcggttttggacagtccttcgagtttaaagatatagtgaaaatcggaagaactcatactcaagatgctacacctttgacattaggacaagaatttggtggctatgctactcaagtaaattatttgttctgttttctatccttatataacaaaagtgaaaattacatgtcattaagaaataacttataaatttttggatttcatgattgtaggttgagtatggacttaatagagtcgcatgtactctaccccgcatctatcaggtttggaaatgatatctcttgaggatctgatttcatattattctcaaagtttcattgagctctgacttgttagaaatgtttgtctagcttgcacaaggtggaactgctgttgggaccggattaaacactaagaaagggtatatctcgtttctagttttatatccattccgatttcatcctactggtaacactagtactatatgcataggtttgatgtaaagatcgctgctgcagtagctgaagaaacaaacttgccattcgtcaccgcagaaaacaagtttgaagctctggttagcctctaaataactttcatcatcatcaatgtccaaatttagtcttagcgtcttccactgggttctaaatcaaacaagatgcttctgaatggttgatgtatatgaaataagttgttgagttattacgcctttgtaggctgcacacgatgcttgtgttgaaacaagtggatctcttaacacaatcgccacatcattgatgaagattgccaatgatatacgttttcttggaaggtacgttatctaatattttttaatctttcttcaagatgtacatgttcttatgataatttaacatgtctttatatatactttatatagtggtccaagatgtattcttatgatattttaacatgtctttatatatactttatatagtggtccaagatgtggtcttggtgaactttctctgcctgagaatgaaccaggaagcagtattatgcctgtatgaatgcaattttttcctatggttcttatgtcctttccctctgcggctctgcctataccttttatttttcatagattttgattcaattgaattttaatctatctctcagggaaaggtaaatcctacacagtgtgaggccttgactatggtttgtgctcaagtaagttccattcaccaatacatattttactaacatatgaatttaaattgctaaggtagtcttgttcatgactcttttggttgcatcaaacaaaattgtaggttatgggaaaccatgtagccgtgacaattggtgggtcgaatggtcattttgaattgaatgtattcaagccggttatcgcaagcgctctcttacatgtacattaatctctttacttgtgatttttttgtcatttatactctattaaaatttaatcttaactatttgatctcatgtctttactagtccattagactaatagcagatgcttcagcttcatttgagaaaaactgtgttagaggcattgaggccaacagagaaaggatctcaaagctattgcacgaggtaggcttcttctcgttgattggccttaaaattattcatgtgtggaaatgatttatatataggaactaagtctttgttttatgtatttctctctagtctcttatgcttgtgacatcattgaatcctgtaagtctctaaatattaaacttctttgtcaagtcatccatattctcattatgattacaaatgaatttacctcaatgctaattcctcctttaccagaaaattggctatgacaatgctgcagcagtagccaaaagagctcacaaagaaggatgcacattaaaggtaaacaataaactattaacgttttcatcactaaataaatcggaatttaaacccatttttagcaagagaaaacatgttcatgtttgttacaatatatttgttgttctattttggatttaaaccttctccagtgaaaattatataatacaatacctttgagatccctaaatctttgctttaatttattctatagcacgcagctatgaagttaggtgttcttacttcggaagagtttgatactcttgttgttcccgagaagatgattggtccatctgattaagtactttataatggagccaaaagcttcaaatacaaagtggatgtttgggggcttttgcatcaagttgtgtttattcttttgtaataaattgctgcatgcatgtatgcttgtgttcaaaattttggatttgttttagagtcatgtgattatagtattctaagtaatttatcataaagtttgtcatatatacttaagtttaataaaaaataaatgtgtgtgaaaatgtcacatattggtgtttttgttataaaatgtcaaatattctaagtacatgtcaaatacttaagtcatgtataacatgttttctattatttatatttatgtccaccaataaagcacttatatatcaaaaacagattgggattaaatgatagactttgatttatatgagacttttgcgacattttatcaaaatatgagaatagacaaacaatatcatcacgacatgaattggtcgataaggcccatgaaggtccagtaatcttaatgggctttatacagataaattataccgaccaaatcgattatatacgcgccgtcgtcttctcaaccatcgcatattcgccgccataagcagagagtttcacatataaacgaaaaattcccttcgagaagtctcaagtcgacgatatg

SEQ ID NO: 22476 - DNA, 3003 bp, Unknown
  misc_feature (1)..( 3003): 2750-1469P.txt file - cDNA_ID_2105259; gDNA_ID_2926150; Annot_ID_198004
aaacctagttcagagcagagaggacgagtccataccccagttgtattaccatcactaccattgctagagccatcattctcggagctagttgatatcaaaaccacgttagattctatatatctaagtatctattgaataagaaagagttgaggctagtttgacaaacctctgagaactcctatgttcactgctgctatgttcagcactcccaactttgttattgcttattgacattgcaagtccatcgaactctttcagctttttcatgaacccatgatctgagtttccagctgaattagctggtgcatcaatggtcaaaggggttgtaacctgcaaacattctcatacattcatatccaatatccatcatactgcacatttcacacagaaacatcacaagacaattgacttactccagatgctgattgagaaacaggaccttgtggttgtgagccctggtaaagtaaagtaggaaaacacaaatcagtaaatctggtcttttcaactatttgttgatataaagtaaccactaaaaggaagggaggattaccatttgaacaccaggatgagcataaactccaccaggagggcaaaatggtggatatggtgctccataaggagccatcattggctacaacaacaaagaaagatcaaactcaatccaaagtaacagatatacattcaacaagtttaatataagtaccgatggagacgcccacatataaggcggtggagcatgaccaggcgccaaatttgagttgtaatattgaggtataccaactctaggcccataatatgcctacaaatatcatgagaaacaagctaaaatcactcaggctaataaaacacaattcacacagcagaaacaaaacaaggtcaaagaaaaatcacctgcatagcagcccagtcatgatgatacacatgaacattactctgctcctgtatatatacaaagtaaaacaacaacaacaatcaaactttgactaaacacaaatctgttactaaaccaatcagtttccattgattccattacttacaggagcagcagcttgcgatggcttatcagagttgttagtggggtttccttcttcgttgctacccattgctcaatgcagagtaatgacacagtaactttataaacaaaaaaatgatcagatcttttagcagttcctctgtaaagcataaatctaaaagaacagtattcaattacacctagatctcgcaattgtggacatcaaactataaatataacagagatccgagtaactataaagtatagcaccactgaatctaccagtaaaagattcaaagtcgagttttttcctctgtcaaaagttcaaaactatcaccaactagtagagttacacaattcaatctacctttaactttcctagtaattttcttcactcaatacacactttctcgagaaaacagagcgttcatatataatcactcagatattcattgaagaaaataacgaaaaccaaaatccaaaaacgtaccttgagtctcagggaaaacaattcgaattgaacccacaaaagaaaaaaaaacaaattcgcttctctctcttagtcggagagaatggtttctctctctagaaccagagttcggtaaaagaagagagaggaaggagaagagaagaaaaagaagagagacacaacggagcgccaagaggctgatgaacacgtcaccgtacacgtgtcatgatcttgaagggtttgcaaagggaacgcatatgctgagctggcaaccctagatctgcgctggacattttaaatatctgacttaaataatgattggtacacgtagtcataatcgccaccgttcatcttgagatctctacgtagacttgacgtgctgctgattttattccttttaaataatgaaaatacagaattaaactataatgtataattcatttgagatccacagatgacgaaacgtggactaccaaatcaagcatatttgtttttaccatttaatcgacggctaatattgatttcatctacggtaaaatatatctttttttaaccagaaaaaggttagagtggtccccactgtaggatctactgacttgtgtcggccgttagtggttttataaagctgacgtgtcccactgaataaggaataccgttgtggtccctacggacaacgtgggattcgacgccagctcattttttaattttttcttgaaatcttttttaaaattttagacgatgactcaatcttcgccacgtaggatccacccaataaaaaagggttaacaaaatcttatctttaatgctaaattagttgagattaatccatgttgtttaaatccgaaatgatgcatataatcttgtttcttataatcattaagatttagactgaagatctaattccaatttaagagagtcactaaaaaaagaatgaattcaatttcagacaaatccgacaaggtcaaggtgacgtgttcttgatgccaattctagtgggagccacttgacgcgtgcagttagactcccggtccaagacataaatttacgttaataccctcctttattgggttattattgggccgtagttgaattattagacccaacctttttatcctgttcttgattggcacatactttgcaaaaagttaacaaaataacttttattgcaaggcattacaagagaaatgtcaaatttggttgttgcatacatgacatcttattcatatccaatccataaattgatgtgttgttattcaaactggtcttttgatgtattgttagacatatctcatatatattgaacccttggaatcaatataatagattgggctttatttatcttttattgggcttaaagggaattgttggactaaaaaaaccattaaggctataacacactaattacacgtacaatgagagtgagagtcacggacgggatgattacaagaatcatatagcaccaaatatctcatcctcactctcacatacaaacacacattttgttcacacagagatagacatg

SEQ ID NO: 22477 - DNA, 3000 bp, Unknown; identical to SEQ ID NO: 7663
  misc_feature (1)..( 3000): 2750-1469P.txt file - cDNA_ID_2105259; gDNA_ID_1621155; Annot_ID_173477

SEQ ID NO: 22478 - DNA, 3003 bp, Unknown
  misc_feature (1)..( 3003): 2750-1469P.txt file - cDNA_ID_2105271; gDNA_ID_2936560; Annot_ID_194390
gaaacagagtggtttaacgttagcgtgttcataggttggtgatcctaacatggaccatgcttgttgggagagaccagaagacatggacacaccaagaagtgtgtttaaagtcgacaagaacaatcctggttctgatatcgccggtgaaatcgccgccgctcttgccgctgcttcaattgttttcagaaaatgtgatccttcttactccaatcacctcctccaacgagccattacggtactgtaaatgtgtcatttttcacaattaatattcttcatttagtaaacctatatttttcaagttttataattaggtgaaatattcttcatttaataatcatttggctattaattttttttttttaaatctatatgagcattaattaaaaagttgcatttgtgggtttttaaggtttttacatttgcggacaaatacagaggaccctacagtgcaggtctggccccagaagtttgtccattctactgttcttactctggatatcaggttcaacattttaaacttttgaagttggatctatattaatttaaagtgtaactgtaatctcggaaaaaaaaactgaaattgaagtcatgtttttggttttggtttgttcaggatgaattgttatggggagctgcttggttacaaaaagcaacaaataacccaacatatctcaattacatcaaagctaatggacaaatccttggagctgatgagtttgataacatgtttagttgggataataagcacgttggtgctagaatccttctctccaaggttatacaaatctttgaaactaatcaaagattccaaatttagaccattggttcttgaattcttatgaaacattttttgtgtgactttgttttgttttttcaaggagtttctgattcagaaagtgaagtcacttgaagaatacaaagagcatgctgatagtttcatttgctctgttctacctggagcatcctcttcccaatatacaccaggtttttgcatatataccactcatcttctcattgaaatttaaaaatcaaggaatttatgatatatgtgtatacatatttataggtgggctattgttcaagatgggtgagagcaacatgcaatacgtgacgtctacatcgttcttgctcttgacctacgccaaatacttaacctctgctcgcaccgtcgcttattgcggtggctccgtcgtcacccctgcccgcctccgctccatcgcaaagaaacaggtttgtttcaaaaccaatgtatattgactctggtatactttggatgtcaaaatcaaacttgactatcaagtaaattttcagttaatgcacataataaatgtgacaccatctgcaagactacagcataccaataaaagaattaagaatctatactttattataatgataattagcaaaaatgaaataaattttgtattttgctaaagcatgaattaattaatatcccaatataaaatggaaagagtagtatttgcttaattaattgattcatgtgatatatgcttcaggtggattatctacttggaggcaacccgttgaagatgtcatacatggttggttatggtctgaaatatccacgtcggattcaccaccgtggctcatctctcccctccgttgcagtccacccgaccaggatccagtgccacgacggcttctccttgtttacctctcaatctcctaatcctaacgacctagtcggtgcagtagtcggtggtccggaccagaacgatcaattccctgacgaacggtccgactacggacggtcagagccagcaacttacattaacgctccacttgttggagctttggcttatcttgctcgatcctaaggccaactttaactaagcttaaaccgcatttaattgttggtttacaatgttaattagtagtaatgattttataaatgaatggccaagattgtccgatccggctgaatgaatgttttagatgatgtggtatttgattttaattttctaataaaaaaaaaagtagcatttagaagtgggaatgggtctatgaaatgagattacgtcaatatgagtgaaattgataaattatccaatcccataaacgagatggtgaacaaatataaatttacatttactgctagtaaatacaactacaattactttttaccacgcaaaaggagagaggagagatttttttttttttttttacttcgtaaggataatatgtacttagaaaataatatacagtgacgaaggatgatgaatgctttcatgggaaacgagcaattgaccaggttgagagagatatgggccgattaaagctgtcactgtctctgttatgacagaactaagttcacgtttacgtgatttaaatttttattgatagaggagatgattgtgtttacaatcactgaattgttactgattttactgtgaattgcatatcaattggtaaacctgtaaaattgtcttatcattttgtggattaccaatcatatttatgagaaatctcaattccatttacataaatatttaaaagacaattacagaataatttagctatgacgctccgacataatcaacaaacaaaacaatattttgcatctgtatatatatatatacaaaattttgttacacatacacataattttgaggaagaaacaaaaattattatttggttgcaattttagactgttttataattaaccgagtaatattgatcattctcaaccacttaatcaattgattctttttttttttttttttttgcttgatataaaaaaagttacggtaaaattggaaatcgttactacctaagattggggtcaacaatccgtaaaagaagatggaatcacacactgtaataccaatacttttctataaggaatcaaatctataaatagcatactaactagcactataaaaacattatgaatcctcctatgagcaaatcacttttaaatttgttaacactcttttaaaagaacaaaaaaagcaaaaaaaaaataaagatattatcaccatg

SEQ ID NO: 22479 - DNA, 3003 bp, Unknown
  misc_feature (1)..( 3003): 2750-1469P.txt file - cDNA_ID_2105271; gDNA_ID_1971906; Annot_ID_177005
gggaaacagagtggtttaacgttagcgtgttcataggttggtgatcctaacatggaccatgcttgttgggagagaccagaagacatggacacaccaagaagtgtgtttaaagtcgacaagaacaatcctggttctgatatcgccggtgaaatcgccgccgctcttgccgctgcttcaattgttttcagaaaatgtgatccttcttactccaatcacctcctccaacgagccattacggtactgtaaatgtgtcatttttcacaattaatattcttcatttagtaaacctatatttttcaagttttataattaggtgaaatattcttcatttaataatcatttggctattaattttttttttttaaatctatatgagcattaattaaaaagttgcatttgtgggtttttaaggtttttacatttgcggacaaatacagaggaccctacagtgcaggtctggccccagaagtttgtccattctactgttcttactctggatatcaggttcaacattttaaacttttgaagttggatctatattaatttaaagtgtaactgtaatctcggaaaaaaaaactgaaattgaagtcatgtttttggttttggtttgttcaggatgaattgttatggggagctgcttggttacaaaaagcaacaaataacccaacatatctcaattacatcaaagctaatggacaaatccttggagctgatgagtttgataacatgtttagttgggataataagcacgttggtgctagaatccttctctccaaggttatacaaatctttgaaactaatcaaagattccaaatttagaccattggttcttgaattcttatgaaacattttttgtgtgactttgttttgttttttcaaggagtttctgattcagaaagtgaagtcacttgaagaatacaaagagcatgctgatagtttcatttgctctgttctacctggagcatcctcttcccaatatacaccaggtttttgcatatataccactcatcttctcattgaaatttaaaaatcaaggaatttatgatatatgtgtatacatatttataggtgggctattgttcaagatgggtgagagcaacatgcaatacgtgacgtctacatcgttcttgctcttgacctacgccaaatacttaacctctgctcgcaccgtcgcttattgcggtggctccgtcgtcacccctgcccgcctccgctccatcgcaaagaaacaggtttgtttcaaaaccaatgtatattgactctggtatactttggatgtcaaaatcaaacttgactatcaagtaaattttcagttaatgcacataataaatgtgacaccatctgcaagactacagcataccaataaaagaattaagaatctatactttattataatgataattagcaaaaatgaaataaattttgtattttgctaaagcatgaattaattaatatcccaatataaaatggaaagagtagtatttgcttaattaattgattcatgtgatatatgcttcaggtggattatctacttggaggcaacccgttgaagatgtcatacatggttggttatggtctgaaatatccacgtcggattcaccaccgtggctcatctctcccctccgttgcagtccacccgaccaggatccagtgccacgacggcttctccttgtttacctctcaatctcctaatcctaacgacctagtcggtgcagtagtcggtggtccggaccagaacgatcaattccctgacgaacggtccgactacggacggtcagagccagcaacttacattaacgctccacttgttggagctttggcttatcttgctcgatcctaaggccaactttaactaagcttaaaccgcatttaattgttggtttacaatgttaattagtagtaatgattttataaatgaatggccaagattgtccgatccggctgaatgaatgttttagatgatgtggtatttgattttaattttctaataaaaaaaaaagtagcatttagaagtgggaatgggtctatgaaatgagattacgtcaatatgagtgaaattgataaattatccaatcccataaacgagatggtgaacaaatataaatttacatttactgctagtaaatacaactacaattactttttaccacgcaaaaggagagaggagagattttttttttttttttacttcgtaaggataatatgtacttagaaaataatatacagtgacgaaggatgatgaatgctttcatgggaaacgagcaattgaccaggttgagagagatatgggccgattaaagctgtcactgtctctgttatgacagaactaagttcacgtttacgtgatttaaatttttattgatagaggagatgattgtgtttacaatcactgaattgttactgattttactgtgaattgcatatcaattggtaaacctgtaaaattgtcttatcattttgtggattaccaatcatatttatgagaaatctcaattccatttacataaatatttaaaagacaattacagaataatttagctatgacgctccgacataatcaacaaacaaaacaatattttgcatctgtatatatatatatacaaaattttgttacacatacacataattttgaggaagaaacaaaaattattatttggttgcaattttagactgttttataattaaccgagtaatattgatcattctcaaccacttaatcaattgattcttttttttttttttttttgcttgatataaaaaaagttacggtaaaattggaaatcgttactacctaagattggggtcaacaatccgtaaaagaagatggaatcacacactgtaataccaatacttttctataaggaatcaaatctataaatagcatactaactagcactataaaaacattatgaatcctcctatgagcaaatcacttttaaatttgttaacactcttttaaaagaacaaaaaaagcaaaaaaaaaataaagatattatcaccatg

SEQ ID NO: 22480 - DNA, 3003 bp, Unknown
  misc_feature (1)..( 3003): 2750-1469P.txt file - cDNA_ID_2105286; gDNA_ID_1620822; Annot_ID_169528
cttaccaagagcatgagcaacaataatacttggcaggttttgaagaaatatttccccctcaaggatatctaaggagcgaaaacgaaaatgtatgagaaataccccatgatgaaataagatactaagagtcataaattgtaagctgaagtacaaagaagaatcttactatgtaaagaaggcaatctgaaaactctatggttcaaatccaccgcaattccattaggaacacgaaacatcccagcccttgacaacatagctgttcccatgccgatatatagtccactgcgttcacgatagtaaggatctacaataacatttcaactgttaaagttaaaaacatttcacaagtttcgtagttggcacccctaaaacttatggataatataacactttcaagaaaaaatactggagagaaagcttatctaatacgactggattattgaggaaaactactctttaaaatttgaacgcattccaccgagtatactgtttgactcttttggctgccataatttattactcaaataatagcacctttgatcaataaacaacttaacacgtgaagcgcttaataaatcaaagacctattcttcgggtttcagttactgtgaaacaaagtaatggtcaatcatatgataggttcctgcacttattttatagagaagaaagcaaaagaaacatttctgattcttgcctgttggcagcccctggagagtggtcccacgagtcatattaacactccagtcaccttcatcaccaggttgttccatagcaacacagacagcaaccgcatctcctttctcaacatgggcagtgcaagccagtacacctggcacatagacctaccaaagacccataagagaaattagtacatatttgttcacttaaaagcccggagtttctcagctagattgtcaaaaactataacgaaatacaaccaagatagggattcatattccaacccaactcccagcagcatagtgacaggatagaagcttaagccctcccaatggaatactttaagatcgcataattttaagtatcaatgtgactagccactaaagtttcactgagagagcgtcaagattacctgggctcctctgagaactgcttcagcacacttcctgctcactagtacctcctttggagggttttcaagaccagaatcatattctatcttatgtgggcctgaaccattgacaaagacaacataatccaaaccaggtatctgacacttggtgacgggactacttccatctggttgtactagcttcaagccctcctccgagtcgtttaaaattttcgtaagcttttcgataaccgcatcactcgtcgttttaacagtgttcaccctaatgcaggagtatgaagatgggcgcctaatatggaacaaaaacaaaatatatatagagtcgagcaaaatgtagcaacaataactagagcagacgcaagaaaaatgtgagaaagtttgttaatttagttacgatggcagactacaactgaaacatgtgaaggagaagctaacattggggaaaatgcaattaaataataattcgatttaggagattagagaatgaataagcaataaggcaaagcgaatccagctaaatgcgcctaaaggagggcaatgttgcttcagaagtagatgagaatgatagaaaagtacgtgagagcctttgaaatgcgagcaaagtgatcgggtccataagctttagtgaagtagtcttcaacttcaggattccatcgcagtaccggatcataacagtaacgctccgaatcggaaggacccatctccatctgatgagagatagagcgtgactgagaaacagaggagaagaaggccttggctctggttaagcaagtggtgagggaagagggttttagcagaaccctcgctttactcattcaaggtggaaggagactggagagatagagagagcttcttcaagggaagaaacttcttgggtttttacctttttagagctttaatggtagatgggccatgggttgcaatgaataagcccatatcattcagagctttaatggtgtatgggccttgggttgcaatgaataagcccatatcattcagagctttaatagtagatgggccttgggttgcaatgaataagcccatctcattcagagctttaatggtagatgggccttgggttgcaaagaataagcccatatcattcagagctttaatgacagatgggccttgggttgcaatgaataagcccatcacattcagagctttaatggtatatgggccttaggttgcaaagaataagtccatcatattcatctgcttgtttatttactttgatgtaaggttttttatataaaggtcaaaaaaggttaggtagaagaagctaaaaggtttgatgagagtcttttcctaccaaaccccctctccttgtgatgatgattagcttcacctgccattttctcaatgactgtacccacaggttatataaatggcttctcacatttcgagctccattcctcaccagaccccttttgcaaggttatccctttttctctctctatttcatttgatttcactattagcttcttcatttttgtgagaggctcttggatttttttgatttttgcaacttgtaatggagtctgttcccattaaagtttcttcatttctgagtctttagccatctattcgttggttggaacttggaagagtaggattttagtttgaaatgctcattctccgatcataaagtttatatattttgaatagaatttgtgttcttgttctagtggatgaagtagagaataatctagggaggttgaaattagattgttgcaagttcgtgaatattaggatttgtctcattgggtctgaagttttgtggaatttcttgacagtgtagtttggcagtttgagagtgtttttcatatccgactctttcaaactgatggttttgacatttttgttgaccagattagtaagttattgttgtcgttttgagaaagctggatatg

SEQ ID NO: 22481 - DNA, 3000 bp, Unknown; identical to SEQ ID NO: 2565
  misc_feature (1)..( 3000): 2750-1469P.txt file - cDNA_ID_2105302; gDNA_ID_1620555; Annot_ID_160420

SEQ ID NO: 22482 - DNA, 3000 bp, Unknown; identical to SEQ ID NO: 1365
  misc_feature (1)..( 3000): 2750-1469P.txt file - cDNA_ID_2105310; gDNA_ID_1620392; Annot_ID_155639

SEQ ID NO: 22483 - DNA, 3000 bp, Unknown; identical to SEQ ID NO: 1407
  misc_feature (1)..( 3000): 2750-1469P.txt file - cDNA_ID_2105314; gDNA_ID_1620397; Annot_ID_155827

SEQ ID NO: 22484 - DNA, 3000 bp, Unknown; identical to SEQ ID NO: 9160
  misc_feature (1)..( 3000): 2750-1469P.txt file - cDNA_ID_2105344; gDNA_ID_1972015; Annot_ID_177892

SEQ ID NO: 22485 - DNA, 3000 bp, Unknown; identical to SEQ ID NO: 1418
  misc_feature (1)..( 3000): 2750-1469P.txt file - cDNA_ID_2105348; gDNA_ID_1620400; Annot_ID_155903

SEQ ID NO: 22486 - DNA, 3003 bp, Unknown
  misc_feature (1)..( 3003): 2750-1469P.txt file - cDNA_ID_2105352; gDNA_ID_1620439; Annot_ID_157109
aaaaaaaaaattcacaaatgcaaataagatcttaactaaaattcataaatagataataaaataattaagtcgagaaaaagttgcagtgcgtaaattttattcacggtcatactctcaaattttatttattttctgattataactctttgtttcttcggtcggggtttccgtcgatttggatgatgatgaggatttaaagactcatagttcttcaactgtaatatgttgtattagtggagaaaagaagctttagtctcacaccgacgataagagttctaccggcagtgtagtaatacatagtagaagacggagatctaagatgaaaataacagagacaagaatttgatcaagggaccgaagattcataagatttcatggaatctttgtcgataggggaggtagactccggttcggcgagctgagccaccatcgaaggtctattttttactccttagtatttctctctctcacgatcgaacaagtatctcctcgacaatgacaatatcatatatcttcttccttctcaaaacggctatatagtggtgggatgacagcggatcttggaaaatcatcatcattcagctcacgtcgcccaggttcattggatgtcctgttccgacgagaatctgctcacattggacggcgtcttcaattgtgttctatgatcagatattagaatttcaatatgtaaccggtttagttcagttttgtcatggacatatatctggaaatattctattgcacatttatttataaaaattgaaaatttttaacaaaaaaaaaaactaaaattcataaatgcatgcataatacatactctaacgcatgtttatatgcaattatgtacagtatattattattagtatataccaaactttgatttgtcttttcaaagtccaaaatttaataatactttgataagtcaagtcggcatgtgatgttcttttctttcacaaaacaaaaagttgggtgggttatgcaagtagacaacgatgtggggaagatgatggtttacaatttgtcttagtgctatcaacaaaaacaaaaatcctttttttgtcattatattacccaaaaaatccaatgatccttattattactaagaaaattatattactaactggtcgttttaactatattttctttttatcatctacaacttacataaacaaatcaaaattaattttgagagaagaataatacaaacaagtactattcatatgtcttgatcaaattattttgtcatcactctattatacactccattaagctatttctttcaacaaagtatgattccatctatttctttagatcattaattttgttggtcaaaataagtaaatatagaatttccacttaacatatgcatgggcagtgtaaattaggtcgattaaactgtaaagagagggattaaatttataattacaacttaagaccaaaattatgtggaacataatagataaagtgatagtgagtagacaatttttgacattctgtttgatagaaatcacaaatttgatgtacaataacttaagtatgaaaagaaaattaaaactcaataggatccatagaaaacatatgtatacaaaagactttattaagcatatgttttcatgatattcgacaaacaaagcaagcaaatcaaatgacaaatttcatgtatattaggcagatagctaaaaaaaacaacaaatataacacactaattatcagtatcatactttagccgaatatgagataattcagatgtatatcatcatataaatggtcaaaaaaatatgtggtatatgaattgttcaatgttagattttatgaaaactatgggtaaagtggggtttggcatgttagctttccctaatatgtcactggaatagaaagctagcacgtcattagaagaaaccaaatgttaaatgatccttgacctaaaccaacagaacaatttatctaaaactgttattatttaaatccattaaaacctggtaaataaactatttactattatggttacatttatcctaaaaatcaattggatgatataaacgcgcggatcatcttctaattaaaagaaaccacgtcactagaatatttgcatgaataggttagtgtaattatgcttcttggaagatgcgtttgctattctcaccaccacctggtatatagaaaatgatctgattcgttatgcagttgattaattgtataccctttaccaatattctaagctaacaccaatgcgggaggacatttattctgatgatgtcctttcaacggatcggatttgagtaccatgtgtcacattatggtacattttgattcttgaaatttctctattacattaatattttaagtgtatacataccacacaaacataatttgttttaattaaattaatttcataaagaatagctttaatggattaaaagtatataatgtaaaaaggccaatccaatcaaatttgaagtatctacccgaaaaatggatcatatgataatttgttttaatggatttaccttttatttatctaaaaaccaaatctgaatttgaacctaaccctaaaatataaaaagttattcaaaaattaaattattaaaaaggtatatattaataaaaaaggaaacaaataaatttaattctcattttgaaaaatcaatactattgaccagcttgcaaattcatagtaccatatttttctacaattttttgtcgacacaatacatgactctcttttatcatcctttcaaaaattattttttcaaaatatattactattatccttcttctctttattatccgagtcaaacgccgaattctcatattctacataagacatggctctctttattatccttcctgtatattttttccttcataatatattactatccttctcgtttattaatacaaacttgaattcttcttcttcttaactttgtctgtcaattcacatatatatagtaccaccatcacataagtatctcataacacatcatggtgaacgaagaaatg

SEQ ID NO: 22487 - DNA, 3000 bp, Unknown; identical to SEQ ID NO: 1998
  misc_feature (1)..( 3000): 2750-1469P.txt file - cDNA_ID_2105356; gDNA_ID_1620476; Annot_ID_158175

SEQ ID NO: 22488 - DNA, 3003 bp, Unknown
  misc_feature (1)..( 3003): 2750-1469P.txt file - cDNA_ID_2105368; gDNA_ID_1972154; Annot_ID_179420
cttatccaattcggaacgtccggtcaagtcgccggtttcattggcgaatcaatccaggcgagattaatttgtacttatttcttatatcaaaaaggtatttatgattatgataatgaatatgcatgtaatgtagtctatatcctgtaacagggtgttggaggaatcgtagagcttgctcccggatacttaccggcggcttacgacatcgtgaggaaagccggaggagtttgcatcgccgatgaagtccaatccggttttgctcgtaccggaacccatttctgggggtttcaatcccatggtgttatccctgacatcgtcaccatggccaaggttcatcattatcatgattcatgcatcgttatcaatttatcatcatcaattctaatttggattttgcaggggatcggtaacggtataccacttggagcggttgtgacgacaccggagattgccggcgttttaagccgtcggagttactttaatactttcggcggaaatccaatgtgcacggccgcaggacacgcagtacttagagtccttcacgaagagaagctccaagagaatgctaacctcgttggctcacatcttaaacgtagacttacgctactcaaaaacaaatacgaacgtgagttacttcttgtccaaattaaaatcaattttaaaatttttctttattgaatatcttatcctttctctaatttgtttagtcattggagacgtgagagggagaggattgatgctaggagttgagtttgtcaaagaccgcgacttaaaaactcctgcaaaagcagagacccttcatttaatggatcaaatgaaaggttagttgtgttcaatcctaaaccaagtgaaattgatcactctcatcatataaagttgatacttatgcatttaagatagtgtttaatacaaatcttttggtatcaagaaatgggagtgttggtggggaaaggtggattctatgggaatgtcttcagaatcactcctcctctctgcttcaccctctccgacgctggttagctccttagtttaacatatatatcttcaaattggtttctttttgtttcatttttttattcatgatttatgttgtttcaaatcttgtattttgtagatttcctcgtggatgtgatggatcacgccatgtccaagatgtgatttactatctttatccgttctctaatgatcactcacccttgtatgtgtatataaataacacaatacatcataaagtagaattacaattggtgtttaccgaaatatatcacagatgcaagtatatgtaactaaatgtacagtactgtatacacttgatagaatctacaaataaataaaaaactcgctgctaatgatattccacaaatacatatattgatccgaagtttcgagtttagagtaaaacttgaatgatacacctgtggggcaaaacagttggtcatcaaagacgaggaagtggtagaaatggcggcgccgcggcggagtaggaaaacgatgtccggagagctgtcctgatcgcggaaacgagactcgtcagcacgaatataagttcttcaagtatgcatagtgtctttcttatcatcgaatcttcttgttttctcgatgcgagattcccaagtgagagagagggagttgtgatatttttctgctgacttttagatatatatggcctttgataatgttattcagacaaacaaagtgtcagcttgatgtttgtgtccaaaattgataatataatggaataattgcaaaacggaacctgaagttttgattaacatggaatttgaacccaatattttttccctacaccaaatttttagtttttcggttttcatttttttaccaactacaataaaccctagatgaattcggtttagaagaccagacattgctatgtaagagtagaaaaaccgttggtgtttagattacactaatttaaacgttataacacaaaactgattaaaacataaatatacttatgaagcgtgtgcaatgatgatcccttcatgtaccccgttgtacggaatcctagaggtgattcgaagaatttatggtaactcacgtaacaaagtgtcagctaagtaatttatggttacgaaaatacaattgtctcgtttaaaaaaaaattaatatagttttaaaaaatctaatatcgtttttaaatttaatatcatttctctgttactagtttagtagcttgaatttttgttttcgtaattaaactagactgattttttaaatttagatttagaccgtgattagaataaaagtgagttttaagttgcattttaatcaaagaatcagattgaatttgcgattaacttctcagttaattagtcgatccattgatggtgttctttgaatttgtttctcaatgatgcatacaaaatttcaatttccacattttaaacataaattaattttaaaattatagatatttagtatacctctcaatcttataatattagtatttaataacattgcattaaagttagtaattaattagagtggatttttgatctgaagagggtaaaactaaaaacggaaaggagaaaaagaatgaaagagaagtggaaagaaaacgcaaatgcattgaagactttccctttgtctctctctttgacaaaatcccaattttcgcatcctcactttctcctctgccttttttttttctcttctgccgccaccaccaccaccactgttaattcgccgccgcttccacatcaatcgccgtcgtagccaatcatcatcgttcttcatcctccgcttctcctgattcttagggtttccgcttccgcttctctgtcgagggtttttcgagctggattctctgctcctgcgccgctggtgcagcggctttgttgattgatctggatttctccgtcttcctttctattttattttctgtatctcgcacaatccaaacaaaaaagctagggctgaggatttgatttgcgtgatttctgggggtgtgttaattcgggggtgtgttctccgatttggatg

SEQ ID NO: 22489 - DNA, 3003 bp, Unknown
  misc_feature (1)..( 3003): 2750-1469P.txt file - cDNA_ID_2105391; gDNA_ID_1620804; Annot_ID_168774
ggtaaaggagcgttggagtgtgcgatttgtttgaatgagtttgaagacgatgaaacgctgcgtctgttgcctaaatgtgatcacgtgtttcatcctcattgtatcggcgcgtggcttcaaggtcacgtgacttgtccggtttgtcggactaatcttgctgaacagacgcctgaaccggaagtggtggtggaaaccgatcttgaggcgcagcagcaatcggcggttcctgtaccggtggtggaacttccacgtgttaaattcccgaggtcgcatacgacagggcattcggtggttttaccgggagagagtaccgaccggtttacgcttagagtaccggaagaattaaggaagaagataatggcgaattggaaattgaaccggtcgaatagtgtttttgttttaccgagaggaggaagctcgaggagtggtaaacaggttgaccggtcgagggctaaatcggaccggtggttgttccgtaaaactccgtcgtttctatggaggaaccgggatgatggttcgattaggctaggtggtaccggtagtgttagaggaaattcagtaacaagtccgagcggtgactcggtacgagcagaccggtgggcttttcttagaaacccatcgtttctctggaggaatacgacgccggttccttcgccgagagttgaagtcaataataaggacggtgaaggaacatcgtcagttcaacatatcggtacagttggttcaactagcggttcccttaggctaccggtttagtgttcggtgatgttttgtgcattgttcataaacacgcaatagattttacgtaattctttaattttgtttgtctttttctgtaagatatttaaatcgacaatccaacggaaaaaggagattgttttacttaatttattttatactcttcaaaagtcaaacaaagaacgaactggagattggtcttgttcttaaaaaaaaaaaaagtcttgttcgtcgaccaaagaatacatggaactggaagatagagactacaacattattttatagcggtaatggaatgtattatctagttctgaattcatgtgtttatttctcgatgaatacgatgaacgactaaaaaaagagaggaactatataacaaacaaatttgttaccaattaatgattgttttttttttggggaaatacaacgttttttttttctcaagtagtattgttgtcggaccaaaacaaaaatttgtactaatatatgaatcaagtagataagaacaatgtatcaaattaaaatttcagataacagtttccacagttaatcatttgagcgtcaaaaaaagtaatatcatttgaacattgaagcacgaggtactttactttcagagctgagactaaagatagttcgagaagatcttattttaatacttggaagttggaaatacggaaatgaaatcatatacattaaaatataaaacatagttacttcatcagatagaccacgactaagtcgtttcgatacggattggaagattacttgttcaacaatttgaatagttacgtagaaagttgccatcattcaaattttattctagaaacataaaaatgtaaaaattaccaaacacacaatatagccgttgttgtctacaatatgatgatggtaccattgtttatttgtttttatataactgcatacgagatgttggaaaatgtttacatatattttagttagttagtttaaataataataaaataatttgtactttttatttaatttactctattttttaataattttatgttttttgtttattttatgtgacattcgatctacgtccgtaatcagattgagaatacaagaacgtctcatacctcagaaaaaatttatagttctgcattttgctttttttttgcgagagtcggcggcatctctgtcacactgaacagtaaagagaaaaatatatttaggatttattttaatcgtgtatttatactgtgttttttgggctgggtcttaaacaaatctgcccaaaaaatatatatatatatatattttattttatctcttgtgaaaatatgtaaacaatttattctttttgtgctgaatgattaataagtgaatgcaaggttccaagtttaagaaaatatatactcgatttgatccgacgaaatcatatggaattgcgagcaatacatttatcaaggttttaaaaattgagatttcaaaataacgcttttgttattataacgacaaacaaaataaaccatatttcttatagaaaaaaaatagttcgttctaaatttgtacatgactcaatatcttattttttaaatcccatatagtatcaaaaagtattaaattattaatgcacacaaagtcacaatcaatgatttatattaaataaaattgcattgactaactatttggaataaatcatggattatgtatactgtatagtatataattcgtatgcacacaatccatgatttatgttttaaaagacatatgaacacaatccatatctctgtgtacaatctaacttttcgaaataaatctaaacaaaaattgaatagtttataatttcaaagtttgcaattcaaatccaacataaaataatattaatcaaaataattaagtagaaacaattttgattggttttatgcttagttttactaactttgccattacgaccaacaatttttcactaacaatcggtttggtgacagaaccgattaataactttgccattacggccaacaatttttcactaacaatcggtttggagacagaaccgatcaataattttctaaaccgtactattgtaaaccggaatgttggtttatatgattaagatcacattggtataactctacgtgtctcgtccaatcacatttcacagcgtcaaggaaataaatattagataattaataaattttaataagaggaaaaaaaaacattcatcttcttcttcttcgtcggagtcggagcagagaaaggttttggagatcgagaccaaactccgattgaaagaggatg

SEQ ID NO: 22490 - DNA, 496 bp, Unknown; identical to SEQ ID NO: 352
  misc_feature (1)..( 496): 2750-1469P.txt file - cDNA_ID_2105398; gDNA_ID_1564227; Annot_ID_149074

SEQ ID NO: 22491 - DNA, 3003 bp, Unknown
  misc_feature (1)..( 3003): 2750-1469P.txt file - cDNA_ID_2105406; gDNA_ID_1620623; Annot_ID_162413
tttatctgaatgtttacgatcttaccccaatgaatgtttatggttactggctcggaattgggatctatcactctggtctcgaaggtaaatcgttttttttccttctcgattctgggtttgattgttgttctaagattgcggagaaagatgagacaatagtaggtcaattttgttggattgtaatattaattgttgaaaaaatccattgtctgtattgttgcttggctttgtttgattctaaagtctgctttgatcgatgaaaactatttattgttaaagagtagaattgacttttggtcatagaatcgatttagagactaaatgtgttttgatgataacaacttaggagggtagagttttgtggccgttgtttgaacaatgactcagtcacacacacgccatacgttgttgttaatcctatattgaatgttctctcgtggttttggctattccttgtttgtagttcatggggttgagtatggatacggggcacacgagaaatcgagctcggggatttttgaggtggagccaaagaagtgtcctggtttcacattcaggaaatcgattcttgttggtgaaacagagatgaaggctaaagaagttcgaagctttatggagaaattatcagaagagtatcagggtaacaagtaccatctcatcacaaggaactgcaaccatttctgcaaccatgtttctttgaaacttactcacaaatcaatccctagttgggtcaaccgtcttgctcgcttaggtaacccaaaacttcctctacaatagaatctttcaggggatcaaataagtaatgttgtacattggtttcttttgaaccttcttaaggtttcctctgcaactgtgtcttgccggcttgcttgaacgagactaaagtgaagcgggtaggaaaagacgggaagctgctcttggaaggagaaaatacgaagaagaagaagaggaagaagaaaatacgaagaagccgatcaggtcctttatcttcgtcttcttcaaatgcaagattagataatactcctacacataacagatcaatatcaacgggtaatcctcctctttctgcttctccatcttgtcctttgagacctcgacttccttctgttgcatctggagctgaagatcaaaatcctccaagcgtaagcgtcaagacatgattatttttcattgtttgaacagctgctagttatatacttgtttatgaatgcgaaggtggtgcttgtgctttgttctcaagttatatatcctccattcgtttggttatacttggtataatttacttataggagaatcatgaatctctctctgtagatactaactgtagagtgaattcaacatttgtttgttatgttttgatgtaaaattttgaaaattgtacgaattacttgtttgaatatcaacaaatcgaagtaaaatagctaaatattttggaaacaacaagtgttttattttaaatttctaattaattcttaagcaataagtcccaaattttcacaaatagagtttttattaaaagaaaaaaaattgatgagcgtaaaaataaaaaaataatgaattttattttattttattacagaaccaggaagtggcataaaccctagtttgaccttttcagaacacaactcactataaatacctatcaaaggacactcttccgcagctacaacgaattcccctggaaccctaattcaccgttcctgtgaaaagctcgcatacataagatctgttctatttctcgctttttgtttctagatttcagtctttgctatttcattatcgttctggtttttatatttgttgaaatctgttatgtaattgaaactgttggctctgccattttgattgaagtgggattccttaggctttgattttggttagttctcagatttaggtttaaaggttcttgttttttgatttgaagcgttatagcaatcccaatgatgacttattaagattaaaaatgttaaaagtagtgactgatatcttttgatgaaattttagctctgagggatttgatttgttctttgtttccttcttacattccgttgttggacatccattgtgggttaatttggtgagtttttgcttttgcttgcttgatgaagcatattgatgcacacgaccttagctgcatcccaatgatgaatgatatgaaaaaaatgttaaaagtagtgactgattataccttgattactagtcaattctgagggattctatcagctaagctaaattcaatccttttgcgccatctctttgtttacttaactctctatgtgcccttcgatgattaataatatattaatggttaaaagtagtctgatatcttattgatgaatatttcaaatccgagggcttaacttatttcttataaaagttgtgactgatagcttgtgcacaatcttgttttcattcttggtatcatctaagagatacctcaacgccagcttctgcagtgaagtgcaatgtcgtaagtacgattccacccggcagaagaaatctctctcgattgcacttcatctgcagaagctggcttttttaggcagtgggagtgatttttttggcagaatatctccattgtattatgctcttttgttttccctggtgtgcttgaccatgatgaattcgctagtggttcacaattttgatagaatagttggattaaatggataacacagcgacaccatctattaatgatacaaccaactaaaaatgttattgtccaacctcaccaccaaatcatctttcgaaagctttcctttgtcttgttaaaatcaactatttaaagatgaagtatacaaagcttagcagtacttgttggacccacgtttgatatttttggggttgagatgtctgcaagcgtctttcttaaagtccaaaagaatgtgtgtgaaacgttgactttctgcaaggtttaccactgtttgtgcgcttagcttcgtttggagaatcttcttcttctctttctttgtagaccggctttgctttgcatatgagaggatg

SEQ ID NO: 22492 - DNA, 3003 bp, Unknown; identical to SEQ ID NO: 22491
  misc_feature (1)..( 3003): 2750-1469P.txt file - cDNA_ID_2105406; gDNA_ID_2926201; Annot_ID_201849

SEQ ID NO: 22493 - DNA, 3003 bp, Unknown
  misc_feature (1)..( 3003): 2750-1469P.txt file - cDNA_ID_2105410; gDNA_ID_1621200; Annot_ID_174856
gttgaagtagcgatcctggagcttgacgcagccattagaccttctctcgatggagaacaagaaattgcgagccacattgagattgcgagctcgaccgaggaactctaacatgaggaagaaagactgctctttgtgagaaaaccccttgttggaaacccagtcaaagaaccggagaccatccgcagggaccttgatgagacgcagggtttggagaacggtggttctggagatggtttgggacggatgaagagatgatagtgaagactcgagttcgtccgaccacgggttagagttcacggcacgggccaaggacctggcgagttttgatttggtggacctttcttcattggtaactttggcggctcggagaactggttgagacttggagacaaacaaagcatggagtttaggtacagaagataccattgcagaagaaagttgccgcgaaatatggcggcacacgtccgccgctcctccaccccttccggcggaccaagagaacaaaccctttcttcttcattctataactctctaaggcccaatctaaatgggctcctctttgttctagataactttactttaggcccaattatagaggtggccccgacacaatattttgttttgttttaaactttaaaaaaaaaaggagaagaagcaacagcatataattaagtcctagctattaatcatcatccatagcatatcagtaagtttttgaagatagattgtttgattgcatacagattttaaaataatgttaaaccctgaagtaaacttgtaactgcaccaacacaagacgtggtgtatggatgatctactacattccgtttccctttcattgggaatcaatttgcggactagtttaaaacaatcgcatatgcataatacttgcgcagtaattagggaagaaaggaggtgggggtaatgagtgagaaagtgcaataagtgggtatctctcaaattaagagagagatgttgacaaggcaacaagtttggtgtaacattatcctcctccttttattttgcctttttctctatttttatatatatgcacagtcttttttactcttaataaaatacactgttaattcctcggataccaacggaatcggttgaataaattatggatgttacagtatacacactatgtagggacttcttaatttattttggtatagttagaaagatagcttatcgttagagcgattgagagcttttcattataattaggagttagtttactttaattgtgataactgccttagtagatacataagtacactatcaattgactactttgagtgaattaaaaaagcctcctaacagcgtactatatgtacatcagaataagttgtagtaggagcagcattcctattttcaatattgtacactgtattaaaacaaaaacaaaaaagtagaagacaggattatgcatataaatatatatcccagaaccaaatatgaaaatagaaaatttggttttcgggtttataatttgttttagaaaaaaaaaaaagagagagagagaggggcaaggataatagagacaggagtccgtacggtttcgggggtcaacgtcgatggcagcctttgagcacctaaaaataggggacccacgccattaccaattacaaaacctcactctctcgtctatgctcagctaaccctactctcttccctgtgctgccacgtgatcaccatccgattaatcgggaccgttcgattaagtagagatagcagcgcgtgaggtagagaaagaagagagagagagagttggcgaataatagtaatttgttgtttgggggtgagtgggtgtacgttagcaagatacgatcggtcattctgtcttccctaaaacgatcaacctccaacttgctacctatttacacttttgccatcctgtctttcgaaaccccaacaccgtttttgcctcttatctctctctcttttttggccttttcctccttttttttttgtggttaattgaaatagatattttatttctctctattcttaaaaaaaaccacgtataaacttgtaactgactacgatgatttatctcattctcatatcttatttatcgctagtaaaaaagaaaacaaatgtaagagagaggcccagcaggggaacagaagcgggtcccgacataattaaataagtgtagaacaaacgcgttttttactcttctttttccttaaccacacgatcaccaccaatactagctagacccttttctttctttttttttaaagtcctgcgggggctatatatgtatcatccatatatacaatacgctgttaaaaaataacatagtaagagtctgtctatacatacttgtgtgtttaatttgtttgtcaaacaaaagttcaattagaggctccatcaacagttgctaagtagtgagttacgttttttcgatattcaaattaatcctacgtaggtactactaagattacaaattagaaagctttgaaaaatactagtagtaaaaaggggcagatgattggtaaataataatttaaattgtttttagtaaaaaagggcacagacactcacacacacactgctttcacgacccatgtgagttttctttcttctccatcttcacttttttaagtagctagatgacaagacagacagctatctctcttttttttttacgaagaagaagatcaaaaaaaaaatgaattttaaaaagggacctttaagagagatggtgggagagagagcaatagagagagaaggaaatccacccccacaaatagaaagttagggtttattggaaaaaaagaaagagagtgtgtctctgtgtgtgattctaatagaggtgtagtacgtcgctttgctttcagtccattaaaaccattccataacctattccgcaccgacatgtctcctccccctttcctttattagcctctctctctctttttcactactccgtcttgattttataaacaaaagaaagaaagagagagagatcttcctcgggattgcaacatg

SEQ ID NO: 22494 - DNA, 3000 bp, Unknown; identical to SEQ ID NO: 5536
  misc_feature (1)..( 3000): 2750-1469P.txt file - cDNA_ID_2105426; gDNA_ID_1620800; Annot_ID_168614

SEQ ID NO: 22495 - DNA, 3000 bp, Unknown; identical to SEQ ID NO: 3204
  misc_feature (1)..( 3000): 2750-1469P.txt file - cDNA_ID_2105430; gDNA_ID_1620631; Annot_ID_162696

SEQ ID NO: 22496 - DNA, 3000 bp, Unknown; identical to SEQ ID NO: 3204
  misc_feature (1)..( 3000): 2750-1469P.txt file - cDNA_ID_2105430; gDNA_ID_2926182; Annot_ID_200340

SEQ ID NO: 22497 - DNA, 3000 bp, Unknown; identical to SEQ ID NO: 8745
  misc_feature (1)..( 3000): 2750-1469P.txt file - cDNA_ID_2105435; gDNA_ID_2685559; Annot_ID_193433

SEQ ID NO: 22498 - DNA, 3000 bp, Unknown; identical to SEQ ID NO: 8745
  misc_feature (1)..( 3000): 2750-1469P.txt file - cDNA_ID_2105435; gDNA_ID_2685559; Annot_ID_138161

SEQ ID NO: 22499 - DNA, 3000 bp, Unknown; identical to SEQ ID NO: 8745
  misc_feature (1)..( 3000): 2750-1469P.txt file - cDNA_ID_2105435; gDNA_ID_1971872; Annot_ID_176616

SEQ ID NO: 22500 - DNA, 3003 bp, Unknown
  misc_feature (1)..( 3003): 2750-1469P.txt file - cDNA_ID_2105496; gDNA_ID_1620489; Annot_ID_158556
tatataactatttttttcagcaattgtgcttcttcctcctttttattaatagcgatacaatcttccgtctttgtgcgttacgattcccaaagaaccacaccctcatttcctcagagtctggtctcttacagcgacttctctttttctttcttttttggatttcctctttctgcttccaccatggagaagaacaaacaaagaaaaactcagtgttgtttctttccaaatttgaacactttgtaatctagtgatatcactttatcttactccaatttcaccggttaggtttggtcattaaaaatgatcaaaccaaaaaagaaaatgtataagtaatcaccagttcaccacttggcttaattcatccaaaaataaaatttcaaattggctatatatcaagttaagaaaaataaagctagacgaaaaaggtaggatatatatgcgttattgtattgatttctataactacgagggtagattatgtgttataatattagtaatgatgctaagttttttaaaatggagtagcaaaaaaaaaaaacatgtttattttttctctttcgcgagaggatctaaaaagtctacaaaaaagtgattacaaggcatgggaagctgcagtgaagaaaagtgaagaagtctcttgtttggtccgaaagtgttagtgttatggaaaactctttaatgagtttttcactttatttttctttctcttttgtttttgaggggaagaatattacacatatgaaattgacttcgagggttttcattttcttggattattgcaggtacaaacgtatttccagtatccatgcatagacgcataatgccgtattgtagctacatacacgagaagtagacagtagactcatttaacaaaaaaccaaatagactcaatcaattatatgttttgatgaatattttaacattcaacgattaatatatccactaatgaacattcttttttttccaacatccactgatcaacattttgttcgacgataagcatttttctataaaaaggaattccttagctcaggtttatgagcatgcagggtaattgaatcatcgtgagtggggacagtgaaagaacagttttttttttttttcaagtaaagaacaatttagccaatttcagatgattttttttactagattaaattaatttaacacattttacttagaggcatgtgatcccactcgtcttaaattacagtacaagtcctagtaaaaccgaacatttttgaaatccaaagagtataagaattgggacagaataaaacatatatataaccaaaaacctgtaattagttggaacatcagtcatgttccctgctaggattgggtaaattttgtctgtaattagtaaaaataaatctccgttgccgggactcgaacccgggtctctcgggtgagagccgagtatcctgaccagctagactacaacggatttgtaataaataatattaattagtcaatatgttagtaacaccaaattttttgaaaaaaaaaagaaagaaaagaaaacattaaacaagagaagatataacatccaaatcgtaaaggaaaacaacattcttctcaaaatcggttgtctaaacttggggatttggactaattcatacctggccccgagcccccgacttacctgaggatggtaattgtgggtttggaaccttaaagccctaagttattttattgggtcattggcaaaggtgcagaatccatcttagtgggcttatacgagccaaaaatatgggccgctacaaacatctggttatgttattttagaccaaaaatatatacatataccaaacatgttggatataaaaacttatgagataaatgatttcagagattttagtatgtaattgcctatttggtattcattatgaaatcaaaaaaattaggttatttttgttgaaactagtttatttctaacatccttcagatttctttctagtttaacgtttgataatttacgttgagatttaaatgtaattatcaaattaactaaagatataacctccaatcaagttagattttaaaatttacaagtttagtatattataaacaaaaattcaaaattttaactacatttatatgtataaaatctgtaattgcagaatagacataagagtcttgaaactggtgatatagtgtttgctaataccaaacctaaccaaatcaacatatattctaatctccagattagtgtttggagccgattgcttactaaaattagactattaatcgtatactccctttgttccatgaaatttgatgttttagattttatttttgtttcataaagattgatgttgtaggttaataatattattatttttgttaataaccaatagagagaggagagaaataagacttatattattaaattaacagaaaataatataaataatataaaaattacttttctttgtgtgaaaaacccaaaacatcactcttttaggaacagagggagtataaaataagaatccaaaaacaaaataaacaataattcgatattaggaaaaatgaaaaaaaaagaaaaactaagaaaacaacaattaccaaccgcaagtcaagaatcaagatcaatagcgtgagacggacctaaacacattaaaccaatacataaccggggtcttaaccggacaatctattataatctccttatcttccctaatagaaccgtaattacgaaaaaggacagtcacaaaactccaatctctctctctcctctccgtctctgcgcgcatgatcccccccatagtgttccactacgcaccgcccgtgactctctaatggtctgtgacttgtaatccatctctccttatttttatttcaattttatttctttccaaaattttaattaatttccacacacacacacacctatacatatatatacacacacattcgtctctaatggcttcttcgaaactccatcatcatcctcaccgcagaaaatccccaatacgttgcttctgtctcttaatcataaccatg

SEQ ID NO: 22501 - DNA, 3000 bp, Unknown; identical to SEQ ID NO: 2851
  misc_feature (1)..( 3000): 2750-1469P.txt file - cDNA_ID_2105500; gDNA_ID_1620609; Annot_ID_161854

SEQ ID NO: 22502 - DNA, 3003 bp, Unknown
  misc_feature (1)..( 3003): 2750-1469P.txt file - cDNA_ID_2105518; gDNA_ID_1621091; Annot_ID_170722
gccattagaagccctgaagaaaatgaagaatacaaacaatttcgttttttccattgaaatattttgctattttcgtgctgagtcttatcatacattaaagtacgtatatgtttttcctctttcagtcactattttggaagaacgcaaaacaaactccacttttcttgcagttgtttcctctataaagtaagtaatttaccactgtactaatcttttcggggtcagtcatgatctaaactagatggatcaacacaacaaaaaattacctttgatatatcaaaattcgtagaacattgaccatattcattatgctatttatcaccacatcacatgataataaacaaacaaacatcctagatagtcttaagataaattttacatagtaaactaaacggaacacgtcaatgatttgacgtgacgcaggggtgattaacggagaaataaacggagttggtttaactatctacagtcaaacaaagactgaaagacattaatgccccttctttctctttcttttttggtatctttttttctttcttcttttgcttttaaagcagagaaggcataataaaggaccaaaacgcagcgttttcttccggagatcagtcggtcggaaagcggctacctttttgtctgcctagagaatttgttcgtttctttcttttactctcttcagacaaaacccacgagatacagaaaaagaggacaagagagaatcgtccatggaagaagacactggtatcgacgaagctaagacatacacggtggagaagagcgagaaagtggagccggagaaggacggactgagtcaattcagagacgaggaaaaatcacttggtgcggatatggaagatttacatgatgagactgtgcgagaaaccctaggcaaggatcaggttcaaggtaacggtttattctgcgcaaaattctttattggtttttatttatttattcgagactttattttttgacgaaatgatgtttgagtttaccaggtgttcgagaaaattcctctgtggaaccaaatgttgaagatgtattagaagtgaatgtgagtttgcttcagactcttctgctattcataaactttcttaacacttacaactttgattctctcattaacattgattgtgctagaacttgtaaagtttaactcatttcagtgtcttcgatgttactcgttcagtgattatacaataacatgggaataggattaatcgtaatggttttaacctttggccaagttcaatctgtatctgtatcagtttgatctgttacattttagtgtgtctgatttcttaggcaattctgaggacaagaatcactgttatcaaggcatgacatttaactgctttttgtatcacattggcaggagactgatagcgtcaaggaaactgttgtaagtgcgattgtgccggttgatgaagtggaagagaatcgtcaggtagaaacatctccttctctggctgcatcgtcagactcattgacagtgacgccatgtctatctttggatcctgcaactgcttcaaccgcacaagatttaccactggtttcagttccaactaaacaagagcaaagatcagattcgccggtggttaacagattgtcggttactcctgttcctaggacaccggctcgtgatggttataattggagaaaatatggacagaagcaggttaagagtcccaagggctcacggagttactacaggtgtacatacactgaatgttgtgctaaaaaaattgaatgctccaatgattcaggcaatgtggtagagattgttaacaaaggtttacatactcatgaacctccccggaagactagcttctccccgagagagattagagttacaacagctatccggcctgtttcagaggatgatacagtagtagaagagctatcaattgttcctagcggttcagatccgtctgcttctactaaagaatacatctgtgagtcgcaaacactcgttgaccggaaaagacactgtgagaacgaagctgtggaggaaccagagccaaaacgaaggcaagtttgtagaattttgcatttcggtgcttactcttcactttgaaagatgaaattaatagactttcttctctctatttttcagactgaaaaaagataactcacagagttcagattctgtctccaaacctggaaagaaaaacaaattcgtagtacacgcagctggtgatgttggtatctgtggtgatggatacaggtggcgtaaatacgggcagaaaatggtgaaaggaaatcctcatccaaggtctagaaaactaaacgcatgacccatctctttatccacatatgacatcttctaatacgcatggtgattgatttgttctgtttcaaacattcaggaactactaccgatgcacttcagcgggatgtccagttcgtaaacacattgagacagcagtcgagaacacaaaagcagtaataatcacatacaaaggagtacacaaccacgacatgccggtgcctaagaaacgccatggtcctccaagctcaatgctcgtagctgcagccgctccaacatcaatgagaaccaggacagacgatcaggtgaacattccgacttcaagccagtgctcggtggggcgagaaagtgagaagcagagtaaagaagcattggacgttggtggagagaaagtgatggaatcagctaggactttgttgagcattggattcgaaatcaagcaatgctgattatatgtagtttatgagttttatagagttcatcgactcaattttcgcctccttgttcttgttatataataataataaaaaaccccatgaagattaccaactaaatacgttaacattcgtctgtgtaatgatggtatatgtttattgtgatattaaatcgctaattttagtgaatagcctctggttcgtctagagggtcttctgaaacttgaaagggactaaaagacgagaacaaaaaccctttctctctactctgtgtaaaccctagtgtgttcgtgctctccgatg

SEQ ID NO: 22503 - DNA, 3000 bp, Unknown
  misc_feature (1)..( 3000): 2750-1469P.txt file - cDNA_ID_2105518; gDNA_ID_2926199; Annot_ID_201685
attagaagccctgaagaaaatgaagaatacaaacaatttcgttttttccattgaaatattttgctattttcgtgctgagtcttatcatacattaaagtacgtatatgtttttcctctttcagtcactattttggaagaacgcaaaacaaactccacttttcttgcagttgtttcctctataaagtaagtaatttaccactgtactaatcttttcggggtcagtcatgatctaaactagatggatcaacacaacaaaaaattacctttgatatatcaaaattcgtagaacattgaccatattcattatgctatttatcaccacatcacatgataataaacaaacaaacatcctagatagtcttaagataaattttacatagtaaactaaacggaacacgtcaatgatttgacgtgacgcaggggtgattaacggagaaataaacggagttggtttaactatctacagtcaaacaaagactgaaagacattaatgccccttctttctctttcttttttggtatctttttttctttcttcttttgcttttaaagcagagaaggcataataaaggaccaaaacgcagcgttttcttccggagatcagtcggtcggaaagcggctacctttttgtctgcctagagaatttgttcgtttctttcttttactctcttcagacaaaacccacgagatacagaaaaagaggacaagagagaatcgtccatggaagaagacactggtatcgacgaagctaagacatacacggtggagaagagcgagaaagtggagccggagaaggacggactgagtcaattcagagacgaggaaaaatcacttggtgcggatatggaagatttacatgatgagactgtgcgagaaaccctaggcaaggatcaggttcaaggtaacggtttattctgcgcaaaattctttattggtttttatttatttattcgagactttattttttgacgaaatgatgtttgagtttaccaggtgttcgagaaaattcctctgtggaaccaaatgttgaagatgtattagaagtgaatgtgagtttgcttcagactcttctgctattcataaactttcttaacacttacaactttgattctctcattaacattgattgtgctagaacttgtaaagtttaactcatttcagtgtcttcgatgttactcgttcagtgattatacaataacatgggaataggattaatcgtaatggttttaacctttggccaagttcaatctgtatctgtatcagtttgatctgttacattttagtgtgtctgatttcttaggcaattctgaggacaagaatcactgttatcaaggcatgacatttaactgctttttgtatcacattggcaggagactgatagcgtcaaggaaactgttgtaagtgcgattgtgccggttgatgaagtggaagagaatcgtcaggtagaaacatctccttctctggctgcatcgtcagactcattgacagtgacgccatgtctatctttggatcctgcaactgcttcaaccgcacaagatttaccactggtttcagttccaactaaacaagagcaaagatcagattcgccggtggttaacagattgtcggttactcctgttcctaggacaccggctcgtgatggttataattggagaaaatatggacagaagcaggttaagagtcccaagggctcacggagttactacaggtgtacatacactgaatgttgtgctaaaaaaattgaatgctccaatgattcaggcaatgtggtagagattgttaacaaaggtttacatactcatgaacctccccggaagactagcttctccccgagagagattagagttacaacagctatccggcctgtttcagaggatgatacagtagtagaagagctatcaattgttcctagcggttcagatccgtctgcttctactaaagaatacatctgtgagtcgcaaacactcgttgaccggaaaagacactgtgagaacgaagctgtggaggaaccagagccaaaacgaaggcaagtttgtagaattttgcatttcggtgcttactcttcactttgaaagatgaaattaatagactttcttctctctatttttcagactgaaaaaagataactcacagagttcagattctgtctccaaacctggaaagaaaaacaaattcgtagtacacgcagctggtgatgttggtatctgtggtgatggatacaggtggcgtaaatacgggcagaaaatggtgaaaggaaatcctcatccaaggtctagaaaactaaacgcatgacccatctctttatccacatatgacatcttctaatacgcatggtgattgatttgttctgtttcaaacattcaggaactactaccgatgcacttcagcgggatgtccagttcgtaaacacattgagacagcagtcgagaacacaaaagcagtaataatcacatacaaaggagtacacaaccacgacatgccggtgcctaagaaacgccatggtcctccaagctcaatgctcgtagctgcagccgctccaacatcaatgagaaccaggacagacgatcaggtgaacattccgacttcaagccagtgctcggtggggcgagaaagtgagaagcagagtaaagaagcattggacgttggtggagagaaagtgatggaatcagctaggactttgttgagcattggattcgaaatcaagcaatgctgattatatgtagtttatgagttttatagagttcatcgactcaattttcgcctccttgttcttgttatataataataataaaaaaccccatgaagattaccaactaaatacgttaacattcgtctgtgtaatgatggtatatgtttattgtgatattaaatcgctaattttagtgaatagcctctggttcgtctagagggtcttctgaaacttgaaagggactaaaagacgagaacaaaaaccctttctctctactctgtgtaaaccctagtgtgttcgtgctctccgatg

SEQ ID NO: 22504 - DNA, 3000 bp, Unknown; identical to SEQ ID NO: 8106
  misc_feature (1)..( 3000): 2750-1469P.txt file - cDNA_ID_2105522; gDNA_ID_1621193; Annot_ID_174646

SEQ ID NO: 22505 - DNA, 3000 bp, Unknown
  misc_feature (1)..( 3000): 2750-1469P.txt file - cDNA_ID_2105526; gDNA_ID_1621159; Annot_ID_173656
ttgagacagagctgtatagcgagcgagaacgactaaggggccgtgaacgcggggaaatggatctagcaggtgacacactgcattgcatttagaagtcagttaatttcataaataagttacaataaaaatcccttatatgtcttaggtttatgaaaaaaaaaaaaaaaaaaagacctcctgctcttgctactatagctacagcttggaccacggctccgactcctgcttctatagcttttagaatcatctgggcttcgactcacactcctcgactcatattccctcacctgaacagtaaattcagagatgactccatatccacttatgcttaacaaaatcaaagaaagcaatacaacatacccgtatataagcactagagaaagcatttcgaaattcagtggcatcaagtttccttatctgtcacatcaaaaattttaagggaacatcaaagatccaacactggcctccaggaagataaattcagctcggtatactatgaaacaaaagcagtctaaggcataagtccaggaacatttgcgttgcaaagatataaaacttactgcgtacttcatatcatcatagttgctataatccacaaccccagacatgcctacaaagaaatactgaatgtgagtttagcagttcagatgcttaacacctattctccttcacaaagactaatttactaacacatcaatcaaaagcttatccaaactatcgaatgtcaactcacctttacggtcagggaaaacttcagagaagcagacatctccagctttgcgcatgtgatcctaatcacccgtaaatagcaaataacatcatttcagaaaagagataaatccaaaacatgatatagagaaccaacattcagagaaaaagactatatagtgtcccttaccttaaggtcctgccacgaagcagaaggcggtaatccggtcacaagcactacatgtttaggtagtaaaaatgagttttcaaatataaaattttacacaacaccaaataacacaatcgagaagactctacaaaccgcggtagtcagagcgtcttgaaggtgcacggctcgcactgtagctgctgctgtacctatcaactgatggtgaaaatctacgaccaccatgtgcaatctcaacctaaaaacatcacacaaagataacacctttacaagaaattacagaaaattaagctagctttcatcatgcgtttactaacccgaagtcgacacccatcaaaatcataaccatcacgtccataaattgcatcgtctgcatcacgaggatcttcaaactgccaccaataacaaactatcttagtcattagcctatactattacaagaagaagaaaaaaacaaatttgtacttgatcaatatacctcgacaaaggcataaccaggaggtctcggtggaatcttcaaatcaatgtccacaattggtccatactgaaacaaatatacataagagtcgatttaaattgtctcagcaagacagaattgcaaatttatgaacccaaacaagtcataatgaattcaatttttatcgagagaaaagaggaattttcaaaccttgtagaagagatcttcaacctcacacttgcgaatatctccaggcaaattcccaacgtagatcgtacgattccatcggctactcatctgatacctcagagcagaaaattagttcctgtaaaaatctagaagagaagaaattgattactggaaaaataatttcgagaaagaagaagaagaagatgttcgagaaagcgttagattgttctggaaaggagacaaccaccgttcgtttggaaactagtatccttttataaaacggaactggattttaatcctgtgcggccgcatgtatcaacgatgaatagcccagttgatcaagatcggcccatatgttttaatgggcctgttaatatattgttctaaccggatcgaatgtgttttttcttatcattcaaaccggaatattgtatgttagttattacaattcgaaccaatttcgaatcggattcggaccatcgggtcattcattctcctaggtttcctaaacactgtcgtttttggacaaaagagacactagatcggaaacacttggggatttttttgagagaaacattctctcggttcctctactaccacctctcaaatctcaattcgccgattagtaactccgtccaagaccattttccgccgtgacaccgtccacggtctctctcagtccgtgagttcctgctctgttccgtttggtttttctgttttggaatttcagtatttttcctattgaatttgttgcgatatgatgtccaaatttttggtttgttgagtgatgttccgatatttccgttatcaatcatcttccactgttcgcttgcagggaagaagataccatagttagaagctggtgatcattttcaataaacctcgaacatgtttaagaagtaagcatctttgtctctttctagattctttctctacttttttatttagatagaaactgtttttcatacccggattgtagaatctaagaattagtggtttcaacatctcggcattgtttatactagttgataaagaatgtgatggtctctttatttagtatccacttactctaataactatcgagaactcactcccttctacttgttgtcgaccacattgttaatttgattgcttagagtagccttggtatgggcatattggttgttatattttcttcaaagtagaaggttttgagttctcaaaagctaacatcttgctattgtaaagttttggtttctatattgatagtgtcactatttgatttatcaaatctgtacaaagagtcgtgggtcatagaggaaagtttgtgtcttgatttgaccagtctaaactctctactatcatggagtttgtgtttatccatctcctgaaacatgcttatacattcatagtgaatcttgtataaagtttatttttccctactgctatcaactttagatctatttgatataccattatg

SEQ ID NO: 22506 - DNA, 3000 bp, Unknown; identical to SEQ ID NO: 1733
  misc_feature (1)..( 3000): 2750-1469P.txt file - cDNA_ID_2105558; gDNA_ID_1620441; Annot_ID_157180

SEQ ID NO: 22507 - DNA, 3003 bp, Unknown
  misc_feature (1)..( 3003): 2750-1469P.txt file - cDNA_ID_2105578; gDNA_ID_1620578; Annot_ID_161053
gcgacggcggttgtgtcttcttcatctttcttcttgttcttctctaaagtcaaagctctgcttaagtgtctctctagttgctcgtctaagctttttagatcaatctgatctgctcgaacaaacccatcctttccttctttcattgtcaagcaaaagatcctatgaatctttttttggtcttctataagttgttgttgattttgtttcaacaagtttcttctctctctctctcagataatcaaacgcagaggaaaatgggaaaagaaaatcataaaaagggaagatgagaagagaagagaagaccgcatgtgagtgagcacatggtcttgcctcgacgctaatgtatctgtatttacatttctttttttcctttcataaaataaatacttttttgttttgtatttccaaaaacaataatcatcacttattatcaaaataagtgttggtaccaaccattttattgacgagaatagtgagtgcaaaagtttggcccattactctggatgttcggcccatcaaagatttgagctccctcgtaaacctaaatacaaaaatattagtatgtgaatttcgacatctacatttttgacgtcgtatgtggagtttatcatacttctgattttggtctttccaacttggtttcacatactatggataaactactaatataaattgatgttacgaagttaaaagatattaggaagaactaagccgatctttctcatcttgatttgatattgacatgaagatatcggttgtggcatgtctaaacaattggacatgcttgttacaactcagtgtgtgtttgaagtacgctttgatgctatgaactcgaccaactcccgagttatactatgtaaaatattgttctattgtcagcatatagagtataatgataagtggatccaatcatgtctcttgacttttttattttttataaattgaaccaaatctattttcacatacgcttacacgtatgggatacatatgataatcaattgatttgaagattgaggaatggaacttagagtggtggttaagtgtattggttgctttaaattgcacgaagcgtggatgattttgttggcgtatccacgtaccaaatggctccatgcattgtctgttgtccctaccaaaaccttcactattcttcttgagatcaatattaaatatatatattctctcaaataaagcatatacacaatggtgctcttcttcttttctctttttttttttattttaaatgtattgtataatcgcatgttcgttacatattaaccaaatcaaattaaaaggtcaaatataaaacaaaagctagaatttctatgccgaaaatatgggaaatgaataccttttgaaatttgggagtggccattagaagctcctcaattttattttattttcgcctttaaggtgtacaaatttctttttaatttaaaatttaaaaataattaacatgatcagctcttcctcaactataactctaattccgtgtacttaaatagttaaattatactataaacccacttagttgctttatctaagaattaaagaatgtgaactcatctcccatgcgtgttttcctttactcagaaggaaattaaatttcaatattctctgaaacccattacaaaacacggtcatgctagaagacttgaagtcgtgatatgtagcatttttaatgcgttttgtgaatatatgtaaactatatagatgttatataagtactctcggtccaacattttggagcacattatactatgatcttgatattcagccagtttattatgtcatatttttcgagaacatttgttgaattgaagaacataaaagatagcaaatcaacatctcatatatgtgtctttatcaaaaaaaaacatctcatatatgtgtattttttttaaccacgcaaaatgagaagagtgttattttatgtgtataaaaatggtggacctaggatatgatgattgctttagagacacacagaaagagagaaacggtggagggtttgttttgggcccctgacaccattaaagccagtaaggattaagtgtatccacttttaattaatcctaatttatatactatacggattagtaatattatcctaatggtttttgtataacttaaatatttggcgtggtaatattaaatgttactctgcttgtatgattgtgagcaaccagatctctcttatctgtacatcaaagatttggttcaggttactaaatcatgggtcttctacatctatcactattgaatatagtttcagatgtctttgattgtcaatgaaaaatatcttgggtataattattactagtcagtgccattttctgacaagagagaacgtgtctgtttcttctgggggattaattaggtttagataattttggtatcaagttttatgattgataatatacgattaagtcattggctaactagctaaaaaaactttttttggctaacttggtaatttttggtgatgcaggttgttcatttgggtttctgtatagaaattatctccttttttgtccttcgaaacttatcttacagtatctaatattgaatttatattttcataatataaattattgtggattggtcataaattatgatctcaataataatgttcttatgttatcattatttgtttgtatttttataagtcagtgagtatgacttgtaccgttcctacttctatagtgaaaacggaagtcttataatgataatgaagcttgtttttttttcttaacactttagtatatatagaaaaatatacatattttggaagagattataataaagaaaagatgaagagcaatcaattgtcttgtaggattttcctttcttcttgttatatttatcgtcacatatttcatcgttttttcactataagtgcaatagatacattttccacgaaagtgttttggagatccatatgaaaatagaccaaccagaatgggaagacaaaacataatgtgaaacccaaagaagatggaaatg

SEQ ID NO: 22508 - DNA, 3000 bp, Unknown; identical to SEQ ID NO: 1978
  misc_feature (1)..( 3000): 2750-1469P.txt file - cDNA_ID_2105586; gDNA_ID_1620474; Annot_ID_158122

SEQ ID NO: 22509 - DNA, 3003 bp, Unknown
  misc_feature (1)..( 3003): 2750-1469P.txt file - cDNA_ID_2105598; gDNA_ID_1620471; Annot_ID_158007
catcaagagccattgaacactcctgtgtctctgctttcagcaacagaggacgtgactaggacgtttgctcctggtggtgaagatgactatctcggtggtcaacggaaagtcaacgtcgagacgccaaaacgtttggaggaagatccggctgctccaggaggaggatcggattatctcagtggtgtatctaattatcagtccaaagttactgatcccacgcataaaggtaatgactttggccgagactttttttagggtttatgaatctgtaataactcttgtctgttctgtttaaggtggagaagctggagtaccagagattgctgagtctcttggtagaatgaaagtgactgatgagtctcctgatcagaaatcaagacaaggacgcgaagaagactttccgacgagaagccatgagtttgatctgaagaaggaatctgatatcaacaagaattctccggcaagatttggaggggaatcaaaagctgggatggaggaagattttccgacaagaggtgatgtgaaagtagagagtggattgggaagagacttaccgacgggaactcatgatcagttctcaccagaactatctcgtcccaaagagagagatgattctgaggaaaccaaagatgagtcgacacatgagacaaaaccaagcacctacacagagcagttagcttcagctacatcagccataactaacaaagctatagccgcaaagaacgtcgttgcctcaaagctaggttacaccggagagaatggcggcgggcaaagcgagagccctgtaaaagatgaaactccgagatctgttactgcttacgggcagaaagtggcgggaactgttgctgagaagttgactccggtttacgaaaaagtcaaagaaacaggatcaacggtgatgacaaagctacctctctccggaggtggaagtggagtgaaggagacgcaacaaggggaagagaaaggtgtgacggctaaaaattatatatcagagaagctgaaacctggagaagaggacaaagctttatcggaaatgatagctgagaaacttcattttggaggaggaggagagaagaagacaacggctacaaaggaggtggaagtgacggttgagaagataccttccgaccagatagcggaggggaaaggacatggtgaggcggttgcagaggaaggaaaaggtggagaaggaatggtggggaaagttaaaggagcggtcacttcttggctcggtggtaaaccgaagtcgccacggtccgttgaagagtctccacaatcacttggcaccaccgttggtaaaactccctcgtccttgtgttacacgtaatgttaagattttgatgtgtgtattatttttgtaattttactcaaaatgttttggttgctatggtagggactatggggttttcggattccggtggaagtgagttgggaggcagtggcggaggtaagggagttcaagattctgggaactgaagatttggggttttgcttttgaatgtttgtgtttttgtatgatgcctctgtttgtgaactttgatgtattttatctttgtgtgaaaaagagattgggttaataaaatatttgcttttttggataagaaactcttttagcggcccattaataaaggttacaaatgcaaaatcatgttagcgtcagatatttaattattcgaagatgattgtgatagatttaaaattatcctagtcaaaaagaaagagtaggttgagcagaaacagtgacatctgttgtttgtaccatacaaattagtttagattattggttaacatgttaaatggctatgcatgtgacatttagaccttatcggaattaatttgtagaattattaattaagatgttgattagttcaaacaaaaattttatattaaaaaatgtaaacgaatattttgtatgttcagtgaaagtaaaacaaattaaattaacaagaaacttatagaagaaaatttttactatttaagagaaagaaaaaaatctatcatttaatctgagtcctaaaaactgttatacttaacagttaacgcatgatttgatggaggagccatagatgcaattcaatcaaactgaaatttctgcaagaatctcaaacacggagatctcaaagtttgaaagaaaatttatttcttcgactcaaaacaaacttacgaaatttaggtagaacttatatacattatattgtaattttttgtaacaaaatgtttttattattattatagaattttactggttaaattaaaaatgaatagaaaaggtgaattaagaggagagaggaggtaaacattttcttctattttttcatattttcaggataaattattgtaaaagtttacaagatttccatttgactagtgtaaatgaggaatattctctagtaagatcattatttcatctacttcttttatcttctaccagtagaggaataaacaatatttagctcctttgtaaatacaaattaattttcgttcttgacatcattcaattttaattttacgtataaaataaaagatcatacctattagaacgattaaggagaaatacaattcgaatgagaaggatgtgccgtttgttataataaacagccacacgacgtaaacgtaaaatgaccacatgatgggccaatagacatggaccgactactaataatagtaagttacattttaggatggaataaatatcataccgacatcagtttgaaagaaaagggaaaaaaagaaaaaataaataaaagatatactaccgacatgagttccaaaaagcaaaaaaaaagatcaagccgacacagacacgcgtagagagcaaaatgactttgacgtcacaccacgaaaacagacgcttcatacgtgtccctttatctctctcagtctctctataaacttagtgagaccctcctctgttttactcacaaatatgcaaactagaaaacaatcatcaggaataaagggtttgattacttctattggaaagaaaaaaatctttggaaaatg

SEQ ID NO: 22510 - DNA, 3000 bp, Unknown; identical to SEQ ID NO: 1871
  misc_feature (1)..( 3000): 2750-1469P.txt file - cDNA_ID_2105617; gDNA_ID_1620460; Annot_ID_157745

SEQ ID NO: 22511 - DNA, 3000 bp, Unknown; identical to SEQ ID NO: 7116
  misc_feature (1)..( 3000): 2750-1469P.txt file - cDNA_ID_2105637; gDNA_ID_1621128; Annot_ID_172384

SEQ ID NO: 22512 - DNA, 3003 bp, Unknown
  misc_feature (1)..( 3003): 2750-1469P.txt file - cDNA_ID_2105649; gDNA_ID_1620557; Annot_ID_160484
ctgagctactaactattgaacctcatgtgtcatctctccgctgaattcagaatcagtttactttccctcaccctttcccaatttgcatcctctaggcttcaaagagaaccccttgatcaattttgaggagaaaacgatttgattaatccctcttaatgtttatttctttttatacaatgctaattaactactaactattgagtccaataggggcttttgtacaatctcttctcaatcttaagtttgaaacccttcatcaaaaaaaaaaactgagctacatggttctggactaattactcttctcacctttttttttttttaggattacttctcactcccagaccattattgcaataagagaaaaaaaaaactaattaacaacacatgagtttgaaccaacaacaagatccaattaatgagctattgtttttgtttgggctaatctcaagccgcatgtccgagatttttagatataatagaatggaggtgggagacatatatatatatatataacggtaaatttcgaaacaagatcaaatgaagcttcgtttgcattagagacgattaatgatttcgagtgtttctggcgacatgtgtggtgtgattgcatctaaattaattcgaaataaaaataaaatttggaggagcaaaatatatcacgagcgagactccaacatactaacgatactttaagtctttaccactagaagaaaaggtttagtattttttgtcaaaacaaaagaagaagaagtagatatgtgattaaaaatatattatatcttcaaaagtagtcatagcagttcttcatatcatttcgtgtaaatataaatttctaatcatgtattatgtgtgttaattaactaagtatgacgagttatattattaaagattttgatgatataatatattcttaaccacatataatcttcttctttttttccccacaaaaaaaatccttattcatacttcaggtaattaacactcctgtatctacttatcatttttcttgtagtgaatttagttatatttgaaatggatataatatttatcattctgagtatcccagaaaaacggttagtccattgtcccaataagtatagatttatctaaattaaatggtgaacaatctcgtcgttatatacttgaaataatatttggatcgatgtccttttcatttataacttttactataaataagatcccacctaaaaaaatgaactctttgaaaaatgaaaatcatgtgaaacagcataataagttactaattaacctaaacttgtgcgttcaaataaccataaaagtctagaatagattaaaagttttacaaatgaagttcatgctattgttattttgtcttattagttatgaattattggagtttgttctttttcccaaatcaatccatcaatattattgttttaacaaaatcaagcgctttactattttcacctacttcattatcatattaattataaacattgatctactcttgaaaacgagtaaaattaactatttttgtatagacaatttaatacgtaacgcatgaaactacgaaagacggttcaacctactatcaaaattgtctttgaaaatgtaatagtttcaaataaaaaaatttagtaaatttctagggaaaaaaaaaattatgggtgagttctaaacccctcttctattttaattttatagcacactttccaaccgaactaattttttgaaaaaaaaacatatttgtattccctaagaataacaaccatatatatgtgagaattgaggtcctaaccttcatttaattgtccgtgcatgaccaatttttgtgtagttcatgttggagcctgtatataaacaacttacattttatagtctagtgtaaattatatcttgaagtttaaacttcatccgatatacaagaagtaatttgtcgaccaaatgttaaataaggagagcttatataccttagtttagttaacattcaagcactaattaaaatgttcactatatgaatctaatccgagcttaaccatatagaaaggaaaaaactcctaaaaactaaaaatattatccaaatattagttaagctgtctatttctctttccctcggtttatttttcctctttaaaaagtaagacaaaacgagaacattattagttcaatatatatattttagtgaaataaacgtaatttcaagtaaaattgaaataagcatctacaaattattaaacttgagaggacagtcgtacaaacaaatgttaatgattgagaaacgggcaaacggctaaaaagttttttttttttcttcttcttaaaattgtgaaacgtaaattcagaaagaaaagtggctaaaagtgaaaacggcaattatatttgcgtacaaacgtcgtcacatgaactaattgtctaattttcttggaaacgtaatataattaagcacggacctcgtaatttagtccagttttattgacaaatgaggatataaagtgtaaaacatagaaattaatattgtatatattaaatgtattcacatatataggtatatgtgaaataggtagaatctagacatagaacccttaaaagaaaagagttggcctaaaccgaaatcgacatgcattatttatgaaaaagttattatggtgttggaattgttctgtcaattattttttcgaagagacgaagagcatttttcatttctgtatagtagtacacctacaaagactaatacttttagaaattatattgttacttttctaaaaagattgaaaattcttatatgattcacacgaaacatttatctttattgcctttcccacacacttcccttgttcattctcaagacatcccctctataaatacttgaagtcatcagaatgctaaaaagtcgtgccattagcctttgatttcagaaaaaacacttacaaagctgatatctttcttactacttcgaagaaatcttcttctcccttccaaaaaaacaatccctaaacccggaaccaaagatcgacattcatg

SEQ ID NO: 22513 - DNA, 3000 bp, Unknown; identical to SEQ ID NO: 1768
  misc_feature (1)..( 3000): 2750-1469P.txt file - cDNA_ID_2105664; gDNA_ID_1620446; Annot_ID_157305

SEQ ID NO: 22514 - DNA, 3003 bp, Unknown
  misc_feature (1)..( 3003): 2750-1469P.txt file - cDNA_ID_2105676; gDNA_ID_1620488; Annot_ID_158532
tttccagcatcttccaagacccacaagtccaccaaacccgtttgtttcatcatggtataatcaaaaacagctggttttccaccatactctataaatcccacagactcagaaaatgcagacaccttaagaggtccttggatcatactgaactcttcagaccgaacgtcaaaactgacaacgatatcacgacgcttccaagtggaagccaaataatatataactccattgacgcacaatcctagtctcgtagggagatgaggttgatcgaattcaattcttttccacgaacctcctggttctagtacgaagacccaatgctctgaggttatcctcttaagcctttttgagaatagtgcaacagtgcaaactactttgtattgatcaagaacaggatcgtatccgaaaaagtagaggagactattccagtgggatttttgagcaaggatgttggatttgacagcaggtaaggttacactttgtctggtggtgggattatagatagacgccgttctgcaaacaacgtatagaatcaagccgcgaagaaccaccatgttgcgtcctcccatccctgcaattgtcaaattttgttccaaagactcagcactgctactagacgacagcagtacagactcacatgggtagtggcaaaccatcagtgaattacacaagaggtggtctaccaaactcatgtatagacgaggtggtcgccgtggagttttgaccgtaagataacagttgctaaaaaatcgggaacggataagagaagaccataactttgagacgcacttgaatctcataagagatttagcaggcaatttagtcagaatctcgatcagtagatcgagagggatctccggcgcgaccaaagcgtcttctattcttcttcttctttttcttcctcttctcaacatcacctttgaagacctcgtcttgcatcgaaaggatgaaaacatagctgcagacatacgcatagctacttacttatgtcttaattcgaccaaaatattttgttttctaaaaaggatctgagtaagagaacagaggaagacgatcaaggtagctcacgagtcgcgactatagggtttgaaaattggcgtatttcttcctttccaatctaagtagcccatgggctgattactactttactaaacctttgggctaaaaataattgagcctccattgggacatggacgaatttctgtttccaataagtttatcatgggcttttattttcaataacaagatgcattttatcaaagttgaataacaaatcaataatatgtcggtcacttttctcatcatgaaattttaatccttagaatgtctttttattttgtttttcagaagaagaaaaaaaaaggatgtctttttatagtttttttgattgactataattaattttcccaaatcgaaactaattgactaattgagcactagaagtttagtcaaatgtgaaccattggatatagaagggttgcaaaagctttcctctttctcctagcaagtagagtatttaccgacacttctcgaatttcagcagcggtttttgatgtcacgttgtgcaagaggttgttacattctttccaaagcataaagatcatagccatttggaagacagttcagaatctatagatataagaagggttttgatcatatatatgtaagataaagattaagtccactcaccatctattactccatattccctaacaggcaagatgggacacattttgactataaaggatagaacactaaaagcgatatatagatgtaatgtttaattacttcaaaaatcacaatgataaacgataaaagctaaaagaaaaatattcgttaacgttgccgagggaaaaagccaaaagaaaaataaaaaggagacttcactttgatataagatggatcatctcctagtcaaatttccattatccaaagaagaagttcaaaaagactgaatcaaactaataatacacaaagttgaaacgaaaaaaagtttataaagtcgaaagaagaaaaatgagagaaaaagttcatgagagtggtggaagcacactcgttctactacggacgggtaccgtacggaacatggtacctttattcatatttaaaaaaaaaaacgcatagaaaaagaaaaaaaagaaatagtacaaataagaacaaaaggtctgcgtcacgtgggttgtgttttggcgtgtgttgtaaaatgtgaactgtttatgtggttttcatggacacgtgtcaagtttccaagggagcatcatctcttcaagcatatggccaccactttgtgatgcacatggctgtttctttcttatgttgagagtgtctctgtgacctactcgcttttatttcccatgtattgtatttaattccaacggtcattcacgcctacaaggctattactttaacttacataagtttatactctctaatgacgactcactttcctaacttggatacattttcatgtgttttgagttaggaaaagatcattaacatctctagtttgtctgcaattagattttttgtcaagttaattaaataattaattccctattgtagtaaaagatatagatgatgaggtgtcatgaatcttgcttgacgcatgaagaaaaaatgttgaaaaaggcagtaagaaaaagatgcctaaacaagactgagaatttaatagattaaatatataaaggaaattaataaataaatgaaggatataattgtggtgcgagagagagaggtcggagtgtgttagcttcccatactgccactaacctttagcggttttctcatcttctctactcttctttctcttttctgagaaacccaaaagacaaaaacgaagaagaagattaggaaatcatcttgagaaacaggtttctacatctctgtgtttcaacattttctctgttttttttaagttgttgagctttctggtggtgttttaatggagaattttttctgataatttgtatggtttttaattgtactaggaggtagcaggagaatatg

SEQ ID NO: 22515 - DNA, 10 bp, Unknown
  misc_feature (1)..( 10): 2750-1469P.txt file - cDNA_ID_2105695; gDNA_ID_1620344; Annot_ID_154092
gatcactatg

SEQ ID NO: 22516 - DNA, 3003 bp, Unknown
  misc_feature (1)..( 3003): 2750-1469P.txt file - cDNA_ID_2105710; gDNA_ID_1972003; Annot_ID_177772
aaatgtgaagattttgcattttgattttttttaaaaaacttctaactaaagtgtggagtaattaattttgttacatttacgtgccattgttaattcttagtggatacgtgtcttctgaaacgaactatcattgaactaaatcttgatttgcaatccaagttgggtggtacatttaattggatcccctctcgcgttacgcccacctcagtcccaacacatttacgttcacacaaacccactatttatttactatcaatctacgtactgagacctaaatgatcacacttaaaacaatggggagttaaaaacaaacaaacaaatagaaactttttcaatggttaaactcgtcgcgtttgaattaattttctttgtgtttttgattttttaaatagaattttgatgtcgtggactagaaaatgtcgaaatcgtatattactattatagaccctctttaaatttgtcccaaaaaaaagaaagaccctttttcaaaatatatagttttcaaataaaaatcatttcatacattacaattctgtatatgatgagacttaaaaacattaatttcgctgtcgagggccttgcatattaagagcccttttctagacctataaccacaaactaatcaatcataaatacgttatcactcacgaaacaaaacaaataaagaatcgttttcagtcgacaacataaacttttaattcaatttgtacttatggtttttagaaattaatgtgtgtttctggttgtattttcttttgatttctaaaataatttcctaactttgtacatgatgattatacattagcaatctacatatgtatgtcagtatgtgtctatatacttatatgcacacacatgtgacatttctcaaaattgtaacttgagaagatagtaaaatacaaacaaaccaagcaactcgccaggtcacgggcctttgtctttttatcctcttttggtgaattttctcaattctcatattaactatgtaacttctgtttctgtgttttttgtccacaaaatctgctattggtaaagcatatagtataacgtatagttcacgtgaaggaaaactatttaggtataaaaatctttggatttgatggattcttatccatatatatatatatatgaatgaaaggatttggccatccaggtaataagttgtatatttatttgtcttcctcataaataaatctaagttttaaaaactaaaaatgaaactgatatgctacaaatgtatactctgatatgctaaaatgaattctaatttagtttattgttgacatttatacgatgcttcaaacgaaactaaggtaccgaattctatttaattatctttgttcttctactcatagaaaacatattattactttcatattttcctttgctttcatttttttcatattattacttacaattattatattttagaatatagtaagaaaacaatacatagttagataccatggacctacctattttgtaatttgttgaaaaatctatatgtccatgggtatcaacaagagagatccataaaactagaaaatgcctctttgtattcgttttatgtatgtttattgctaaattagtgggttcagcatattcgttccttatatataatacgaacaacaaaatatcacagtagtatatatttcaactaacaaacaaatgtatgaagtatgtttactaattccataatcactgatcaatataaaaaatgatatacctaagaatatttaaatcagtaatttttatttttttcttctgtttatgcgtttaatttaagtttggcattgagttacttcatcggttcaatttagtgacaaaaattgtttgagaaaaggacctatatatcgatgtggtttagctataacggaaattatatactatgatacttaacttcttataaaatactaaaatacaaaaattggatttggtaattagaatataattaataaacgatgtggtcaaacaaacttcaaaggttgactcttttcaatcctatgtaactttgtgaagaaaaacataagagtttggtatttgattaagataaagttactatacgtatataaaaaaacatcttttaaaataatatttgtgatgaatttaagtattttgattatactcctcatcattaatctttaagacttagttcaaatcggtgtagtatttgtttttgaattttgatgaatcaaatcaatgtaattggcaaaaacgaatccgtgttatattttaaagatattgttcccttaagagatattttattttgatcagtatatataaaaagatgaagcaaatataacaatgggttccaatttccaactgtctttacacagaaaaggttaacaaaaacggtcagaaaaaaaaagactaccgacaaaaaaaaagacagttcatttttttgttatattgatctttcgattatcttttgcacattcttgtcctgatcttcttcttctttcttcccagtttctctcttcgagcttccggaatctttggtgatcaccgaccggatctggacgaagaatctcgttaacaaactcaacaagcattctccaaagcttcctcctttttcttcaacgatcgtcattgcattgtaatttggagagtttagctacaaagtctgtcttcatcgaattaagatctatctgatttttctgggtggttctcatgtgtgagatttttgatgggtttagagttgtcggatatggaaggttcttcttatctttgatttgttttatatattaagcggcagaatttgaggttgacttgagcgagaatctggattctttcgaggagtatttaatgttcctgagaattccctgtttttgcgtcaagttttcatttttctgagtgttaataaatttagaatcattagtgcagcagatagagagagagtgtgtaaatctgaggaagactctctgtggatttgattcgtctttgtgagtcaggaatctgtttgatgaaattcccctgtggagagttttaggattttagaaaatg

SEQ ID NO: 22517 - DNA, 3003 bp, Unknown
  misc_feature (1)..( 3003): 2750-1469P.txt file - cDNA_ID_2105718; gDNA_ID_2926220; Annot_ID_142400
aaagtgattttgcaggtctgcgtatttctttcactgtttttattaagcagattaaatatttagtccatatttctaaaattctgtttatgtatagaaattgtaaacttttgggacatgccatgatacgtttaatagatcaagtttaattatattgtggaatacgtcaagagcttacataaaggattgttttagtagtataccatatatgtggtaatatcgcaggtccgatccgaatggtaacagtaacgtaaatagtgtaaaatgggaaagagaacataacaaggtcttgctagtgaattagaatatacaatttacgttgaacaaacggtacacataaatgaaacaaaagttgaatagtgatcatatcagaatatcagatcaataatgtataaacaatatcaaattttaactattttaatgatcgaaacaattcttataacaaacttaattcgtatgactgttttcgatcttttgatgatatatattttcaaaggaagttgtcattgtcaacttgcaattcaacagtttctaattttgggtgctgttgaaacccaactaccacattttgatgtatttaaaacattatactatgcatctttctgatacaaaaatgtatatcattaatatgtattagaattcttagaacatgcctatatatccaatatagctcatcaaacactaacgagtataaagaccatccactccaccaccacattaagtttttgacttaatgatcatcggctatgttgttgtggtccaacataaagagtctgccgagtttggtttcactgtctaaattggaaccgtttttggttcaacaactagttcacgcagtaaagtatcacttaaatacagttagttcaaccggccataaaaaagtttgttctcgtacatatggatattattgatttacacattgagaatatctacccatctattattaacaattaagcttgacctagagaaattctgatgtagatttttctgattatcttctcatggttaggaaccaaaccttaccttgtttctctactcgaatcaatctctttattagcttatgtatggtttagtgttctctaaccaaaccaagaaaaggattggtttagtgttaacatactgtattactaagtacatagttattgggctataagaagctaactgggccacaaatccagaatcccaatataagtcaatgtacatcgtttgctaaaatctaaaaacggtatctttaatctcagaaaggacattatacaaagatgatgatgttacacataaggtcgtttatctacatcaacttcaacccactagttcttcatattacataaagtctcataaaagcgatttcgtatcgaacttttactcataaaattcccttattctatgattaaaaaggaagaaattccaaagttttatagtatttttatgcaatgccaacttgtgttgcttcgtaattccaggtacattacataatttaataaaattaaaatgaaccaatcaaaaacaaatccaggtcatcatcatgacttgggccggcccaatatccctgagtcggcaacactctctctctctcttccattcctttataactaatcttcaactaacttttctcttccccctaacttttttcacccaaatatttcgacttaattaccaaaaaaccagccattgatcgtaaaacctttccaccaccgcacaccccctcgccgggggtagtgcgtcgcatacacgcgccaccgttaccttctacttctctcttgaagcaacactcgtggtctcctgatctaatccgcgaggaagcttggtcaaaacgtcaagatatctcccgccaccgtcatctccgccgtggtaagagcttgaccgacgaagatctcgacgagcttaaagcaagtttcgaactcggattcggtttcggatctcccgaaaacgctgatccaagactttccaacacgcttcccgcgttagaactttacttcgccgttcaaaaaagctacaacgacgccgtttctaacaaatcaacaacgtcgtcgtcttcactctccgacggcgataccagtcctcaccacaccgtataccaaaccagtatgtataaacatacacacacacacatatatacacatacacgattataaatttataatgatcaaatttcatttgaataggtgatgatccgcaaacggtgaagacgaagctgaagcaatgggcgagagtggtggcgtgcaccgtgaaccaatcgccgccgagatgataattttaacgactgttaaacgttgtggggataaaggttaatccggaacagggtatgtaaattgagacgccaaacagtcggtggagtccagtcagcgttgtaatattacacacacaatagtaaaatactaatatatgttggacccaacttgtttataagttatattgtttattgtataatgcatgatttgatttgatttatcttcttttagtatgtgatatataattttatatatgcaacagaacacaatttgcaaaagtatattctcagattctattgtctgacttttgtccatgggagagtggtgttggcttctcttatattcgttgctaagcttgataaaggattatgcaaattcacgtgaatttgcatatagtgattaattcagattaactgatctctttcagatcaaaatctttgtagcgtaacttatatatattataacttttgaaaagaagaaaaaaattatggccgaagaaacgatcgaaatagtgagaaaatagagaaagtgtagggaacgatgagggagtaagtaacacatctgtgttttgtctgattgtctgattaagaactacacatagcagatctgtgttttgttatgggccttcactattaggcccatctgacccatatcgttaccgctttttagtatggaaaagcaacaacaatgtaaaggaaagcagaaacgttagatttctttagacgcgcaaactgaaagagctttgatcgatcgatttggaggattcgtagaagatatg

SEQ ID NO: 22518 - DNA, 3003 bp, Unknown; identical to SEQ ID NO: 22517
  misc_feature (1)..( 3003): 2750-1469P.txt file - cDNA_ID_2105718; gDNA_ID_2926220; Annot_ID_203277

SEQ ID NO: 22519 - DNA, 3003 bp, Unknown
  misc_feature (1)..( 3003): 2750-1469P.txt file - cDNA_ID_2105722; gDNA_ID_1620448; Annot_ID_157381
aatagatatccatttgataaattaataatctacaaaaaaaatttagcatattatgagaaaatatcacatatcctgcaattaatactttaaggatattagaattcatctgataaatgtgatgtttatgttggaaagtaacaaattatagagaaaaattgctcaaactgtaatagttaaaataaaaatggataaaaccgtcttaattattctcttatgtttgcatggatctctatttcttatggctttgtctcgttatcgactatgtcaagtgatggtcattgcatttgtgttacatgtcgagacaacttatggtttttgtttaataatatatatggcagctgaaagactaggaatagcagaaacaataccagcatatttaaatccaaagctcaaaaatgaagatcttctcaagggtgtgaattttgcttcaggtggttctggttacgatccgttaacagcaaaactagtggtatttttaatatcgtttaaactttcttaataaattggagttttgattcttattttttagtcatctttttattgatatgtttttttttgttctgcgatgctccagaaagtggtatcgttatcagatcaactaaaaaatttccaagaatataaaaataaattaaaggtgattgttggcgaagagaaagctaatttcttggtgaaaaatagtctttatcttgtggtagccagcagtaatgatattgctcatacctatacggcacgctccatcaaatataacaaaacttcatatgctgattatttggctgattctgcttctaaatttgtcagtgtaagtacaaaatttgattatgttatatacctcatttatcttgcattttcaagttttttgatttttgattttatttataaaagtacaaatttgttgttctcagtcaatttaaccataaaaatgatatattgatcattcatagcaataacagcatttcaatcaaatttggattcattgtaatgtttacatcatataggcattgtatggacttggagctcgaagaatcggagtatttagtgcagtaccggttggatgtgtaccagcagctagaacacttcgtggaaaattgaagcgaagatgctcagaaaaacttaacgaagtggctcgcaactttaacgcgaagatatctccaacattggaagctttaggaaaagagttgccagatagcagagttgtgttaattgacgtgtgtgacactcttaatgacatgatagaaaaccctaaaaactacggtaagtatgaatacacatccctttttctcataataatttcatcaagttataaccgtaaagtaaaatagttgatcatttatgttgtgatacgcaagtacaaatgataattagtattttgaggattttgttttggtcccacatcagttaaatttaataagagactttgcaaattattatatgtgagacgtcacaaattattatatgtatataataaagtgtttagatggaaattttcaaaccaatgggaactacaaacaaattaacttacctcgtacaatagcacgggtcatcacttagttatagagaataagaacgaaagtcataataaccataatactaatataacttaatgcatatttataaaatatattatacacttagaattgatctaaatatgcatggatatttagtcattcaagatattgttttatggatccatgaatttaaatgttggatctagactcgcatacctccaatatcttggccatcgataattagtaccaaaaactaactttattacctactagttactatctttaacttctttcttttttattataggatttgaagtatcaaacagaggatgctgtggaaccggattagtcgaagtactatttttatgcaacaaaatcaatccttttacatgcaaaaattcatcttcgtatattttttgggatagttaccatccaacagaaaaagcttaccaaataatagttgataagttgttaggaaattacattacgaaactagtctaattctatatttttataatatactaagtaatattttttcctatgtaaaaacgtaaaaaaaaaaaatattttttcaataataagaaatagtatttaaatgttcatttagattaaatagattcaatatagtttgttaaaaatgatttatcaattaaaaaaacaggttatattggattagactagtttcgtaatggctaaaaaaaagaataaaacatacgtacgagaacaagacgaagaaatagaaggcatccactacacaattgtacatgtcgacaacaaagtcaacgacataccgtttgagacaccgtggctttcgcttttctctcaaaaaaaaaaaatcaatcatgtttttttggtttttatgtttcgacagtatttggtaggttgttttaatattattaaaaacatacttattatttgtgtgaatatgtttaaaagcaaacttggttgtttggaattgtaatatcaaatgtcaagatccatcaactttcataaaaattcgttaatttgtacgtgaacaattaataaatctctcataccacacatattattgctctagtcaatttgtttcctttgttttcagtcattttcaggaatcaaatattagcaatgctttaactctactccactgcaaccaaattggttgtttagagttatcaaatgacaaaactcgttaaaaactcgttaatatctattaaccaataaatctctagtgaacttttttcctttgttttgttctgtcattttcaggaatctaaattattaagtcttcaactctactccaccacaaccaaaattaaacgagtcttgtctacatgacctaatttgcttaacaaccttatcatctcactaacaactccatctcccaaaatttaaactcctttaactatgcctataaaaccttgatccattcttcatcacataagcaacccaacaaattcattctaaatacatttcttttcactcaagaaattaaaatttcgaaaagtttgttaaaatg

SEQ ID NO: 22520 - DNA, 3000 bp, Unknown; identical to SEQ ID NO: 3322
  misc_feature (1)..( 3000): 2750-1469P.txt file - cDNA_ID_2105726; gDNA_ID_1620639; Annot_ID_47452

SEQ ID NO: 22521 - DNA, 3000 bp, Unknown; identical to SEQ ID NO: 3314
  misc_feature (1)..( 3000): 2750-1469P.txt file - cDNA_ID_2105726; gDNA_ID_1620639; Annot_ID_162991

SEQ ID NO: 22522 - DNA, 3003 bp, Unknown
  misc_feature (1)..( 3003): 2750-1469P.txt file - cDNA_ID_2105733; gDNA_ID_1972023; Annot_ID_178127
tttttaggaaaatcttcttagatcattttgtttttgcattgacattaatatctgactttttgcaggccagtatagcaaaacttgaaacttctttatctatgtatggtgataagctagagcttaaagtgtatggctttaatgagaaaattccagctcttctatcaaaaatcttagccatagccaaatccttcatgccaaacctggagcgatttaaggtatgtgaatatttgcatgtatagttgtcatatttttaattctccttttatcttaaatttcaagttttgtgtcattttcttatcctcatcatttcttgatttaacttctttttctttctaaccttgtaggttatcaaagaaaacatggagagagggtttaggaatactaatatgaagcctttgaaccattctacatacttgagactgcaactcttgtgtaaacggatctatgacagcgatgaaaagttgtctgtactaaatgatttgtctctcgatgatctcaacagctttattcctgaactccgctctcaggtaacattctgcatcagtgtgattcctgttttacttaatacacagattttgtgactgttctctggttttgtttaaattgggcaaaggtcatgtaatacctctgttatgttttcagatatttattgaggctctatgtcatggtaatttgtccgaagacgaagcagtgaacatatcaaacattttcaaagacagtttgacggttgaaccactcccaagcaaatgtagacatggtgaacagataacatgtttccctatgggtgccaaacttgtgagagatgtcaatgtgaagaacaaatctgaaacaaactcagtagtcgaggtaaaaaggaaacagtattttcttgtgataagagtcagccaagaagagttgaaaacattgtactttcctcgggtataatcatggttttgaattttaacctgcatctgatttgcagctttactatcaaatcgagcctgaagaagctcaatcaacgagaacgaaagctgtgctggatctctttcatgaaatcatagaagagccattgttcaatcagttgaggttagtcatcacatgtttacctagtttttttaatagatcaaaattgtattcatgtatagtcacacatatatatacatattttggatataggacaaaggagcagcttggttatgttgtcgagtgtggccctcgcttaacgtatcgtgtgcacggtttctgtttctgtgttcaatcttctaagtacggtccagttcatttgctggggagagttgacaatttcataaaagatatcgaagggcttctggtaagtctgtaatcaaaaagaatatattgattttttttgttaaatctttacctcgctccacatatgttaatcggactgtaattgcaggaacaactggatgatgaatcctatgaagattaccgaagtggtatgattgctagattgctggaaaaggatccctctctcttgtccgagacaaatgacttatggagtcagattgttgacaaaaggtaaggatctcaagggtttgaagttatgtgacctgtagtatctatagaactttcaatgatttacttggatccatatccacaacggtcactggcgaatgaaaatggagttaactctctcacaggtacatgtttgatttctcccacaaagaagcagaagaactaagaagtatacagaagaaagatgtgatcagttggtacaaaacctatttcagagaatcatcacccaaatgtcgtaggcttgcggtaagggtttggggatgcgataccaatatgaaagaaactcaaacagatcaaaaggcggtgcaggtcatcgcagacgcagtggctttcaagtcaacttctaagttttaccccagcctttgctaatgagaagaaacatacaaaagagttttgcttcgtcttcccttttttttatcttttatattttgattcactcaattttcttcataccctcattggataggttatacttttgggtgacaaacaccaaaaatatccctttttgttacgatttgagaatacgctttttaaattattatttttatctggtggataatttgatatttattgattagaaaagcattatcttatacaatgtatagatttcatttacccaaaaagaagcagcaaaactaaaaaacagacagaaaaaaaaagttatcaatcgataaaaacttacttcaaataaccatcgaaactctcactaagaaaaatcccatttggaacaattttctccttaatgacaggtatatgtccactggaacaataaatgaaaagaaagtataaaatgacctttgattgtacagtgaatgtcttacataaataaccaacggtaaaaaatcaaatgtgaacgtggatcatgaatagcttgtttgataattacgattatatcccgcggttaatttctctctggtagggcctatcaaacgtagaaagcgaaaactatctttcttcttcctctctctcactatttttctctgtacggtggtgagtgaagaccatcaaaaattgcagaaaataggcttaatctgaatctcttctcctccgtcgaagttttgaattctctctggttctccaattctcctgtgagtctctctctctctctcttccctctttctccttccttatgttctccttgtttcatttcgcgtctcttgaattttgccttcaactgatttctttgatctctgtctcataacggcagatctagggtttatggcttctggctttcaataaatctccttcgttctcccactcttttatctaacgagtttctattttctccattttgcttcagctcgagctgccttaagcttcgcatttacgtttacgttatgcacgaatgaggttcgttttctccagatcgctcttgttttcttcacgttttactgtctaccgttatcattccttgtataatttttggtggattagatcatcgtagatcgtgattgaagaagcgagagataaattaggagagcgaagatg

SEQ ID NO: 22523 - DNA, 3000 bp, Unknown; identical to SEQ ID NO: 2636
  misc_feature (1)..( 3000): 2750-1469P.txt file - cDNA_ID_2105764; gDNA_ID_1620568; Annot_ID_160792

SEQ ID NO: 22524 - DNA, 3003 bp, Unknown
  misc_feature (1)..( 3003): 2750-1469P.txt file - cDNA_ID_2105795; gDNA_ID_1620562; Annot_ID_160643
cgagtgaactagccataaagtagttgaaacgtaaggttgcaactctatgaacgtttctggatatgtggttaagactttttatttggtgaaggagtaaaatgtgtgtttggccaaatgagtaaatctctatttgggaagataacaatgatttcagtatctcagccaatccaaatgagtggatgttttgaaacagtttgctattcgcgggagaatttcacagcttcaatcacagcagagaagtcgagatctcctagtcccaagcttctcgccttcttaaaagcctgtcgagaaccgaaacatatattttaagattcaagctaagaaaccaatctagaggagggagagccaatatgttattgtctctgagtaactaactaactaactgacctcgtttgcagccgcggctacaggcatggaaaccgcgttttcatcgccaagagcaagagctagcctcatgtctttctgctgatgtttcaatggaaatgctggtgggtaactactcttgttcattgaaggtcctttccccttgaacatcgggttagtcattgctcccagatcctgcccatagcagaaaccgattcaaaccaacaccattatttcagagcttgcaaaagtttgatcacctcaccagaatatccaaaagagtgtcagagctaagtccactcttgtcagccaatacaagcccctcagagaatgcattcatcatgctgtatcagacgaaaaacaataagatcatgaagccatgttccattcctactactaatggtagtaattgtaaaagagacgggacattcaccttcccattatcatgttcactattagcttcattttagctccgtttccaacttgtcccaagtaaaacgatctcttccccaagacatcaaaagctgggattgattcctcaaagagtgccttacaaaaaaggattaaaacacaaacggattatagccgcacatcgagagctccttcctactaagtccaactaaaacagttcttgagatctatcaatcaatccataagtacagttttgagttgtaccttgtcaccagcagcaaggataatgagttggccatcttcagctggctttttgctacctgaaaccggaccttctacgaaccgaccacccttcccggtgattgcctaccaatgcgcaacacagctcaatcaaactaatcaaccttcttctaatcttatcatcagcatctaaagtacaaaagattcaacctcattgatcttcaaagaagtctctgcatcaacagtcgacatatcgatataaccttttccttcacatatctgctccaaaacaccgcctttatcgaaaacaacctaatcaaacaactacttcatatcattcatcaccaatgctaaaacacacacaaaagaagcaaaaaaggatttcaaataccgaaagagcagcacaaggatcagagagcatagcaatagtgtatttgcatttcttgattacttcagctggactctcacatactgatgcaccatgctccacaagctcatcacactgtcacaatcatcaaaaattcccaaaattgcattaaattactcaaaaagtttccgactttatcagatctgaacaactaaaactaaatcagaaaaccataataccaaaacacaatcaaagacaaaaaaaaaaaaaaaattaccttggagagtgttctgttccatacagtgactttgaatccattcttcaatagattcattgacatggcttttcccatgattcccaaacccagaaaccctacttccattttatctatcttctgcgattatagtgcttacttactgcttagtgatgatggtctgagaatgataaagccggagccttttctaatcagagaaccattatcatcaaatacacttactttgaaaaggaagtatttacagtttactccctacagtttgattctgtttgcatctctaactgccagttatgaacgaacaggatttcgccacgtgtttgaaataagagggattttgggttttgattgtttctcgaatatttttggtacgatgagatatcatatttctactatatacataaagttaaataatctaatatagttcttcagcatattcatgttctctaatgactaattatatcataatcgtaaacttacaagtacaatgatgaggacggtctcaaattatatatacttcttgttcaattttagtgttaacgtagattttttttttaataaaacaacggtgatttctagatatacagagaagaataatgagaagacaaattgatcttaatttgtaatatagtacttattagagacatgaatattatattattagtttgcattattgtattaccatcatcgctgaagaaaggcattactcaacacatctgtctaactgtcttagtaatggacaactaaaccaacaaaccaacatataagtctgaaatgtggccttcagattatttttatactgcgtggcctaaagcaaatgcttcacctgctttattgatgggcagtgcctgctggaatcaacatatttttacaaagaaataaaaaattcaaattgatctcttcacgaaagagaaagaaaataaataatttgaaaatttgaaaaagaaaataaagcttttagaaaaagaaaaaaaatagtaatagtttttaaaatgctatgaattaaataatataaaagatatggatagtataatttcattactttcaagaaaataattgaaacgcagagaaaaaaaaaaaaaaacaagagcccatcgagaatggatcagtaaaaaacctaaggcctatctccagcaagtgcaacttacatacattctcgaataaattctgatccgatcaagaactcataattattgtaacagataaaatcaaatttgagagatctactactaaatctaacttaaagcattgtactttcttttatctcattctcctttgctctgctttcttctggtcaacccccacgagattccttcttatgtgattgtaaagagaagatttttcagagatg

SEQ ID NO: 22525 - DNA, 3000 bp, Unknown; identical to SEQ ID NO: 6366
  misc_feature (1)..( 3000): 2750-1469P.txt file - cDNA_ID_2105807; gDNA_ID_1621090; Annot_ID_55498

SEQ ID NO: 22526 - DNA, 3003 bp, Unknown
  misc_feature (1)..( 3003): 2750-1469P.txt file - cDNA_ID_2105807; gDNA_ID_2684129; Annot_ID_191173
aaaacaatatgaacgaatgattttagtatttaactttcgtcctcatgtagccatgttgttattttcaaaccataaagaggacttaagagtcgtcagataaaacaatgatattttcgtattcgtcgatgcactaataaccaactcgattggacaacatatcttacttcattcacgattttgatgatttcaccgaacaattttttctttctttctcttttgtcttttaattatgtcattttcttactggatatgttcactggtcgagttgggtcttggcctaacacataagatatatttatgatagacatatcttttttttttatctttttttgagttcaaagtagacttacatatgtcaaaatccgagactcccctaactcatgaaaaaagtgagacgaattcaactactttgccgaatttacctgtcttagaaaatcaatcaaacccttgagttgtttgcttgatcataccttctcttctccttgtcactttcactcaatacaattgacacaaatcatcactcgggaatcaagacccaacacttttgtcttggttgtcaggggctgggttaaatactactaggcccagtatcagcccacgtaatgttcttctttactgttttgtctatgctctagtttttgtttatacattttctttgtattcctcattctcctaacaaccctattgcctgcctattggtatcagaatagaccaccactgcacgagaaaaaacctaaacttgatcgcgaggaaaaaattgtgtaactaaagtggtcgtggagcggtggaggtaaaacattactacatagtactgttacaaaacaatatcttgtaataattaaaataaaagataaagtagtaaaaatattatttttttgtcacatcattacaattttcctaatttatgtttagaccattgctgtttggcatactaaaggtataagaaagacacgccacagagatccagtggtatacaatttttatgctttggaatcaacttatttgctacaatgacaaactaccaaagtttatttaattactttacaaaaagaattatttggataatccaaaatcaaagaggggaaagttggatttacatttccgattaacattttaacgtaaaaaggaaaaatgtgaaacataaagtgggcaactggacattcacggcaacagatcaaaaacccttttttaaatcaactacttagtaaaagaggaataaattaacagattatcacacacactgattgataaattaggagcaaattggttttaacaattcaaaagaaataaacaaagcactaagttagttttggtgctgacgagagtggacggcaaaaaaaacagaagatcactattaagaaagttaaagttaatagtgcaaaatattaatgtagggaaaaaaatgactacaataatgttcaaagttaaaataaaggacattttgttggcaagaagaaaaacattagaaacaaaaacagaacaaggcaaagctgcaaagtcaagttgagtcggtgaaagagaacaacaaccaacctttaccccactgccatcctccctagttttgaacatgtgcactttcttcgttatttaccatcacttttgtgttgtcatattcatcttcttctattcagagaagacatttagccaaaatttatgtaatttccgagattaagaactggttttcctttgtttgtcacttcaaaccagtgatcaacaatgaaaacagtaaatgttacagtggtctataccaagattctaaaagttgaaaagtggaagagggcatgctaatttgaatgaatacccaatatttaagattctagaagctcctttttatctatatatatcaactaaatagtcggcatgaagctctcaaatacttggtccacctatttatagagtacacaacttttttggaaacagctaattggaaaactctgtattatttagggtttggtactagttccttttgttgtgcaactatcaataaataacatataccttctattgataaatccaaatccaaactctaaagtgagtcgctgaaaatgaaagtagtaaaattttgtggcctctcatctcactgtattcatatttcgtttgttgagtgccgactctactatccacctattatgagattcttatgttaaaacttacaaaatatatttacctagattttgtctttgtccatactcttccatgtctcgggatcagaacaaaacaactagtttacgtgcttttttggaaggtcttatagtagtaataccaacagagctacagataatggattaaatacatgtaaccaacaaatgttatattacttttataaaataattataaatcaatgaaaaaaattccttatgaatcgctaaattttcaagaactcaaaaccttattcggttttcataatgagcaatgatgaatacatgttatacgtcgaattattattttggattctcaagccggccctttgctatcttattttctcctttacaacattttttaaccccattgtcaaagagtcggctttgagcccatgattgtaatgaatggatagcttgaatattgcgaccacactaataattcccgtcaaatatttgtttaacttaatgtatgacacatgtattttacgagcaaataaattcaaaaaatttaagcattagcgaaaacattgtttctccgctccacaagacactaaaacataaataatgaattaaatcagtcattctacagaaaattaatcaccgtagtcggttgccatcattccaaaaccttaaaaaaaacccatgtaaaatgatcattaacaacaacaacaacaacaaccaaaccaacaaaaattaaagtaaaaacagagtccaaagcctcgtcacatctgcccataaatacccttcaccgactcaccatcttaccacatcaattctctcatatctctctctcactttcgaatatatcttaagataacagagacacatactcttaagtttggtgaagaataagaagacaatg

SEQ ID NO: 22527 - DNA, 3000 bp, Unknown; identical to SEQ ID NO: 6366
  misc_feature (1)..( 3000): 2750-1469P.txt file - cDNA_ID_2105807; gDNA_ID_1621090; Annot_ID_170686

SEQ ID NO: 22528 - DNA, 3000 bp, Unknown; identical to SEQ ID NO: 1643
  misc_feature (1)..( 3000): 2750-1469P.txt file - cDNA_ID_2105831; gDNA_ID_1620429; Annot_ID_156811

SEQ ID NO: 22529 - DNA, 3000 bp, Unknown; identical to SEQ ID NO: 1624
  misc_feature (1)..( 3000): 2750-1469P.txt file - cDNA_ID_2105835; gDNA_ID_1620427; Annot_ID_156762

SEQ ID NO: 22530 - DNA, 3000 bp, Unknown; identical to SEQ ID NO: 944
  misc_feature (1)..( 3000): 2750-1469P.txt file - cDNA_ID_2105845; gDNA_ID_1620340; Annot_ID_153929

SEQ ID NO: 22531 - DNA, 3000 bp, Unknown; identical to SEQ ID NO: 8770
  misc_feature (1)..( 3000): 2750-1469P.txt file - cDNA_ID_2105868; gDNA_ID_1971878; Annot_ID_176773

SEQ ID NO: 22532 - DNA, 3003 bp, Unknown
  misc_feature (1)..( 3003): 2750-1469P.txt file - cDNA_ID_2105868; gDNA_ID_1620837; Annot_ID_169927
tttcgagatcctctaaaactgacaaaaatgagtttttattgtaaccctctgcctattccatattgctttgtggaaatgcttcattggatttgattctctcgaataccaacatttaagtgcaattttagtggcagtggacatatatgcgcaagtgtgcacatcttctcggcagtggatgttacagtcacttttcgagagattttcagttacatggccttcctcgatcgatgttttctaatcgttattgtgtcttctcataacaattatttcgtctagtattgctttccacctacaagctggtggtttttactcatctatgatcgatttgcttcttttcaacttaacaagtggtctttttggcatgcatgtacagagttttggaataattcatccatccattcttctttacaatatacacatgaccatgaaaaactacattttctatatcgtctattctggttctggtacaagagttcattatgaaacttctacaattctttcatatttctctatgttatgatcaacaaaaaaatttgaaacgacgacattagcattggcatgcacatgtcaaatagtaaacactgtccgatcccaactattattatatcaacaacaagttttttttttttttttttctcaaaacaacttttgtatttacatttgctaaaaacatcagattatttggtagatagaaatgtgtgattcattctttaccgcaaaaggttttgaaccgtatacgaagaatccgcggccttggccgaagaaggcggtgaatgaggcagcctagcggagaagttacgtagcggaaaacggtcgatattgtcatcctcatctcctttatcaaagttaagcgcatagctcgacggatcgtaatgaaagtcagcagtatggcggcgaatatgcttcccgtgaccgccaacgccacctactccaccgcccattcgatggatcagactcttacatttttcatgtgacttggacaacgtcctagtgagtcttggagatttggtcttcattccaccaccatgtgggctttgtgtagatttctcggtggtgaccggggatgatggtaggtcgtcgggaatgttgtcgtggtggtgatgattggtcgtacgaaaacatccggcgatgcaaaaccttgatttgagtttcttttgtagagacaagttggtcattgtttcgcttcccattttttttttacaaaaccaatgtttgttggttagatcaacaaaggaatgcaaaagagaaggaagacattgaaagaaagatcaaatctgtattagaggaaagaaaaacaaaacagaaaacaagtgatcgacgagatatttggttgattttcatttattattttttcttgaaatgaactgtttaaccaaaacttcggaggagaagttgaaattctttactattttaggaatatttgaatttccaattaaaatgaggttcaattttgtttcacgttaaatattaatgagtcttttgactttgtgagcaaggggggacatatttagggtaggaaaaataatatttatagtaatttattaaattagttaagattataaagttaaaaggataatatgaaaattttggaccaattttgatttgtgaatatagtaacggcatagctaaagcctaaaaacatttaatattaaaagacctcattggattttattttctcgactgtcacatttttgttttggcagaggtcttttatccatgtaactctattcagtatccacaaacagttttggaggatcaatatgggccttagaaatgaattaagatcatacttcactagagaatgtgcactcaaagaatgtgttgcgaggtttcatcgttaaatttgcattaaaggtaaggaacttgaagatcccatagcaaaattccatctctttggtgaagtcgttgtctagttgtcaccgaagctataaaggcatacttggaaatccttcatttgaaccaaattatttgctgccaggctgccagcagtgcctgtcttgtgaaaaatgaggctcaaaataactttttttttatgggtttatagaagaattttttttttttgagaccaaatcttaaaatgttatgaaaatgaaacctatgtattcaatagaaaatagataaaaattaaaaattgagactaaatctaaaaaatttagaaaatgaggcaacaaatatttttgaggtataattttgatactaaaaaccttaaaacttttggtggctcaatacccatgtttcttagaaatatgtcatgggccgggcctgactgccagtcaatggaaggaccatgagggtgtagataatgctatatatttgagattgtaaatatagctgataaactatatttacaacgaaaaatatttaaattctgacttagttaatgtaagtttaggcataatggaaacttttgtttataaatacgataaaataagccgtgggaaaatcgttttcgcactttcgctttaaacttttactcataattggtttgaaatttaaatcaatgaaaaaactaagttaaaactttaaattgcttcaaccttagttggttttttgtaagttcttcttatttttttcttgtttatgttagatatgatttttcatcaataaaagtagacgttaaaaaaaaaaaattacaaatcatttatataaaattgttgcattttcgaaagaatttttttatagtttccatttgatttttgtttctagaagtgtaataagaaaataaatccacttttaagttttgatgaattggataaccggtttgaacgaaacctggttttgatgaaatttttcccgacactgtaacacgataattagatttgttgagttataacattacgtgtcgaattttaattggatgtcctgcgtggccgtcttattagtcacatcaccgcagctaataacactcgacgagcgacctcatcgtctacatcgccgtcgcctgttaccgtccggtgctattctccttcacaatctcacatttttcgtaccggttagaagatg

SEQ ID NO: 22533 - DNA, 3003 bp, Unknown
  misc_feature (1)..( 3003): 2750-1469P.txt file - cDNA_ID_2105872; gDNA_ID_2096290; Annot_ID_195344
ctcctgttcctcctccctctgcctatgggttcggtggaggcgctgtctcaagtaataacttccctttgaatcccacaagtgctgcaaactcctacgaagatgtcttgagctcacagtttaatgagagcaaccacttggcatcatctcttcagcagcaggtaaaccatgaaattcttctcaggttttataatcatgttggtgtgttttggttctgtttggtttccttcctctgtttagtcagctggaatttatactggagtattcgattttatttatttttgttcgattttggatgggtttggctcagttttgaactgttggattttaagaaaatcggtgcagtttggtttctgttatttgtgcgttctctttttcgcaaaccttaacgagtagctttctttgttttgctttgatctacagaacgaaaaaacaacagcatggcatcaaggacaacaagccaactcgcgagtggttccaggaagcggatattacagctaccctggtcatcagaatcagcagcctcccggtttccgtcaagcccaacaactgcaacatcagcagcagtcgtctcaacaacaacaacaacaacaacattatggaggacatgggtatgtgagtccttaccattcacaagctgtaatgtcactagaacatcttcatcaccaataccaacaacagcaaaacgctagagacgcgtcgaaactgtcccaacaatagttatgggccaaccactactgatgaaaagcaatccattcaaatccttctttcccccttattttcatctctcattccagagcagcgatgggatgattccgttgtttgaaaatggcgttgtgttgtgtgtgtgtttaaggttcagggtagggtcttatgagagggttttgtgagagaaccttcaatgggttaacttgtttacttgctaaccttcttatattactaaaaagaactctatttttctttcttgtctgtttcttatcattttactttttaactatttagtcttgacattctatatcagaccaaacttcatagtaaagattattaagcttagcatgtcctgactaacctgcgtcatattaaatagtatggaaagagaagaaaaatttgaaaacagagaaattcaattactatttacacattttgacggtgtgattatgctaatttatctactattaaataagttgtgtataatgaagaaagctaatcaaatcatgtgttctttgtttggtactagtctactacacaatatttaattggatagtatagttaatagagagatgtgtacttatctaactctggaaaaccacgtcatgtgagatttgttaacaaaacgacacattttgccgttttatttgttttcagctccaaaaattcaagtcatctctgtgtttaaaaattttaatatgagagagacgctgtacctttttgtcaaacatagttgacactttaattcggtcgaagtgtttactggaattcaaacttacaacttcgacccctccattttaaaattacggttcccaatggtgacgaaaccgcacgttgcagtacaattttaatactccctccatttttatttagttgatgttttaggagaatacacatgcataaaaaaattatttaacttttatctattttaaaactaaaatatcatctattatttaatcaaccagtagaaaaataatctgcaaaaaaaaatcattaaaatcaataaaaatacaaataattttccattgaaaatttaaaacatcattcctttaaaaacaaaaataaaagtttaaaacatcattacggaaagagtagtaacaaaattttctgaaattgctagaattttagggccacaatcaattgcttctttttattttgctcagttacaatataataatacaatgaaaactacatcgcatttgatatgtagttaaaccgtatatctccattcggaacttatttatctgatctataatgtcaattagatttattattcggaacacaattcatataaatgttagttttagataaaattttagagaaaatatgaaaggagccaaactcaatcttagacttaataaagagtatttttccacaaatagttacaagaaaaccaattcaattattagcagcatgtgtaatgtgtgcaatctagtaatctgaaatagaataacaaaatcggtctggatatattattattgaagaagatgccatattattaattattataaaaaaaagatgccatattaattttaaaaaatagcatgttatataggttcttatagtatcatatgtaaatgtttcttgttttttgtgcaaaccgcatcaaatcattattaaatgaatatcagtatataacctttgatttctctctaaaaaatgttaatagccacaagaaaaacttaagaaagcgccatttctgcttcttcttacttcaatcctttgcgagagagagagagagagagagataaagtttcttcctttttcccacgtttcacgttcctcctcttacctctttctccttcgcttcaatcccttcaagtttcagtctttagatcaaaccaaaaaaaaaaaacgatctttttccgataattcagttaacttcaatcggaaaaccatttccagttttccggcgagatggccaacgaaggaagtgaccctttacttcaatacatgattagcccgagattgaaaaaacctccacagctgctgtttccattaccagaagacaacgaagttgcgattccgatgccgatgacaccgtcggagttcaaagagcgtttaatcttcggacccttttcatgttcgccgcgagattcgtctcacttcatcgattccatgaaacaaccgtcaccgtcgtcttcttcaaccgccgttaataatcctttctccgattcctcaaccctagatcctctgcttccaccaccaccaccacaaccagagccatggttgtccgatcaaacttcgagtcactgtcaaggccacgctcttcaccgatccaaaacagcaccagcaatg

SEQ ID NO: 22534 - DNA, 3003 bp, Unknown
  misc_feature (1)..( 3003): 2750-1469P.txt file - cDNA_ID_2105872; gDNA_ID_2926170; Annot_ID_140063
tacaacactgaaatttccatggccgaggtaaccaaatccccgtttctctttcatatgatcttattctaagctttccttcaataccattgcttacacaaatttgattgcaggcactaagagctgcgagtatttcacctcaaaacgcaatacccagtgcaggacagcaagcagcaactcttgcacaacatcttgccttaaatccctactctcatcagcctgagatgcctttaggacattatggcaatttgataagctacccattcatggcacagtgttacaaccctttcatgctttcagcttttcaacaagtgtttcctactggtaatcatcagtctttagttgatatgcttatgcaatacaagactcaaacaaccgctcctcctgttcctcctccctctgcctatgggttcggtggaggcgctgtctcaagtaataacttccctttgaatcccacaagtgctgcaaactcctacgaagatgtcttgagctcacagtttaatgagagcaaccacttggcatcatctcttcagcagcaggtaaaccatgaaattcttctcaggttttataatcatgttggtgtgttttggttctgtttggtttccttcctctgtttagtcagctggaatttatactggagtattcgattttatttatttttgttcgattttggatgggtttggctcagttttgaactgttggattttaagaaaatcggtgcagtttggtttctgttatttgtgcgttctctttttcgcaaaccttaacgagtagctttctttgttttgctttgatctacagaacgaaaaaacaacagcatggcatcaaggacaacaagccaactcgcgagtggttccaggaagcggatattacagctaccctggtcatcagaatcagcagcctcccggtttccgtcaagcccaacaactgcaacatcagcagcagtcgtctcaacaacaacaacaacaacaacattatggaggacatgggtatgtgagtccttaccattcacaagctgtaatgtcactagaacatcttcatcaccaataccaacaacagcaaaacgctagagacgcgtcgaaactgtcccaacaatagttatgggccaaccactactgatgaaaagcaatccattcaaatccttctttcccccttattttcatctctcattccagagcagcgatgggatgattccgttgtttgaaaatggcgttgtgttgtgtgtgtgtttaaggttcagggtagggtcttatgagagggttttgtgagagaaccttcaatgggttaacttgtttacttgctaaccttcttatattactaaaaagaactctatttttctttcttgtctgtttcttatcattttactttttaactatttagtcttgacattctatatcagaccaaacttcatagtaaagattattaagcttagcatgtcctgactaacctgcgtcatattaaatagtatggaaagagaagaaaaatttgaaaacagagaaattcaattactatttacacattttgacggtgtgattatgctaatttatctactattaaataagttgtgtataatgaagaaagctaatcaaatcatgtgttctttgtttggtactagtctactacacaatatttaattggatagtatagttaatagagagatgtgtacttatctaactctggaaaaccacgtcatgtgagatttgttaacaaaacgacacattttgccgttttatttgttttcagctccaaaaattcaagtcatctctgtgtttaaaaattttaatatgagagagacgctgtacctttttgtcaaacatagttgacactttaattcggtcgaagtgtttactggaattcaaacttacaacttcgacccctccattttaaaattacggttcccaatggtgacgaaaccgcacgttgcagtacaattttaatactccctccatttttatttagttgatgttttaggagaatacacatgcataaaaaaattatttaacttttatctattttaaaactaaaatatcatctattatttaatcaaccagtagaaaaataatctgcaaaaaaaaatcattaaaatcaataaaaatacaaataattttccattgaaaatttaaaacatcattcctttaaaaacaaaaataaaagtttaaaacatcattacggaaagagtagtaacaaaattttctgaaattgctagaattttagggccacaatcaattgcttctttttattttgctcagttacaatataataatacaatgaaaactacatcgcatttgatatgtagttaaaccgtatatctccattcggaacttatttatctgatctataatgtcaattagatttattattcggaacacaattcatataaatgttagttttagataaaattttagagaaaatatgaaaggagccaaactcaatcttagacttaataaagagtatttttccacaaatagttacaagaaaaccaattcaattattagcagcatgtgtaatgtgtgcaatctagtaatctgaaatagaataacaaaatcggtctggatatattattattgaagaagatgccatattattaattattataaaaaaaagatgccatattaattttaaaaaatagcatgttatataggttcttatagtatcatatgtaaatgtttcttgttttttgtgcaaaccgcatcaaatcattattaaatgaatatcagtatataacctttgatttctctctaaaaaatgttaatagccacaagaaaaacttaagaaagcgccatttctgcttcttcttacttcaatcctttgcgagagagagagagagagagagataaagtttcttcctttttcccacgtttcacgttcctcctcttacctctttctccttcgcttcaatcccttcaagtttcagtctttagatcaaaccaaaaaaaaaaaacgatctttttccgataattcagttaacttcaatcggaaaaccatttccagttttccggcgagatg

SEQ ID NO: 22535 - DNA, 3003 bp, Unknown; identical to SEQ ID NO: 22533
  misc_feature (1)..( 3003): 2750-1469P.txt file - cDNA_ID_2105872; gDNA_ID_2926170; Annot_ID_199415

SEQ ID NO: 22536 - DNA, 3000 bp, Unknown; identical to SEQ ID NO: 20567
  misc_feature (1)..( 3000): 2750-1469P.txt file - cDNA_ID_2105883; gDNA_ID_1620756; Annot_ID_166972

SEQ ID NO: 22537 - DNA, 3000 bp, Unknown; identical to SEQ ID NO: 1271
  misc_feature (1)..( 3000): 2750-1469P.txt file - cDNA_ID_2105896; gDNA_ID_1620378; Annot_ID_155247

SEQ ID NO: 22538 - DNA, 3000 bp, Unknown; identical to SEQ ID NO: 1655
  misc_feature (1)..( 3000): 2750-1469P.txt file - cDNA_ID_2105929; gDNA_ID_1620431; Annot_ID_156864

SEQ ID NO: 22539 - DNA, 3000 bp, Unknown; identical to SEQ ID NO: 9416
  misc_feature (1)..( 3000): 2750-1469P.txt file - cDNA_ID_2105933; gDNA_ID_2684229; Annot_ID_192186

SEQ ID NO: 22540 - DNA, 3000 bp, Unknown; identical to SEQ ID NO: 9416
  misc_feature (1)..( 3000): 2750-1469P.txt file - cDNA_ID_2105933; gDNA_ID_1972118; Annot_ID_178842

SEQ ID NO: 22541 - DNA, 3003 bp, Unknown
  misc_feature (1)..( 3003): 2750-1469P.txt file - cDNA_ID_2105937; gDNA_ID_1620552; Annot_ID_160331
cagccagtttgacctccaccatcttaccattgagttcgtggaatgtcttctgcagtactttgtcaacagcttcctcagagtcatatgaaatgaacccaaagcctctaggccgctgggttctgtggtcatacatcaccacaacatcagtgatcatcccaaactgagcaaaatactttttgaactcagcctctgtcacggatgatgccaaacctcccacaaagatcttcttggagtttgatgggccaggtgatccctgaaggctgctgttacttttattaaatactacgtgatcatctcttggaacagccttctttgcctcaacctgtatatcatggagaaaatcaacacacgacacaactcaaagaaagcagtttttcattcattgtgaaccactttctttcacatgaggatatgaaacgatccaagttttacatttttatttgtgagtgtgaaatgaacaacttctgacaaagatatgcatttatcagagcggcaaagctgattgtaaacaatagagtctactaactaaaacaggaaggaataaaagtgagtagctttgctttgctttgagaagcagcaacctcaaaatgaagcaagtaagcaggaagattgttgaaattggaagcaatgtatgttggtatatagcaggaggaaacttacaattttaccatcaatgatatgtttaagcaagacgactctttcagcaacattaggatcagcaaagacaacgaaaccaaagccacgagcacggccagtggcacgatccttcataataacagcctctaaaacctcaccaaaactgtgaaaatagtcacgaagacgatcttcactggtttcccaagatataccaccgatgaagagcttacatgattccatttccatttctgccaaacaaacaaaaaaaggtttgtttttggttccagattctatatcgatctaagtgagaaggagaatggaatcgatagaaacacctcaagggaagcaaaataggatgaaaaagagcagatgggtcgtgatcggattgtgtaaaaaccgatcgacccacgatcttggattcctgcagaaacaaaaaaaaacacaaatgatcaataaaggtgtaagcttggaggaaggaaggaatgaaaaacccagaagacagagaatctatgtatgtgtgtaataccgaaaataaagaaacggagaaagaggaaaaaaaaaagattttaggattgagaaatcttcagatttggagaaggcaaggttttaataagagggcgagaggccctcctctctcttttctgcttatcgtccaaatttttagtcttttcttttcttttctttttctgcaatccaaatcgaattaaaaggaacaaaaatggatggaagcaaataagcaatgctcagcacaaatttcagaaaatggaaaaaaaaacactcacaaaaaagaatactttctcttacgtttttgtttttatatggcaatgtttggctatccttgtaagagacgagggtattttcgtcacttccgtttcttctctgtaataagtaattaatttattaataaccaatgcgtgcacctttttacccataagttaaagaataaaatctatcgttaataaaaaatggctaattggcttaagttgatcatgatttcttcctagttctagattttagttgatcatcataactttaatttgaagagaggtctatgttttttaaatggttcgttaatcagatgattatgaaagatgcaacatgtgacaattatttgattgcatgaaattttaagattaaaatgaaaatggcatgaaactctaattagagcttttggggaatcaaagtgggcaggaacatggggaatggttgatgacgacgataaagattgccatcccacagttttttttttaattatgtcccttcattttgctttcaaataaactaatcaaatttgttatgaattgaataatcatttttaaaatcattcatcaaccaagtggaagatgtttacaagtacacaaggcattacttgtgcatccaaattattattaccaactttcataagcttacttttcttctttacattaatcactttcttgccgtccaattattttatttgggtttttttacactctttagaaaacaaaaacatcatgttatgtcggttttatcctattagaaaacacatcgacaacatttaaccactaaattacatatatatatatatatataaaattacaactattgatcgtttttgtattattctttacaagtcaaatttccaccgttgaaattttgatttacaacattaatccagagtttaaaaattcggatcatctaattcatacataagtgaattaattaattaaaagcgtgacatcaaacgttagacacatgtggagatgagattgaataatgaatatcatccactaaccattataggttagagtcttgtagcctatgtaccaactatctcttttatactatttaagtttaactctcatcttgcaagaatccaagattaagcagccttactaaatcggggaaataaacttaggtttataatcagtgcaatcacatggccataattataaatgagcaaaacaattgtctgaaaaggccataaaatttgttgggcctacaatttgattaaaaaagacgaagcgccgcatatattttatcttaaagcccaataatgttttcggcccagtaggtgttctctgtactcctattctctgctataacttatcattgtctcccgcttcagaggaatcagacctaagaagaatcctcactcgtaaagtcgcaggtatggcttcgaagagctctcgatctattttgtggttggaaattaatagtccgtgtattaaagtttcaatttttatgtccttgaatttgatttcttccatatcagtgtcgaaacattaggcatcaccagagggaatatttaaggtttttctttaaaagctgaagacttgattagaaattagtccactttgattgaaatgttcatgtttgtttcagatg

SEQ ID NO: 22542 - DNA, 3003 bp, Unknown
  misc_feature (1)..( 3003): 2750-1469P.txt file - cDNA_ID_2105961; gDNA_ID_1620469; Annot_ID_157981
tatatgacccggtccaagccacgccaagtctcttttaatacacgaaaactcaaatatcaaaggtggaaacgcatgttatataaacttttttaattgatattatatcaaattattcgatattataaaaaaattacataaggagactttgtatgataaaccatatattccgcgtagcttctcagcaggaactaggaagcatcaccgacactgacacaccaccccattggatcgatgcttcaatttttatttccagtaatacatttacatgagtcatcaaggttgttttctcttccaaaatataaaaaagttcatcatatacaggttcatacattttagatgctttgggacaaatttaaaagatatattccttaatatcataatttttttatatacttcttcttttaacaaaaacattaggtgccttttgagtatatacaaaaaacaaattgtgtccatcttgtatagatttttttttttgtgccctataaatttatgtatatgtagttatgtaccctataagtttatattatcggcccctatagttaagccggcattgactatatatttttatggaaaatttaagagttttctttttgttttgttatttttctttttaattgtttcatcaagttaagtttcgtttccaattcctcttagaatgatttttatctcttgtgttaggtcacgctttactagtttacactcctctttagaatgatttatctcttgtatgagttttgtttttgtctttttgttaagaatttaaatattccactaaaatgaaaagtgttaggattttcatgaagtaaagcctgaagtttttggtcttatggcaaaaaaagaaaaaaacatgaaaacaaaagaaatcaatccattgacatcaacaaaacaaattacgtttttgagtcataaagtgatataacaattttgaataactaccaatatatatgtcctcaatcttgtgtgagttcaaggctttatgggttacatcgttatacttagtttatgtaagaaatttgtaaatttgaatgggttaaaacttctgatctaaataacgaattggtaggaaacttttttttgtcttgttaatatttgatggttttagccaaagtaatacataaaataattatttagtgaccaaaacttatcgcatatttgatgatttaagccatagtaatatgatttgtattagtgacgttgatggtttaatatatgatttagtgatacttagtgaacgaaagatacaaattaacatatggtttaccaaagtaacgcagcgtcactagtgaccaaaacttagcgtatatttgatagtttaagtcaaagtaatatactaatatgatttgtattagtgacgttgcattgtcactatccaagtttacacttatatgttattttttgttaaaaatatatatttatagttagaattctatattcgatagcattaccgaaagtcgaaaatttaatcataggaatcattgccaatcgaaataatgctaattaaattttatttcatataaaaatttgatgaataaactattcaacgactatccttaaagagtttttttttttttaatagtcagctaacgcatttcaccgattgtatttgtagccttgtaggtagagtcgaatttccgacgcgactagaatgctagcataagagacttcaccactttgttacgaagccaagaatcttcttgttttaaaaaaaaaaatcaagacaaaattgtcgtccctcatatctatattcaattcatttcaaaacgttatttatgtcttaaaatttggaactaggccacaaagaatgactttggtcatcacaaaattataaatttaataaaaatttggaccactataggcatagctattgcctattataatctctactattactttatgatttatctactattccgaaagtgtaattgtttaatacgtcatcacattgcagcaatccacacacaagccacgtcattcatatgccgttcgtatttgctttcgtcacttccttccgtcatcaatagtgacggctatttcttaatattaatcttcttgacttaatgctatttcgtgacggcattaattggcatatcattacaagttatttacacctaagaaacaaattaaaactattgaataatatgatgtaaataaaaatatattaatgatgtgatatatcgcagtcaaataaaaatagtgattttgatgagaaaaaaaatatgtgtttatccatagatttgttaaattagagaaagatgtggaaaatgttagtgagtggcgtcatacacggagaacctttggcatcatacacggatttttctagtctttgttttctatttgtcaactttcatttgagtctttctttatacactttattagaccatgtttttaattctaatgcttattaattcatattattaaatttacaaaaaaaactattatattaactctcttgtttcctctgtatcttccttcacattgaagctgtctctttctttcaccatcacttgcacctgttgtgtcctgtttgttctcaatttcatcatcatttatcctttatatacctctctttctttcttgacttttcctctaaattctcttcctttttatctctttgatacatctcaatttggttcttttgccttctctttgatcttatctcttacgattgtgcagatctcaatctctatatccttggttgtgtcagattctcttagggtttattttctctcccaattttgtttgattccttgtccaaagtttcttcctttccttttgacttttttttgtggtacattgaatcagaggtgtaagagtaatagtttcataactcaaatccccaagtgtacaaattttcctcttttggttctgggtttggttgattccttgttagaaatgtaaatttagggcttttgtatctgaaaccgatcttcagacttgtgtaatcttcttgatcttcatgcaagattgataattctacaagaagaagaagaagagaaaatg

SEQ ID NO: 22543 - DNA, 3003 bp, Unknown
  misc_feature (1)..( 3003): 2750-1469P.txt file - cDNA_ID_2105965; gDNA_ID_2926145; Annot_ID_197706
aataaatatcataaatcttaatgattttgggttttacaacccttacttcataatcgagtttaaatagtccatagtatttgatctgcaagatttagtacatttgacattatcgaaaaacacatttcaacagaattttgaatttattcaagcttcaaaccatatcctccacaaaatgtgataaaatttgtcaaaattttttatataggatttgtttttataacaaattgtgaataataataaaagaagtcaccccatttctgtctttcaacttaaggtgactcaccacctacttaccacattgatattgtcatcttcgaagaatccaaactattttttcttctaatccaaaccttttcttattgttagtaaacaattcaagatcgttctaaactcaagagaatccgaggttccaattattgaaacgttacgttaaaacgtaaaataatactccaaaaaaatccatttttaaaacgaataatgaaaagagatgcttcgatcgtagagtcaaaaagttaaataaatataagaatttacaagacgaatggaaaacacaaccgcgtgttagtcactaatcataatgataagtgaaagtttaggtcacattaattaattttaaaatttgattaatctttgaaaccttttaattcacgtggttagggcaggctttggcaacaacgcgtagttggtgttgggtcggtggtcgacgacctagccaaatccatggctcatatttttatctccatttgtttccatagttgttttaatgatacgtgtacgtatcacttatcagatgaaaataattaattacctcgactttcctaatcatatctacgtttccacaataacagtcttcaaacaaatccattagagtatgcaatttaggagtgtcaaaataagtcaacattcatggattactcgaactcgtcaataatgttaattggtttaagtaaaaatattttacccatatatataaaggagttttaatagattaaaactaataggattataagtttaatgggcaaaacttattagagtcatgggttatccataggttttactgtttcaaaattatatttcagtattgattctcgtgttcttaacaaacagcggagtcgactttttcctaagcatgttcaagctttactttgtactagatctcccaaacccatccattaaacactcgaatctatatgaatttaggtcgggttgggtcagattggtttacccattttgacatttttaatatgcatgtaagaaaaggtttggagcaagttgggtggttacggctatcaagtagtttactgaaattccaaattatttactttatcacttacttcagtagattttttcgtttaacaacttaccaatagcagaataattgacatagtattgataattgtaggtgtaagatatagacaaaaatatgttggcaggtttatcaacaacaaaaattcaatttcacattgtaattttttttttaatgcaaaactttttgccaacaaaaattatgcccaaaagaaggaaaaaaattatacatagtgtacatttcttgtcgggaaaaatgtcatttaatctcccaacttttaaaaaatggtcattttatatatcaacttcgtatgtggccgtttaaaacatgaactaaacgttgactaatttttaaaacatgatctttcgttgaccaggccaaaatagacatgccgttatcagtcattaacggaatttctaacgtccgttatcatccgttaactttattagtcaagtttcaaattgtggtcattttaaacatcaactttttatgtggccatttaaaacatgaactaaacgttgactaccatttaagacatgaaaaatttgttgaccaagccaaaatagacatgtctttatcagtagaacctagaaaccgttaatgactgttaatctgtccaaaacaacgtcgtttgagaataatcgaaagaacataaagatttttcccatataaaatctccatatcaaaaagttttaagcagaacccatagtttgatatagagataatcacagtgccagtaattggaagcaaataaaagtgttttcgtttatatatttgttttaaattttaaaaggaatcatggaagcaaattgaagactcattataagattgttcgtcttgtttgagcggttgtagaaatagatttggggaactggagtttcatttagaaaacaatcctgattttcttttggttattctcaaaacaaagtcgttttagggatactaatagagtcgttaacaagtgataatgaatgttataagttcttttaatgaatgatgacaacatgtttattttggcttggtcatcgaatttctcatgttttaaatggtagtcaacgcttagttcatgtttaaaatggccacatataaagtcgatgtttaaaatgaccacaatttaaaacttgactaataaagtcgttaacggatgataacgaacgttaaaagttccgttaatgactgatagcggcatgtctattttggcctggtcaacgaataatcatgttttaaaatttaatcaacgtttagttcatgttttaaacggccgcatacgaagttgatgtataaaatggccatttttaaaaagttgagggattaattgacattttttccatttcttggctccttttctctaacgtacatttatcagttcatcatccaaaaattcaaaattttcgaacacatgtttggatatgaaacaaaattcgatttgtctttatgttgctttcatatagaaaagtgcaaaactttgttagagctcatgtaacttcttaattttaaaaaacaaaacaaatcagatccaaagtgtaataaagagaaactctagggacttctttataaataaaacaaaaaacatttacacgtcttcgtgtaatttcgaagaaacatcgattctcttctcttatataaaccctcttcgtctcctcctcctctctgctcgaaacaagatccttcacttctctcaaactacgaaaactatg

SEQ ID NO: 22544 - DNA, 3003 bp, Unknown
  misc_feature (1)..( 3003): 2750-1469P.txt file - cDNA_ID_2105982; gDNA_ID_2926132; Annot_ID_196993
cgtgatcgattcctctctgctggaaatagaatagctgatcttctccaatcttagaggtactcgcttcgtgctctactttcgccgatggattctttacctgttattgttccagaccaaccacaaaacaaaagtggaaatcaatcacaaaagagcaaaaaactttacagctttctcatagcttataataaagattggatcattggcaatttacctggatgtaaggataggtatttgcagctgctttgtctccgataagcattgagtcgcaagtcgaagtatttttagcaccctcagctttggactgcacctgaacaagaccacggtaacaatttctcgaatgcccggccgaaattccctttgaaatgattctacttttggtattctttcctttgtgaatcatcttagtccctgtatcagcttgctgatagttattagtcaatgccacggagtaaaactcgccaacagaatcatcgccttctaaaaccacgctcgggtacttccaagttatcgcagaccctgtctcaacctgagtccacgagatcttggaacgatccccagcgcaaagaccacgctttgtgacaaaattataaatcccacctttaccttgttcatccccagcataccaattctgcaccgtggagtacttaatctcagctcctttcccacaatagagctcaaccacagcagcatgaagctgattcgtatcataagaaggagcagtacatccttctaaatactcaacaaaactcccttcctcagcaacaatcaaagtcctctcgaactgaccagtctccatcgcgttaatccggaaataagtcgaaataggcatcggacatctagtgttcttcggtatataacagaaagacccatcgctgaaaaccgcagagttcaaagcagcgtagtaattatcatcactaggcacaactctacctaaatacttcttaatcaaatccggatactccctaatagcttcagatatcgaacagaagataacaccagacttctctaaagtcttcctatgagtagtagcaatcgaaacactatcgataaccgcatcaaccgcgacattagccaaacgtttctgctctgttaaaggaacacctaacttatcgaaatactcaagaagctgaggatcaacttcatctaaactattcaaagttggtttctttttaggagcagagtaataacacatatcctggaaattaatcgaaggatatctattatctgaccatttaggttcttctagtttcagaaacttagcataagctttgaacctaaactcaagcatccaatctggttcctctttcaatttcgaaatcaaacgaatcgtctcttcagataaacctttagggattgtgaaggaatcgatatcttcaacgaatccgtacttcttatcgtaatcgagattttggaaatactgttgaagtttatcagttgagctaacggttgatgtacctgatgatgatgattcagaagctccgatgggacgagaatcgattccaacatcggctctgagtttgaagatcggtctcgttggatttagggatttgggagatgggaattttaaggattcgggttttgggtgaaacccttttggtgattttgaggaatcggaagtgggttgtggagagaagctggagataccgtttgcgagaagagacgccattgttgttggtgtggctcttaggagaagtaaaagaagattgtttttttttttttttttggagtcgtgtgttagaaaaaaaacaacgattaggaaaaaaatgaagaagagatgaaatgttaatatttatggaattttctgagccgtagattgaagatagtctcgtgtcagccacgagacgatttttttgttggattttcacttttcagctcaattataaaccacatacgttttccactaactaattataaaaaaaaaataacgttgatctcttctttatttgttaaaaatctcttttagatattagatattttttatacttggacaaaacaaacaaagatattagatattttataatccgatttacgggttggtttcttgtttttgttaatgaaaaaaaaaattagtttgatcttttatttcaaaaacttaataatattttattttaaaatttgttggttcattcatttcagtttagtttggtacactgaaatcagttttaattctttttttttctcatctgaattatattagaaactaaagtagaatacaagttgaaatacataagccaacagaccaacggaatattttgagaaacttagctgaaaaaaaggaagtaaaaccaaaaacatatataaggaaacattttaaaccaacgaaattgaatcaagagacaaaattcaaaagaaaataaaaaactatgggaaaaataagacctaaacttctcctaaaaaatgtgaacgccggaaacaccaataagatcggatagattttacaccgaagtcaaaactaatagtaaatcgacagagaggaaagcaagaagccgctgaaaccagagacataagtacaaacaccatcacacctcacccaccagaccgagatagcaaaatgtactagggacaaggcataaaccttgaagatctactagagataattaaagcactagacacaatcagtatcgattctacttgggttagctgattttcgagccataaactatttcgattctcagctttcacccccggacttttgggcccttaaatttccaccatcaactttcatattcccaaaattacatcatctactttcggattcatgcttaaacatacatttccaattgaaccattcatttaaccgggattaaccacaaatccgcgtttactgtaccgcgattgcgattaacccgactaatacccagacccgttaagaaaacgacgtcgttttcatttcgtttaactcatcaaaaagagaaagaaaacgacgtcgttttcattcttcttcttctgcaaaatcgatttggtcgattagggttcttcattcgacaattttataagaaaatg

SEQ ID NO: 22545 - DNA, 3003 bp, Unknown; identical to SEQ ID NO: 22544
  misc_feature (1)..( 3003): 2750-1469P.txt file - cDNA_ID_2105982; gDNA_ID_2926132; Annot_ID_138792

SEQ ID NO: 22546 - DNA, 3003 bp, Unknown; identical to SEQ ID NO: 22544
  misc_feature (1)..( 3003): 2750-1469P.txt file - cDNA_ID_2105982; gDNA_ID_1621196; Annot_ID_174740

SEQ ID NO: 22547 - DNA, 3000 bp, Unknown; identical to SEQ ID NO: 925
  misc_feature (1)..( 3000): 2750-1469P.txt file - cDNA_ID_2105990; gDNA_ID_1620338; Annot_ID_153855

SEQ ID NO: 22548 - DNA, 3000 bp, Unknown
  misc_feature (1)..( 3000): 2750-1469P.txt file - cDNA_ID_2106002; gDNA_ID_2926239; Annot_ID_142841
tcctaaagaacatgaaaacattcgacaatattgaaagggtttgatgttatttgacatacagaggattaaagccacatcacatggacaacacgagactgtctgaaccgaacaagagatcttgactatataatttaaccaatgattttttgttttaattattacttctcgttatcttgtttttttttttttttctgggtggggtggtggagtccattttgatttcggtgacaataacaatttcacgattgagaatatcaaatattataaatgcttttatattagtattttgggaggttacttaagcctgtttgttttcataattcccttttctttgcttttgtctccctctttttctgttattatatacttcatgtttgtttccaaagtaaaaatataattggctgcagcttctattcccaaccatgtaaccatatgggaccttctttgtttcctcgtatattcaactatttctttatacaattctgattttaaaagtatttggttgatcagataagttgcttagtaccagtgatccttacttgctaattacctacacaactttgattactagtatatatatcataatcgctaacctaaccctatatatattttgggaattttggattttgaattaacaaagaaatagcttagcaataacaatatgttaacaactattttgcattttcagaaacattttgaatttcttagtatgctctactcaaaatttccagcttaatattcctggatcaaaattctttataaaaaaaaatatataaaaaaaaaactgaaatgtgaagttgttaaaaaaaataaaaataaaaaagatactgtaatttgaaacattcacgaatccatctgctattgtactttaacccggaacgcaaacagtaggttataattaactaattaatatattcgtccgcacaattaatcagacacctaaaccgaatataatgtccggtacaaagtacaatccatgattaattattgattatggactcgcgcagaacacgcaaagatgaattataaactcaaaacataaagaagccaacgacagaaaatattaatttgcagctttgattgccaaacaaaaattaggattatacttggttggatcgcacatgttaccgtcgcttgcgtaggctccactgtcacatgcatacacggcagaccatacccaatttcctcaaaactttagacttagccagagagagagaccttcgaatgttttgcttgcaatgtacgcttatttaacgtatgaaaagttctacaaaataaaagatgtacgcagctctttgactctagggttttgtgaagcatcatgacatattctcatcaacggaagcattcgagcacattattgagaatgtttgaaatgtttctcttgttagtgttaccataccgccctcgaacacaccctcgacccctatcacttgacactatacccttgtcacagccacaaatgttcttgagaatgtcatttgacacttacaacttttacaatcgttgtggccggcctttgatcatgtcgataattatcacactcatcattatccatgttcatgctatgcatttctagccaactcattcacacaatttatagcatgatcactcgcaaataatcaacttttttcatacacattacatgtaaaataattttagagcatagttgctttaatcccgcatccaagaatttattttagacctacaaatggccgcacgcccgcacctatagaaagaattcacatttcgtgggtttcgtgaaaagcccatataagggcccatataaatagatcagcccaaaggtatttccaaaaattcatattagccccataaaataaatttaagaacacagaaataaagtaataaaccatcaggatcaggcaggatgatttcaattttcaaatgtataagttgattggtcttttgaagaatactaaacattgtcggcactatttatcaatgatcataccaagcaaagcagtccatatattcccaaaacaggaattcattaatatgaagaatatgtcaacgaaaaatgtctatatcttgcttgggagagcgtttttgaggacatcgctaccaataaagaaacatagatgagtacctcgatgttttctagtttgtatcatgaaggcagcccaaaattcgataaaagaaattcaaccacgacaatgatggcaaaaattaagtcattagttgatcatttttcttcttcttgatagtagaagtcttgaggtttctttttctttttacatatacatatgataaaaatttaatcctatcatcaaacgtgcaatttcatggcaatcacatgtcgatcctaatccaacggttaaacaactcatttacaattaaattcactgccagaaatgtcaggtaatactaacgaaagacatctgatataatgagatccttgtgctacttgtttattagcggatcatgattcaacttacaaaacatatcaatatataagatattttttggccatcaatttgttggatccaaacacctcagagtttttaataaaatttaaatgatatttataaaactaaataaaatatatagagataaaagtttaagcaattactagcttctgtaagacaaaaatgatacgttaaatgaatttattaaattttatacaagtttgtacgtaattggattcgttgcttagtacgggttctaaagaaacaattatgaattaattcattagaagatctcattatcgttatgtcggtctaagaaagatttttttgaaataattattataaagaaacaaaaatctaaatactttagcttggtaccgtacgatttaaaaatggacggttgagatgaaaacaaatgggtcataatggatcctgcatcagaagaagcatcaacgaaacttccaaatcctttatataacttctcacaagtcaccaccatttctctctagaaaatatcagaaaaacaaaaccatctcaaagtttcttgagaagaaaaaaagggtcaagaaagatg

SEQ ID NO: 22549 - DNA, 3000 bp, Unknown; identical to SEQ ID NO: 22548
  misc_feature (1)..( 3000): 2750-1469P.txt file - cDNA_ID_2106002; gDNA_ID_2926239; Annot_ID_204012

SEQ ID NO: 22550 - DNA, 3000 bp, Unknown; identical to SEQ ID NO: 2181
  misc_feature (1)..( 3000): 2750-1469P.txt file - cDNA_ID_2106006; gDNA_ID_1620499; Annot_ID_158794

SEQ ID NO: 22551 - DNA, 3000 bp, Unknown; identical to SEQ ID NO: 1672
  misc_feature (1)..( 3000): 2750-1469P.txt file - cDNA_ID_2106017; gDNA_ID_1620434; Annot_ID_156928

SEQ ID NO: 22552 - DNA, 3003 bp, Unknown
  misc_feature (1)..( 3003): 2750-1469P.txt file - cDNA_ID_2106021; gDNA_ID_1620307; Annot_ID_152846
cagatccggagtctgaatctgaatctgaaatgggttgctcttgtgacggaggctgtggtggtgatttccaccggaactcggtggtggcggttccggccatattagtcattcttcttcttcatctccttcttaaggacaaagtccagaaatttgggggggaataagaagaagaagaagacacgtgatgctctcgtgagcattgtaatgaccaaattaccggtttaatttggatttaccggcttagttaagacagtttctagcttatccccaaggacttctcgcgttatcttctcgaagttgataagcacgatcacttatctatgattatcctcttttccttttttgcaagagaattaagtcatttaacatttccttaaaatcattccgatttaaaacagattatctaactcgaaaatacagctactcagttttgaacaccctaaatcatccaaagatctcatatacaaaaggatctctaaactcaaatcaaagtcacagcccaaagcataagaaacttgtggtagattcaatctatgaaggcatgttggagctcatggcttgatgtattctcgaatgaagtcttcaatctggatggtttctccggtaagtccagatgcctcagcgacagtgactttgttggagcaatgcgtgaaggagaacacttctccctcaattccaatggtgaagtcattcgctatatcagcagtagagactgcactccttgaagccctcagtttctcactgcaaaaactcatcaaccaatgatgattagcttttatgcaggaagataggctttatatataagaaaattttgtcaagaaaactgaaattcttacatttctttctccatttgcttccggataaactccttggtgtgtgcagtgagtttatcggtcttgttacagcaaaggaggactggaatcttcttcttgacaacattcgcattggtcagaatctcgtataggtacctatcaccataaaaaaccatggcaatgcctcattttcaacattgagatgcaaacatatgcaaacatgtctcttatctgtgtcttacaatgcgtgtgtgtggaagagagagggtgtttgaaattactctgaagctgcacgacagtttgggaggaactccaaggcatccactacgaacacaatggcagctgcttggggcaagaattcttctagcttgggtcgaagccgagagtgcccaggaacatcaacaagatgaacaggcttgatttttcctttctgtcacaaagagcaagcacgggacatggtttagtaatatgttattccatccatcacaatcaactgcacgtgttgtttacaacagaacacagtaagattctttaccttagtattttcactgtgaagaacaaaagtgccttcatttggttccattgatgttacagtgccctgatgcgacgatccatctcggagctgccaatcaaacaattatcgtgttataactctccaacaatgacctagtcactcacactgactcacaatagtgacacattacaaaaaaaaagtacatttgaaggaaagtcataaacaatattcatatgaaaaaggtaacgtcaagccaaaacactcacttggtaaaagagcacagtctttccacttccggtcagcccagaaaggagtacagtgttggatttggtacgtctgaccaggcgaactgcataccccagcaagaacaacaagtttagcaacaaaagatcaaaagtttgtttatgtataatcaaagaaaaatcatgaataaacctcagaaattgcaataatagttctaattccaatacacaaaatactctggcttaatcacaagtctaaaatggtaccatgagaactataacctctgcagttgtaaacaatagcaggcagaagaaaagtaattgaagacatttagaagaagaacaggctatatgtccttatcaatggcaaacaagatactaccagggggagatcttacataaataaagcaattctactaggaaaggattaagaaacaacaaagtggtgtctaatacatactggataggaagagcaagatggttgtaaacaacaaaacaccaatggcggcatacagctgattcggtggtatcttctgaagatattcaattccttgatgcgaccactgctcagccagaattttcagatcttccaagttctccattactctctcaagtttcacttcttctgccaagctgttcaaaacctgcatccagagatgtaattcattcctcttaagacataaaaataacctagagttaactagaaaactctcttctcctacacaaacaacatgcatgggaataatttaaaactgcttcctgaaaacaaaaattgaaatcggaactctctaatatttgcaaacattatatcaatactggttctcacattatcatgttcatccttgtgataaacccagtacagtgacaataatcatcttgtgaacaaggaacacaatttgtttatcccaatttaaaaccagttttaccagatcaatacaacccgtagacccatacacgatcatcccaagttatgaaaagataaatgctaatcctacattgatgcgctgtttcaacgagatgtaaaaaaatacaaacagattcctctaaaattccagataatgaatatagacaaacaagagctaaaatttacccaagagtaaatgaatccatttggtggaagagatagaaacgcaccgatgggagaggaggcggaagacgaatacaacgacggtggaagcggagaagaacacggcgacgatgatttagggttcagatttaattttatatattaaaaccagttagtgcttcttcatttcaatttgtttcgaagatagttaatgggccgaataaaagcccattaaacgtcaatacgaagtcgtttcaactgtatctgcttcatcgcttcttttctcccttctcttcccgccgtgaatctggtgtctgtgtctgcatctccttccgacgaaaacagatacactcgagtgaagaaagtatg

SEQ ID NO: 22553 - DNA, 3003 bp, Unknown
  misc_feature (1)..( 3003): 2750-1469P.txt file - cDNA_ID_2106027; gDNA_ID_1620475; Annot_ID_158138
ctacaccgtcatgaagagagcctttgatgaaggttggggggccgtcatcgccaaaaccgtaagctcttgagatttgactttttcaattttagagtagatgatgattgagtctgttttgcgttgactatgttggaacataggatttggttgtgtttgtgtatgatgatgatgatattgagtttcgtctgaatctgtgattggatgatttaggtatctttagatgcatccaaagttatcaacgtgacacctagatatgctcggctacgaaccggatccaatggctcagccaaaacagatgtaattgggtggcagaacatagaactcatcagtgacagacctcttgaaaccatgctcaaagagtttgagcggttgaaaaaagagtatcctgatcggattctgattgcttcagtcatggaggaatataacaaaactgcttgggaagagcttatcgaccgtgttgagcaaactggtgttgtgagttttccctaaaacacagattcttattcttccttgtggttagattctctttcactttgtctgatattagtatacattgttgaagagacagttctggatgattgttgtgtaggatgctttagaaatcaacttctcgtgtcctcatggtatgccagagcgcagaatgggtgccgctgttggacaagattgtgcgcttctcgacgaggtttgcggatggattaatgctaaagctacagttcctgtatgggctaagatgactcctaatattactgacataactgaggtgtgacatctaattctctcagcctttttgcttcctggtttttcaaccattttgtataaagcctatccttgtagaaaatgaaaaaaaaactttgatgcaagtttattgaaaagctccctacttaaagctgagttattgttactctgttttgctctgctttgaccatgtccgttttgctttttcttttgaatagcctgctagggtgtcactaaaatccggatgtgaaggaattgcagcgatcaatacaatcatgagtgtaatgggaattgatatgaagacgttgcgtcctgagccatgcgttgaagggttagctagatagcacttttataatgtcaaacgttttggcaaatcttgtaatggcattacaagaatagctaacgttgatagtgttttgcagttactccactccagggggatactcttataaggccgttcgcccaattgcactggcaaaagttatgaacattgccaaaatgatgaaatctgagtttagtgaggatcgctcgctttcgggtattggaggagttgaaactggctatgatgccgctgaattcattctccttggatcaaatactgtacaggtaactaaactcaacactatcctcactcttttgttttagactttatgccttgagagaaacttagttttactgctttttgttggaaggtatgcaccggtgtgatgatgcacggctatggtcatgtgaaaaccctttgcgctgagctgaaagatttcatgaaacaacacaacttctctacaatagaagagttcagagggtatgaacaactttccttttagacttttatatcattcttttcgcttgcttggttgcttgctgagcaagttcttcgtgttgtttgttggcttaggcattcgctgcagtactttacaacacacacagatttagttaagagacagaaagaagcagttgagcagagaaaagctgagaagagaggcttgaaatctgataaagattggaccggggatgggttcgtgaaggagactgagagtatggtttctaactaagttagtagcctgatgaagttatgaccacccaaatatttcaataaaggttcagcaacttcattcacaactcacatgcaaattacgaaggctctttctttcaaatgtttaaaatcaacttcttaaatctcacttgaaaagaaataactaaattttatgtttcttaattttcttctcgttgtgtattattcatcttgtatccatccatagcaaccatttctttgttacttcaagttggcttaaattttggccaataataataccatagaccttctccatgaagcaagatgttgcggtagtaaccttttattaaggtgtgatttggctaaagaaacttggtcttatatcattaaaattagatattgaacaaaatcaagtatgagctgatagaaccaagattagtaggaagctaatcaaacaactctggatacatttactaggaaaatatggtcatgcttatttttatacgcatcatttgaatccgaagaggggaaaaaggcaacaaaacgggcttaatgagaaattgactatggaagaaatatcaaaaagccaaaagtggccacgactttctgcatcgcaatgatacctatattagaagctacttaaaaattttaacacaaaaaagaaaaacatttagtttcctcctaccttacctacctacgtttacgtgatcatcaacaattctatttttactaatttactcattaatatatcttctaaagtatacataaacaaacaaactgtacgaagaaattgaaatataaatatcaaggaaattggtagcagttgttgagttatttcaatgatgctgtgaagtggaaacatttattacgtaacgcatatccgttttgtatataaactcttatttttcggctgtatatataatctttttagagattttccgtgagaaatagattaaatattgttgccataataacctgtaatctcaggagaatcctaacggaaaagagaatattagacgatagtattatatggagtattaattacttattaacaattctaggagataatatcagcacacaacaataaaagaaattactaatttactggaatcatgtattcaccgtaattatttaaggagaggaaaaaaaaaatacaagctctttctctataaacacacactctcaggagagaagttgtattgatcgtcttctctttccctaaacacactgattattttctctccgacgccgccatg

SEQ ID NO: 22554 - DNA, 3000 bp, Unknown; identical to SEQ ID NO: 6663
  misc_feature (1)..( 3000): 2750-1469P.txt file - cDNA_ID_2106051; gDNA_ID_1621100; Annot_ID_171353

SEQ ID NO: 22555 - DNA, 3000 bp, Unknown; identical to SEQ ID NO: 6663
  misc_feature (1)..( 3000): 2750-1469P.txt file - cDNA_ID_2106051; gDNA_ID_2926168; Annot_ID_199273

SEQ ID NO: 22556 - DNA, 3000 bp, Unknown
  misc_feature (1)..( 3000): 2750-1469P.txt file - cDNA_ID_2106055; gDNA_ID_2926252; Annot_ID_204399
ttttgaagtcaaatcccgagcttttgttcagttctgggtcatcaccgcggttttggatgaatcaaccagttcctggttcgagtatttacgatcgagtcaatggctctatgagcgaggccctgaagtctgttgttgtcaaggaaagtgaaagactctatggagaagaattagcagtaactgttcttgttactggtaatgtggagaaattgaataggttagatgttgggaacaattgggattttctagatgtgtggttgcatataggtgcatactcgcctttaggcccgttaggtgttggagaaaatgccgcgagtttggctttggttggtcgtggacgagatgtagctgctgctaaatactcagactgggttaggtattgtgcttgttgtgctcatttagctgattcttgaggatactgatagctcaatttttcagggatttagcttgtggattacttgagttttgttgtttctttcttaatctcggtatggtttatgatttaggcaggcttaggaagcctctggagaagtttagacctcctttgaccactgaacttcttttgtcaaacgatggtgatcatttgcttgagggctgcatcacaaactttttcgtagtttgccgcagggtactaacaaaaatttgatttttttttgttcaagcacaagtcacctatgttgtgattaggatgtttattgtcttcatttatgttgcattttagaagtttgaatttcattttaccactgcatgatttactgtttgatctcattttaggtgaagtcatcagagaatctctacggcgggagtttgagcgagtttgaggtgcagaccgcgcctataactgatggtgtgctagcaggagttataagagaccttgtcatcgagtaatatgttagaccattaagaatgttgattatattcgtctgtgtttatggcctgatcaaccaataagatttgcttttctgtcagagtgtgtttaagcgaggggattccataccgcgagagagcaccttcgtggtctgagcgtgagctttgggaagaagccttcattacaagtagatctttccatatccataatctgttttttcatcttctcgcatatatattggcctgaacactttcaatgtgttgtgtgatgtttgtatattttaacatcccaagaactcactgggttcaggtagtctgaggattttgcagcatgtagggacgatcaaagtacccgttggttcaatggagggattggcttgtaacaaacctgaggagattcaatggaaggagaaaaggtttaaggaaagacctgggatgatcactgaattaatcaaggtaaagcttgttacttttattacccttagaatcattggttttgttcttgtcttttgagtcaaatcaaagatagaaatcactttaaagtttttgtttgtcactgttatgttggagtagaaagcgataatggagagaggtattaaagaagggttcccgttgaaggccttttagtgctcttcatgattttgccaaatagctgaaatgttgattcgtctatggtttgtaattgtattgacgccaatatcttcccaaatcatcactcattataattttaacgatctgatgtttaaaaggttctcagttatatatatctgtataattgatcagtagaacatattatttaacggattttatggagatactccggtaacttattaaacagatctcatgaaagtaatcagtgtcaagaaatgtcaagactgtatacatatgttaatatgctaaaccacaacgactatcacttcccaaaacatggttatgatgttgatatgaccctccaaatccacaagtgtgtatgtgtatcaacgtcaaagtattgaatataaagagttgtgagtactaaaaataaaagcaaactaaaaatatagtccgtatggaatgcctttaaaactgcttgtagtggaggaaaatagaaatttggaggacaccaaattttccccctttttttttcttttttttttctagtaaatcaaattaattaatatcataaaaaagattagatgatatataagcatcttttttttttccgtaaatcaaattaattgatattataaaaaagataatggggtgattgacatcgcattgtcaagactttaaaactatttaacaaatgataaatcacattaattgacaccatgtatgttttggatatgtttgataaaaatagtttactagtgaaaaaaaaaatatgatccacacccgagggagtagatttaatttttttttttcttcagaaaatcagctatacattaattatgtattctgacttaataattggtcgggtttgcaaatcttttatttttttggtaaacatgtgaagaaaaaaatagaaggtttgtaaatctttcaatattgtttgtacattttccataaatctttcaatattgtttgtgcttcatcaacatatagtcaacacaaacaatgctacgctcttatgaggttctgcaatatgagtagcttggacgaggtttctgatcaatagatctgttataatattataaaacatatcgattctaacagattttcaatggatatataatccgataactttttagacacatctgatgagtgatcactgtaaaaaaaaatacaaaaaaatcaaaaccatgtgtatatatgctaaactacaaatataaaattaccacacttgtacaatatataataaaaataaacatcataatactaataattacgacactattggtcttggtttggtttatatgcacgactccggctttaaacaataaatccaggagcatgacacttccacgtccttggctagatctaagtttaagtcaacgatgactcatagtggacacgtgtcactcgttcattcgagttatccacgtgacttcttattacagtcttcttgactctttttttttttttttttttttgctgaaaattataaaaacccaaaatccaacaaactttgattacacacacttacatacaacaatg

SEQ ID NO: 22557 - DNA, 3003 bp, Unknown
  misc_feature (1)..( 3003): 2750-1469P.txt file - cDNA_ID_2106101; gDNA_ID_2926145; Annot_ID_197697
agtaccgccggtcaagtcagcgggcagacatttcgaaacataacttatcccgccaaacaatttcgccatccaactcaagggtacgctcatcatttcccggccttataagtacctactctcacaagcccaccgaaatgtgtcttaccattagtttttgggctgaattgtaccctcccgtacaaaagcccctataattcaagctttttgaggactttgtgatatgttttctcctgtcacaatatttaaaatataagcaaaaatacattaaaataaaataataagcttactaaaaaaagattaaataacatgattcagaaacacttccataaatttagttatagatgaaactactgcgtgatatttttaagaaaataaatgcctccataaaattactaaaaacatactctaaatactttatttcatgtatcaaaggaaaataattagaacaatataactctacaattgttttcttcccatatgttaggtttaaacatttgtgatatacatgaatgtctagcaaatcattagacgtaaagtgtaaacactagtaaatcaatatttataaaatataagaatctactaaaataaataccataattttatgataaaacggattcgagttctactctgtattgtaaaattatcacatctaggctccgaatgatgacgtgcgattcaactacggataaagtgcggtgtggttttaatagtaacaaaaatatatacatatacatacatggctggtcccgactattcggagaccaaagcaacaagttatatattttgggattattataaaatattttaaattttggaggcctttttcttagaactgaatatttttggaggcctatttgcaaataagttttggtgtaaatttttgaaagaaaaatggggtcatattcaaatgtttcatgtggctcccttaaagactagtcttgtatgtatatatgtagatatttttgttactattagaagtatacgatactgtgtggtctgttctctattcggaaccctagtctgaccctttgttcaaaaaatcggccgcctagccgggcgcctaggcgctaatcagatgggatccacgacaatttttttcaaatcgagaagattaatcgttgatccgatttttatccgtatagacccgcctaaatccgtctagagggcgcctatcccaaattttttttttctaaaaagaaaatttaaaatttaaaatatccaacttatgttcgtaatttgtatgaaaaatcatatatttgaacctacaatcttattttcatatgtttaatataattttaaaaacaatattatataaatttcttaattataatgaattaatatgttttaaaaatattaaacaaccctaaaactaatccctgattaatttttgtataatctctgatttttttgttaggcgctaggtccactcttactgcccgactagcgcctaacgattttttgaacaaaagtttgaccagataatataaaatgatgaaatctagcttgacgagataataataaacttttcgcatggatctgcatttttttgagtaaaatagaaaagtggaaaaatgaaaaaataaaataataatatattaactgtttttattatataaattttacttttacgcaaaattatatattaaacgtcacataattaaaatcccttaaatctttatcctactgtatgttctgaatcgggcttttgtattttgattcgtgaaaagtctttcacttcaccggaccgaagatgattcgtgaaaagtccacatttcacatttctcaattcacacttgtgctttcgaaatgggcttttaactttggtcctaaagactttctctcatctatatgtctctgaattctaggacacagtcaacaagtcaacgtcggtaagagatcccacaacaacatctacacagacacgtgtacactatctctcactttttcaccgacacgtgtcggttctttcacctacaagtaaaactctctccattatcttcaataatgtcaaaaatgtcacacacacacttagtcatagtaatacccaatttccacggcacctatttgccatcgaacaaacaataaaaaactttattagttttcacaattaatacttttaactctttcccgagagtcgtaagaagagaaaaaacaaaacttttttctttttcgttgaagaatttttacataaaagttttgtagattctctgatcagaattgtgtaaaaggtattctctttttttttacttgttgaagaattaaagtaagtaaataattgatttcttattggagggacccttttgttgtcatagaatttactctgctgcgtttttttttactgttgttgctttgttcttgttgtttggttgtatattgttgatgctctctctctctcgttaggtgaagtagatctctcttttctctttctctttctcctctctctctctttccttactcagcttttgtggtgaatattgaagaaagtttctctggtgaataagagtttgttcttatttttatgaatttgttctgttttcttgttgatagtttttgggtttgataaagttgtttcctttttacttcttttagtatctatctttccaattctagtaacttcactggttcttgagctctttcaactttttgtttcagatctctctgtgtttttttctgatctttctccagtggtagcttctgagttagtgattgtactttacttccatacttcttgttcttgctcatagattttagctgtggttttgtggagttttagctctcagtgattgttttagttttagttccttaaacatgttttgttcatatgggtttgttagatctttgagttttcttcatttctttattatctctcttggatcttgatacaaaagtatgaatctttagattgcttcaagaaaaaaagttttaaagactttaagagattcttagatacatagaatttgaagatcttgtattggtttttgtgaaacagatatttgttagatg

SEQ ID NO: 22558 - DNA, 3003 bp, Unknown; identical to SEQ ID NO: 22557
  misc_feature (1)..( 3003): 2750-1469P.txt file - cDNA_ID_2106101; gDNA_ID_1621187; Annot_ID_57451

SEQ ID NO: 22559 - DNA, 3003 bp, Unknown; identical to SEQ ID NO: 22557
  misc_feature (1)..( 3003): 2750-1469P.txt file - cDNA_ID_2106101; gDNA_ID_2926145; Annot_ID_139080

SEQ ID NO: 22560 - DNA, 3003 bp, Unknown; identical to SEQ ID NO: 22557
  misc_feature (1)..( 3003): 2750-1469P.txt file - cDNA_ID_2106101; gDNA_ID_1621187; Annot_ID_174502

SEQ ID NO: 22561 - DNA, 3003 bp, Unknown; identical to SEQ ID NO: 22557
  misc_feature (1)..( 3003): 2750-1469P.txt file - cDNA_ID_2106101; gDNA_ID_1620778; Annot_ID_167821

SEQ ID NO: 22562 - DNA, 3003 bp, Unknown; identical to SEQ ID NO: 17756
  misc_feature (1)..( 3003): 2750-1469P.txt file - cDNA_ID_2106105; gDNA_ID_1621088; Annot_ID_170578

SEQ ID NO: 22563 - DNA, 3000 bp, Unknown; identical to SEQ ID NO: 17757
  misc_feature (1)..( 3000): 2750-1469P.txt file - cDNA_ID_2106105; gDNA_ID_2926212; Annot_ID_202702

SEQ ID NO: 22564 - DNA, 3003 bp, Unknown
  misc_feature (1)..( 3003): 2750-1469P.txt file - cDNA_ID_2106109; gDNA_ID_1620315; Annot_ID_153135
atttggttcttgaggttgtggttgggtttgggagctaccaatgccaaggcaaagatccaaacatattggtgacgatagtggttgaggttgagattggggtaggaatgggatcccggtaaaggtccaatcctggttcattccttgacttgggtcactttgtagtcctgcaaagctagagcttgaggatcccacatattggttgtagaccatggacatcttgtatgatctatcaactttgtactgaggctgttcaaatcccggtgggagtgcgtattggttaggaaatgaatgatgatacgaatacgagtacgcgtaaagatctggttctggtcggttcaaatgcgccaaaaatgctttttgttgtttttcgacctctctctcctttctgtgtgcattttgatgaccacctaatgcttgtgttttatcgaacttcctaggacaatacttgcatttgtatataggattctctatcgatccggtggcggaggcatcgtcgctaatatcactagcgtaattcgagtccgaggacaacatttcgttgtcgatcggatcgggcttttagaaattaggtttgatggcttgaatatgttattgcacccggataggtatttaaagatttaatactttgtatgcacttttaatatcaaggaaagttatatgttgtaatgttatgatgtttgaataagataaatgcatattgatgaaatatggaaagggacttagttatagagaaacatgatgaagaacaaagactaactgaagtacttaacaaactagtttatcatttcgacaactcacacataacatgtttaattactatatatatttgacattttacatttgccgaatttgcgtagtaaatttgtttctgaattaatacttgttgcatttagcatatttagtcaaaattagttccaaacattactgatttccaaagtgagtagggagattttggttttgccctattaaatttgagatatagttgaaaacaaaattatttagaagagtttaaagagttaattagtagatcttaatgtagtcaactttagaaaacaagaattaaagatttaattagtgtcattatgtagtaaacttttagtacataattatctcaactcttaaataaaatatttacctttaagttttctattgttttccattgcttgcaattttatttattttcatatacatcactttggaggtaataaaaataaaattattttcatatcaacataatgaaaatatatattaaaagtaagtaattaaactaaatttggctaccttttaataagagtagagaaactgatggaagcattttaccatcaaatctataatgctgattctcacatcaaaaaagcattaacttaataattttactatgacatatagcacattttcagactttcttgtgatatacatggcttagtatgacagattggattaaacttaagataatgaacatctatgtatagtcaaggtttaaacaagatattcaactctaacataccaaattaaaatctatatagtttcttagctatcttttcagcattaaaatatacagattggattaaacttatgatattgaacatctatgtaatcaaggtttataaactttgtaaacatttttataaatagcacattaattggagataagaagaaagctatatgtattataattagggttagtgaactttgagagcttggattgacgatgaacttccgccgtatcattggttctagtagccatctcttgaaaagggtctgtacaacggagtatgctccgacatcgatcagggttgatgtacttgcgaagacaaaagtggaaaataggaggatggagaagaagagaatcatgcatgttcgagaaactgcaatctctcactgagccggagggaatagcgcacacgttaaacaagttgatgaggattgagaaggagcacgaatccgtcaccagagaagatctgaagcacgtagattggatggtgcgacgacctgtctttccttcaaaagcaaagatattgattggttattagctacctgagaaggaaaaaggggactataacacactttcaacacatttcgtaaatcgcaactggtacctgaggctgtccaacacactttcgcaactgaaactcatggtttctttgatggattgtcttaatgaataacttaaccacggctttcagattttctctttgccttttaaatctctcttgtaattagaggtaaaatctctagtgcaatcttttgcattttgcaatttgcgcttctgagtcacctaggcttcttcctagtgcaatttttgaagggtcacttgcagcaatgacctagttcgataataaaacgaagcttatgacactgtactatggaaaattaagaaagtgcgtctttgatcgttttgagtaaatggttttgtttacatagaacatataacatgaaatggtatagaacaaagaaaacattctatattgttttattcatttaatctctatatcaaattactaaaaaaacacatttttgaacattttatatgatttctacaatcaaaaataaaatattgtaatgatttgtgttctatataagaaacaaaattttagataatagccaaattaaccatacaaaaaacaaagtaatgtttgtgtgaacaacctctccacttctgcttcccaagacaaatttgaccaaatgccaaagactgagcataagtaccaaacacatattgagaagcagcaccaaactgatctttgaggttgagaaaagaaaactgatcttttgcatatttttttttcaaaggattaacaacattgatttaaaatgggctttcagatgagtccataaaatgggcttaaaaatcatatttaatggcccataatatttgtttgcttctcttaaacggaaagagtctttaaccggcgaaagaaaccaccctctgactgttaagaaaattctcatcggcgtttagatcagaaacttgggaatcggagaagctcactgagaacaatg

SEQ ID NO: 22565 - DNA, 3000 bp, Unknown
  misc_feature (1)..( 3000): 2750-1469P.txt file - cDNA_ID_2106119; gDNA_ID_1620331; Annot_ID_153646
tcaacacgatttatttcagaagcattaggggaaatttaccagtgcagggtctatctcaaatgagtgagtttctttctcttctgctgctgctgccaattctgcttcattcaacaactccccaggtcctgcttcaagttcaccacttgttttgccgatcgtaaatccatcaccaccataatatggctagaaaaaaagttaataagttggttcaacatactgtggagaatacaatggtataagagatatcaatttcacattcaatgaaccaaggagtttaaaaagaaggataatgagtttatttatctattaaatagttcaagaaaaaattagaatttaaacacgaaaccaatagccccaagagaatcaggatagatctctctgccgcattggtatcaaaagatgcaaaaactgttgagaacaacagatcatggtatgtatttccatccagtaatagtaaacataaagcactaaattgaggagttcaacatacctcagaagtaaatcttgctcgatttatgacatcatcactgagaagccttttcaacacctaagattgtttatatttaacgagtgagcaaaaccaacagagaaactacacaaaaatcccatacgcataactagagaaagaggatcagtctggtgaacttacctccgggaatggtgattcaataaaataccgatttttcttcaataccaacttcactttcccataattagcagtagaagcatggatgaaatcaatgatctccccgggtagcttggtcttagatagcttattcaaaacagagatgatagtttctgtctcaagaccaacggaaacagcagcatacaacgagtgtggggttaaattatactcgtgcattgactcaggcctgaaatagtaacaaatgaatgaaaatcaacaacaaaaatcataacttgtacattgatataataatcaaatcaaaatcaaacctgcaaacgggttcagcaatggcgataagaaagtcataagcttgtttatagagaggagaaaatgtctccaagaaaatctttccatcagcacaagcccacaaaggcctatttccatgatccggcttcaactccaaatcagtaaaatctctcctcttctcctctccttcacctttaaaaaccattataaattctatttcaattttgttcccaatgtatctatgttaattatacgagagtaatcaatattaccatcacgagaatcctcatcagcatcatcatagtaatcttcaacgttttgtatgttcttcatcttttgatcatcctgagatttttacagtacaattacactaactagaagtgaagagcctaataaataaaaaaagtcatgtggagaagaatcaacacgaaccttcccaccgtacttcatcttctttgtaggtcgttttctttcatctaaacatcaacattttccccagtattagcatactcttttcaccggataattcaataaacgaatcaaaactcagtacgatcgagattcgagaccattaccgtttcccatattgattttcttcttttcgctcctcttaatcaaatcgattttagggattgtttctcttgtattttcaatttgtgaattcgcacataacctaaattgtacgacggagggaatatacaaccgtcttcgtggtaatttcccgttgtaagctattcaacgaagcaagctgcgtctccggcgaattcggattcctgtgtcgagtcggtgactcgtttgaagcggaggaaggaaattgttaagcagaaacgtaagaacacgattcatatataaaggctgcagtaacagatcaaatatgggcttttaataggattctttaaatgggctttattcttaagtttgagcccatgtttcttttttaaacatcgataaattatttgccggaaaaaaaatagtaataattttactgaaaatggtacttcccaatttataattttttggtcgacacttttcagccgattttcagttatgtaatttcattattgaaattttgaaaaatacattgtaacggaaaaaataaaataattaatcagctaattaataattgtattaatgaatttaataaatcaggtaagtaaatataatattgagcccaaaaagagtctttgtaatttcttaggaaagtcattttgatagagcgcacgataaacacagcaccgcaaaaagcacagaagcagagaaagacgaagacaaaacaaaaaaagcttcccccaagaacaaaaagtaaaattctctctatgattttgagatttttaattcctcttctctgattcaatctcgagaagatgatcggttcttctttggtgtttgttcttgctagtgatcgcttttctttaggttttgagcttgatttttgtgtgaaattctgtgggttttttttttactgttttgatccgtatttctcctatgtgtttatgctagattctgagaattctgatgtttattgttgcttttataagtttcggtttagggttttacggattagcttgctcttaatggagctttggttctttttgtggattcattgtttgtgttggagttaaattctgagtagaattgttttaagtttttggggtttagtgtaaaactgatttgaatttattgcaattgtgtgtagatggtgctaaagagaatgagaattgtaggagattcacataggcttgtagtcgcaacactgttgtctcgattttaatggttgatgtttattgtatctttgattattgagagtgaatttgaactgttagtagctgaattgttttattgttgctactagcatgatgagtctgatcagactttagtagacagctcaaactgatatcgaaaacgataaagcttgtttgagtttcttgcatatagatgataaatattctcctactgatctcagaatgtaatttgtttcttcacatatcttgtaggttagcatagatgaagagtcttcgggttttgtagtttttgtaaaacagaaaaaaaaaaaaagagaagaagagatg

SEQ ID NO: 22566 - DNA, 3003 bp, Unknown
  misc_feature (1)..( 3003): 2750-1469P.txt file - cDNA_ID_2106176; gDNA_ID_1620604; Annot_ID_161732
ctttatgcttacgtcatcgcacacgtctatcttcttttggttaaagtgataaaaaggaaagtcgtaaatggcttcgtcactgagtctttcctactattttaaccccattagtgacactcctttcttctccactacactccatttctctttcttcttgactcgaccatcgtttctctaatctccgcaactatggcttcatttacgaaaacggtgtgtggggtttcacgatcccgagatcatacttttttccctcctcgtacgtaacgatttttttttgtgattattaatccaaggttttttggcgtctcttttaggttttgatccctattgcgcacggtacggagcctctagaagcggtggcgatgattaccgtgttgcgtcgaggtggtgctgacgtgacggtggcgtctgttgagactcaggttggcgttgatgcttgtcatggcatcaagatggtcgctgatactcttctctctgatattaccgactctgttttcgaccttattgtgctccccgtaagtctctctgctgatttaacattgtccatttgttttgtttctttgtgtgtaatctaagaactaaggacagccaataagtggatcgatcaattatcaattagctcacttaactaaagtttcgaaagtgatgtttatagttcctactaagaacgatggtttttagatgtatctgttgcaacttttgttctctgaaacaacttcatagattcttgttttctgaaagatttcataattgtgttgctgatatactttttgatatgattgggaaaagggagggcttcccggtggcgagactcttaaaaactgtaaatctttagagaacatggtcaagaaacaagactctgatggccgacttaacgcagctatatgttgtgctcctgccttggctcttggtacttggggtctactagaaggcaagaaagtaagtcagaagtgatcagtatatttccaagggcgtttatttatctttttttcaggccttgtaatgtcttgttattacatggggtttcttgcaggcaacgggttaccctgtttttatggagaaacttgcggctacttgtgcaactgctgttgagtcaagagtgcaaattgatggaagaatagtgaccagtcgtggaccaggaaccaccattgaattctccatcacgcttatagagcagttgtttgggaaagaaaaagctgatgaagtctccagtatcttggtatgttttgtctctgcctcttttatcaaccgctgtggtacgtgttcatgtcacctcctcgtagacttacttgttatccttttgaaatcagctgcttcgtcctaaccctggtgaggagtttacttttactgagcttaaccaaacaaactggtcatttgaagatacaccacaggtaaatgttcagttgcctctccacttggcccttttaacatttttccaagacaggctttgtttgatccgttatacagattcctaggaacatgctgtgttgtaaagcttttgtctttcttgatcaatagtcttttatgagtcagagagataatgttttcccttttcagattctcgtacccattgcagaggagtcagaggaaattgaagctatagcgcttgtagatatcctgaggcgggcaaaagcaaatgtagtgattgctgcagttggtaacagtttggaagttgaaggatctcgcaaagctaagctagtagcagaagttcttcttgatgaggttgcagagaagtcgtttgatctgattgtgttacctgtgagtattgctaacttccaaaatgtgaatatactatttagtcttaaattaaattttaatattctatgatgacaaataaccaaaaacataatccaacttctttgatgaactacagggcggtcttaacggtgctcaaagattcgcaagctgcgagaagctagttaatatgttaaggaaacaggcagaagcaaacaaaccatatggaggaatctgcgcatcgcctgcttacgtcttcgagcctaatggtttactcaaggtgcataaatcaaacagtactagaattgtagtttcttgttctatcttttaagtcattaaactgagatataagagacatgttttgtatagggtaagaaggctactactcacccagtggtgagcgacaaactttcggacaagagtcacattgagcacagagtcgtggtagatggaaatgtcataacaagcagagctccagggactgcaatggagttttcacttgccattgtcgaaaagttttacgggcgagagaaagctcttcagctcggaaaggcaacacttgtgtgatttcaaacaatgaaagtatgagagtggcttgaataaaaagaaggctttgccttttagttatctctctccattagtaattacttactttatgatatatgacatatgagcttggcttagtgattggtgtgtaactttatgcctttataaatgaataaacgagatttttctatgtatgttgccgatattttctttaaacctctgcaagagctagagggtgtgctggagaaaaaaattattttatggagaaagatattttagtcacacattttcaccaaattgaccttacaataactctaaaatacgaatttgcccctatgtttagctttggaatatttcatatttgtaaaccatttaataatatgattattaccaatttagtgaaaataaaatcttcagtcttctcttcttgtataaaaatagcttttttatcatttgaaaacagagtaatgtcactaatttcttggcgaaaatgtgtttatttgtaacttaaggtaaaataggggcaattttgttgaatctgataagatcagggggtagtaccgtagatttcgctgtccagttcagttatgaaatacctaaaatgccctcgactcataatctactattaaaccctcataaaacccttgatttcatttctagctcatctgttttcacactctctcctagggttttatctgcgaagcccaatctagagcttccatg

SEQ ID NO: 22567 - DNA, 3003 bp, Unknown
  misc_feature (1)..( 3003): 2750-1469P.txt file - cDNA_ID_2106191; gDNA_ID_1620355; Annot_ID_154451
acctttttaagaagaagaaaaataccctgcctaaaaccaggtcattggaaatagacttcagacgcacgaggattttctcaaaaatttctcaaaaaatattgaatgttgatagaaaaaacacaaaaattccttccatttttagcattatatttgtttcaatatgtatataaataaatgaaaactctatcttttcctcttttttttttcttcttcaaactgtgtaacagactaacaggtgtattcacacaaaacagtcgtatttttttttaatatacatcaaatactgatataaaaatttacatagaagctctagtatgaatatctaaccttttaattaaaccgcactattttgttgaacacacagggcttgatggtactgacggtccaagcccacgagcactctaccgagccatggtctcgtgtatttctatttgtgggtctatatttagtagctcttggtgtcggaggaataaaaggctcgttgccaccgcacggagcggaacagttcgacgaagaaacatcgagtgggaggagacaaagatctttcttctttaactacttcatatttagcctctcgtgcggtgccttgatagccgtcacggtcgtggtctggctcgaagacaacaaaggctggtcttatggcttcggtgtctccacagccgcgatcctgatctcggtcccggttttcttggccggttctcgcgtttatcgcctcaaggttcctagtggaagtccaatcacgactctgttcaaagtgttaaccgctgctttatacgctaaatataagaaaagaagaacttcaagaattgttgtaacgtgtcacacaagaaatgattgtgatgacagcgtaaccaaacaaaactgtgacggagatgatggatttctcggatctttcctaggtgaagttgtgagagagcgtgaatcactaccacgtccactccgttgtacggaagagcaagtcaaagatgtgaagatagtcatcaagatcctacctattttcatgtctaccattatgcttaactgttgtctagctcagctctcgacgttttccgttcaacaagcttccacaatgaacacaaagctcgggtcctttactgtcccacccgcggcattaccagtttttccagtggtcttcatgatgatcttagctccgacctataaccacctcctcctccctctagcgagaaaatcaacaaaaaccgaaaccggcataacccaccttcaacgcatcggaacagggctagtcctttccatagtcgcaatggcggtggcagccttagtggaaacaaaacgcaagcacgtcgttgttagttgctgctcaaacaacaactcatcttcttattcttcttcgccgcttcctataacgtttctttgggtggctattcaatatgtgtttctcggatcagccgatctattcactctagccggtatgatggagtttttcttcaccgaagctccttctaccatgcgttcccttgcaacctcgctctcatgggcgtctcttgcgatgggatattactttagctctgttctcgtctcggctgttaatttcgtaacaggcttaaaccatcacaatccatggcttttgggggagaatctaaatcagtaccatctcgagagattctactggctcatgtgtgtgcttagtgggattaatttcttgcattatctcttttgggctagtcgttatgtgtaccggtcgaaccaagggtaaatcctaagcacatacattggtggtatcagactatcaattgtaatgagtgagcttattgtagggtaatttgttgtctgttaatgatccgattagaagaagtcaagggattagtttcttggagaataagttactatgatgctagattggtttttaattttacggctagggttataagttgaactagcacaaatcctatgctcttcaggaatatgtcatttaataaaattataaagacattattatttttatttttatttaatactccatgaaaattaattgtaacgttagaaattaatggttgtatttgctgcgtttatcaaataaataatagcaagtgcatctgtaaatcacaattcacaaccgcttttttacttttaaagttttaaccactgcccaaaacaaatcaatctcataagatgttatggtggcaagtagtccttttttcatgtaacgtacgtaaaagattgacaagttgtaatttgtaacttgtaatgaagcttggtttggataactactgactaaataaaaatcaaccgagtattcttttccgatgtatttgtggaataaaatcttcgacttttatcaatcaaaactgactcaacaactcatcccttacttttaaaattctccaaatttagaccctataatgtttatatttatcacagatataacagaaaacagtttttctttttcttttttttgtagaaacaaataattattcctgaatctaaaatagaacaataatgaaatttatcatatttcgtcaagagttcctggttttttttaaccaattaaaatttatattgagtatattgtgtaaataacaaataaacttaagggtaacaattcgaaatagtcgaaagctagggaggtctttcttgtatataaaaccgtctctgcccactgaaatatcaacttagctcataagcatatctaatcggagctcggagaaatttcggtaaaaccctaatcatcatcttctccttttgatcaatcttatcttcacatgaaaaatctctgttcaaagacatagctttgttctggaattccaaattttggggttgattttgtattttctgggtacgcgagattagatcgagatagaaaaaaaaagagcgatcttttctcattaattccggttcgacatggctagtttcagcttaaatttacaagctttgagttcagtatttgttcttatgctcatgatcttcagaattttctcaataaaaaatttgattttttgttgttgttgttgttgatgggattaggttgtgaagagaagaaagatg

SEQ ID NO: 22568 - DNA, 3000 bp, Unknown; identical to SEQ ID NO: 2752
  misc_feature (1)..( 3000): 2750-1469P.txt file - cDNA_ID_2106220; gDNA_ID_1620586; Annot_ID_161298

SEQ ID NO: 22569 - DNA, 3003 bp, Unknown
  misc_feature (1)..( 3003): 2750-1469P.txt file - cDNA_ID_2106236; gDNA_ID_1971789; Annot_ID_175534
gttaccatttagcactactgctaattgcaatcagcacacaacaaaaatgggatttgttatttgaaagcacttatgttgcatgtctactacttaaattagaataaacaatgtcacagaataaaaaaggaagaatctttacgtgatgcagagtttgatcgctggagaagtaaacatcttttgacattgccattgacggccatggccagcgaattgttgctctgtcattaggacccacaaatcccccaaaaagattgaaatttgtttaattttcctcaaaacaaaaaatgacgattttgacctcgagatttttcttacccggagagaaggctaacaaagccggcgaggccaagctccgtcgtctccattgaactcacaaccatcatccaagtaaatatcgcaaatccacacaaatgcctgccaaatttcaaaaccccgtttacaaattttcaaccaagggaaaaaaaaatcagaagaaaacgaaaacatacgtccagatgttgagagtctcattgtgccatgagaaagcgctgaggaaagtttctttgattgaccactcacatcgataatgattgtgtatgaactcgttatctttcaaatacctaggtaactcctcgaacttcatcaatctcttctcagatctcttcttttcgccggaatccatacctttaccatttcttatcttcgtagattccttcaccgttctccgtttctgcatgattcccctccctctctcgcacagctcgtcggggggaaaaggaggagaaatctagctacgaaattgaactccggcgaatcacccaccaccgtagatttctctcttcttctttttattttcagtatttgagaatctgatttgttttttttcgatcttcgtggtatgcttcgtcgcctacttatacggagatgaaacctctttgaattttaaaaacgagcaagcttcgtgacttttatctacgtagcgtctttgaccggtcttttttacacgtgtctcttccttattagtatgttagtttcgccttagtgtgagggaggatacacctgattatttttacccgccgtgtcaatttgaaacaaatattaaagttacagttggaaggtgagaaatgcagaatttgtgggtctctgtttaaacctatagtctataattattaaatcgagaactttgtttttacccctcaagatttttttgttgcctgacccttaataacattgttgagtaactaaaacatatattttcgtttcatttatacgtttcctaaatgatttgataatatggggagtgttgatcaaaacagattaaacgaacgaggtaaattgaaagagtaggtaactttttattggctttatggcataagattctccaaggagggttgattcataagacaagacaacacgtacatacatatctatatttaattggtatgaacatggattatgttattgatttatttaaaacgcgtcaaacaattggatataataattaaaaactgaatgaatggttcgcttaccaaagcaaaatatagttggcccagaattcgatgttggcatgttacgactacattgctacattgttatcatcaatgtttcagattatttttaatttgtactttcatagtaattcaccgcaatgaacgatgaggaaccatcgaatcggactaaacgagggtaacaaattttgagtagtaaagtgtagtaacaacaaatgagtgaacaaaaatcgaatggaaccgtacgaatatagtaataatttttgttgttcgcctgctgaatctcaaatgataacctttaggatctttttagcaaatgataatcagtttgtaatctagatttatttggagttcttcattttaaaatcaagataacgtggatccggtttgatccggtctaattcaaatttcataatataaatacaagaatatttcaacattagcctaaaaatacattaaagaaaagagtgtagtattttcaaaagatttgttgtatatcatacaaaatgaatgtatattgttttgtgtataattatatacaaagttgtcgtgaagtgaacatatattctagtttgcttagttggtccgtttttcatctaaatcgattcttagacgccataatttcttgctaagaggattaagtataaactatgtgtacatggatgagtaaattctttggattatttaacgattactcattatctttgtaaagtgtataaagaaaggtgagtattgcgtggtgaactgtggaaacctagactcaaagatcaatactttattagattttgttgctaaatatggtctaacaaagcaatttacgctaggtattttgtttgagtatagtaatcaaatgaaaactgaattatcgaaatttagacaatagacactaacgaaatgaaaaaaaaaaacgaaattaagatgttatacaaactgattaatccatttatctttcactagatgaaatcatagatcatttttcgtgagtctgtaaagatgtatgataaaaaaaagagagtaattaattaaaacatacctagaaagcatataatttgatttaagttgtgacataacgaacctaaaatgacatgtaaacatatccaaaaacgaaaacgaaatatcttgtttataactaacaaaccgaacactgatcaatacgatatactttcaaatcatgatttgattaattttagctatttgttcagttccgttttgggaaccggcattaatcattgcgtgtagcactgttattggtagatatgaatgtgggggattttagttggtaaagaaatttaactagcagaaaaaatgtttgggggcaattaaaacaatatttaaaatacaaggacctttttgtataatattttaggacaaatctcccgccttaaattccctccatattttttcatgtctcttcgcttttcgcctacccaacaaagacaaaacgtaactgtcttcttcttcttactcttccatcttttgtactttcgagtttaggatgttagatctgggaaacatg

SEQ ID NO: 22570 - DNA, 3000 bp, Unknown; identical to SEQ ID NO: 6388
  misc_feature (1)..( 3000): 2750-1469P.txt file - cDNA_ID_2106236; gDNA_ID_1621091; Annot_ID_170731

SEQ ID NO: 22571 - DNA, 3003 bp, Unknown; identical to SEQ ID NO: 22569
  misc_feature (1)..( 3003): 2750-1469P.txt file - cDNA_ID_2106236; gDNA_ID_2926198; Annot_ID_201644

SEQ ID NO: 22572 - DNA, 3003 bp, Unknown
  misc_feature (1)..( 3003): 2750-1469P.txt file - cDNA_ID_2106377; gDNA_ID_1620503; Annot_ID_158959
ttgtgataaatacctttacatctcgtatgagttctattattagagtatgaatgaatcaaagcaacttgaataatgtgaaatgattactattacaacttgtgtttaaacgatacaacaacaggtttaacatttggtttgaaagttggtaatgtacggagaggcttgacttgtctcgtgttgtgttcatcttttagcaagaaagctctactgctccatggtgacttttcccggaacaaaagagctgtttattcccctaagttcaaaattaataatgtcccttaatacttgtagtcgctaggcatcaggcatgtatctctgtaccaatctgtatctgtaagagcttcaaactatctgaaaactcaagacgaatattgttgagtcgagctgcatgttacagattacaacatatctaatctagctctctctagcatagatttaaatagtaaagtcaagtcctactaattatctaaatatgtcaaatatttctcaaaaataaaccattccctaagagacctgattaataattttcaaaaaatttcagtaagaatcaacataaaattatacaataaatagtttcccttgtatagatcaaagagatgacgactcagtagttaattatcgcagtgggtatgttcactatcaattcatagtgttccgtgattggagggtttctaagtgatatagacttgattaacgcctaaatcctgaaaatatgaaatcgataattactctgattgattggtacgtttactgtttatcaccgaaaaatctctcaaactttattcttcgtctaagactttaattttgaccgccacatataattcaaataaaatggtacaattattagaacaaaagttcaaatattcaagaactttacggtaaaactacagaacatagacaagatgattaccctaagaccaatggttttaataaccactgtccgaaagacaaaacaaaatgaagacgattcttctataaaatatcaaatacaagaagaaaaaaataactcaaatataaatcaatatgaatttaaaagaatcaactcaaaacctgaatcaaagcactggaccaaatcagaaagaaagcaaaaaactacaaaacttggttttatttctgtttgcttattcaaatggaacacaaaaatcaaaattcgaagaaaacatcttatagaacacaaaccatatacataactagatatttcatatttagttgtagatgcaattgagttaccatatgcttctggtcatgcttgactccttgtacgccaccggcagccgattttaaaaccaaaatcggtatccactcgtggcatacagggagccaggcataacgacaaactattatatgtatatattgttgtataccaaacctctacgcatgaacatatctttatacgtggatcttggcttgaatcgaatcagaactttttttaactgttgggaagaggaaatgaagtagtcagagagaaatgttgaagagttttggttgaagaggaatatgtggtacaaatatataaaggggaaagagagaagagaactaattatgttcttgccaaaaaaatatattcaaaagcatgactaagttaggttttgatttttaaaatctttaatgtgaagatagatgaataaaattgttaacaaattaaaggacccatttactcactttccttaaaggtttctcctttttccacatattttatttatctattgagagttaaatcatgcaaagaattttgctttttaaagcacataatagaaaaagacaatggtgatgcatattgtattatttcttcaatattcaagttctaagatattataaacttgcttaaactccaatatatgtacattgttattgtaaggtggaaacaaaaataaggattcttcttgtcaaaggtaataaagattacatagcgtgcaaacctgctgagttacttttaattaaatagttatattggagagttttttataaagatttttggtatcatacaaaggaaaatttataaaaaagaaagagtgaatgggccattgatcaatcatcttcatcagcataaaggacctacattttcatcccaatccagaactttagcgttggacaaatcaaattgatatcccattaggtcttgctttgtttttgtttcttttttgttggtttatgtatgcgtttgtattagtatttacaagttaagataatgtgttcattgtcaaattgtaaaagggttttatacatgatatcaatgcaaatacatatatttggggtttgaaataaccaaaatcttaaatcttcataacttgggaaataatgtgaataagcatttctttacaaatgaacattgtacttgtagacacactatgaacatattcatgagcgtgaacaaaaagtgagtacatatatgttttataacgaagagaattcaaattcaaagactctctaaagcttaaaattcgattcttcttttgcaaaaatagattttgtatgcttttttcatcatagctctacatcggtcgtgggctctttcactttcacttttcattcttttataagtgaagacactttttctttagtgtcattcttagtattattttctcttttctttttattcattttccctttcgtttgtttttttctttgataatggttttaaaaatttagtccagaccaaatatggcctagaattagagaatcttgttaggatgaagttttattttcttctttggtcttacaaaaactgaaacaagataaacgacgtcgtattacacacaaacaaacgaaaactaaacgacgtcgttaaatattaaaaaaaaacggaaacgagatttactagtttggattttaatgggctcaacaggcccatactaaaccagtatgggcttctttcgtgctgcaactcatccagatgatctccggcgacgagtaccttcgccggcaataatggtctctgtgtagatagatcgtgaagaagattagagaatcgaagaactcgtatcagataagctaaaatcaatg

SEQ ID NO: 22573 - DNA, 3000 bp, Unknown; identical to SEQ ID NO: 5823
  misc_feature (1)..( 3000): 2750-1469P.txt file - cDNA_ID_2106384; gDNA_ID_1620820; Annot_ID_169435

SEQ ID NO: 22574 - DNA, 3000 bp, Unknown; identical to SEQ ID NO: 9114
  misc_feature (1)..( 3000): 2750-1469P.txt file - cDNA_ID_2106396; gDNA_ID_1971986; Annot_ID_177744

SEQ ID NO: 22575 - DNA, 3003 bp, Unknown
  misc_feature (1)..( 3003): 2750-1469P.txt file - cDNA_ID_2106422; gDNA_ID_1620815; Annot_ID_169214
gcaatttggtatgttaaaaaatcatattttgagttttaattcgatgaaaatatgccaattattttcttcagatggactaatgttttttttgttcgtgtgttttaatgcagcgatgataaagtaaacgttacagggtattttcattggtcattgatggacaattttgaatggcaagatggatacaaggcgagatttgggctctactacgtcgattacaaaaataatttgacgcgccacgaaaaattatcagcccagtggtactcgagtttcctccacgatggatcaaaagagttcgaaatcgagcacgagttcgaacacgatgagttgtagagtgaattctctacaaacagactttgaaaatttgagtcatatatatattatatattcataaactatttgtttacagtttgctgcagtgaatgcatttccatattcaagtaaataaatcagatactcaatatacagacaagtaaagtttggattgtgttgtagtaagtatttggatagttgaatattgagatcaagggtattcacgaagattccgtactagttattgatattttctattgcatatttcatatttgcatgcacggcaaagtgccaaagtatatttattgaagaattcaaacagatggtcgtatgatccaaatctctaactattttaaaatgtgatatacctaacaatatactcaaatttctagctttctaaaagagactacaagtctacagactacaatacccatttaacatgttttggacttggttaccatatcttaaaattccaaatttatcggcaaactcaacgaaaataatcaaatgtataaatggacctgatagtgccattgatatttgggttctgacttcagatatgggccttggacctttctgataagactcagtatctttaagaagatacttgaatttggtaggtgagaatcatcatcctatcctccatccacggttttgtagagggtaatataattttttctatggacagtaagaagtgataaaaatataatattatataaaaatgttataatgctttttttgtatgacacatgtccattttaaattacaaaaaaccatgtaaataaagaataaaatacgttataactaaaaaaactgaatgcatttcaaaaaagttaccatataatcatataagtaagcatataaatcatacaccttatcttgatgtatatgattagttataactagaaaagaaaacaaaacaaagttgaatattatatctaagaatatatattacccattaagaaataaatgaaagagagaataaaatccacagcattatataaatattgtagccctgggagttcggatatatcggtttaatcggttcggtttatttagtttttcggggtttttggattttttaatttctagccgaattgaaccgaacaaaaattcggttcgggtcggttcggacatcggttttttcggttcggttattgggtataaattaaattccggattaaaccgattttttttctaattcggttaatttgaaccaaataaaccacaaattaaaaaaatggacttacaaaaatgaaatctaataaaaaacaaacaacaggcccaatacacaaatatacagttacaattacaaatccacaacacaattatgggtcaggtccattacaaaattagggttttgagttttgacaaaaaaaatatgtacgactacaactccaaactgcgacgtcgagcagtgcctctccaatctagtgatctaccattccgacgacgtaatgccctacgagacctgttaaacgcccgtttgttatccatgaagtaagaaaaaacatgagatggaagtgtaaaccataaaagatccataaaaataatggataatctcagatttggaagtgtaaagcctaactctaaaatttcagaaattatagagacagaggaagagcttagagagcaaagaatcaaacaaaacaaatgattaaagagaaataagaagagtttaccctaagaaagttgaggttgtgggttgaatctctgagcaaaggttttttgtaagaccaactgagattagagagaatgaaagaggcttggaagatgatgaattcatgaaggagaagagacgagttgatgattactaattcaatcgaagaaaaatatcaaagtttctttgttgttttcgcaagaggcagagagccaaaaacgaagaagaaacctaattaggttaagactcatcaattaaccttatatatggctgcagattctcggtatgggtgaaaccgattggttccgattaccgaaccgacccgaaccgacttccgaattcttaaattaatttggccgatcggttcgatctccttaattcggttgctgccgaaaaccaaaattttcgtttttttcggttcggttttctcgggttgaaccgttatcccaggcctaaaatattgtatgactcttgaccaaaaactagttagatatattatttattatgacatattaatattaacttaatataaaataaaaataaatgttcaaaaaacatgatcttaaagctgacaaagctgatttgattgactaatacttatcctacggtgatttttggttcttttactttttttgacaattatggagctggatggaaaaaaaatatatataaaatcatatattattaataatgagataaatacaacgaattaaacggatcaaagttaatatttccaaaagaaaaatagaacagagtcctaatttcattaatttcaactattgaaaacaaaatttaaaatcaataggattgatttctatttttcttttagaaaaacaaaatttgaaacaatttcctaatttccctaaacttgcgactttttaacaatcgaccgacttatcaaaattagggattgttttatatataaagagagacgcatctctttatttcattcatcgcttctccaaaattttcttcaaagaacaaatctcccaaatctaaaatctttctcttctctcttcgtttccataaccatg

SEQ ID NO: 22576 - DNA, 3003 bp, Unknown
  misc_feature (1)..( 3003): 2750-1469P.txt file - cDNA_ID_2106478; gDNA_ID_1971786; Annot_ID_57999
cgcttgttaaaactcataatcaatgcatcccttgaccttagaacaaaacctgatgagtcccacacacatgtcacttcgctgtccatgaagttttttgaccggaggtcaaagtaatttaattgacttgatgttaagaaatgatatgtgcagagaatcgaatgtttctttgtgtgtgtggtgagtgtgtgatggatataattattggaattgaaatgtaatttatgtaaacttctagatttcgaaggcataataactctctaaaataattgagaattggataatatccgatgattaagatagcatttacttacaagtaatgttttcgatagaattaatggtcactatccaaattccaaaccatacgctaatggcttccaaaggaaaactaagactttatggagttttacataaagtcttcgttcaaacatcattttcataagtcttttgtaactttcttcctcttaacggcttcctacaatatctcgatttagaactccaatcaacatctaatattttgtctacaactttatgttttttcaccttactatatgatctagacaatcttttgttaggtaaagtgtctagatattctttcacctaattaacacggaaacgtaaacttgtacaaaaacatctattgattatagaagagaaccgagccgtgagagtcgtttctcgtcaagaccgcaccaatcgactcaaacatgagccaaactgtacgtagttcttataaggaacacaaacctccatcgtaaaccaacgttttcgatcggttctagctagactcgccatgcatgcatgtgcgttggtgcccgtaattacgtacaccaatcttgattgatatcaatgcttatatgccgttaatcttcatctcgactctcgaggtagtagtacttgacgagttctaagttcttcttccgttatgagaaatcatatataagttcttctatacatctcgcttgattattataatctttcgccttttaatttctcgtttgattattataattaatgtttataatgaaaagaatcattatttcccaaagcaaacgaatcattttgagatagacttacagttatcacaaaaagaaatctaaacgttttccccaagatttagcctttcgtcagcatgtaattactcgtgacatattctctagctcatatttcttcttcacgcacgagcaaccaattttgttatatatgtataaatcatctttgacaattatatataatacagatttgttacgagtatatgaatttttttgaggtacagaagcaaatcaactagtgaaactaaattaaagagctaaccatcaaataaagtaaattgaattaaacaaacaaatcataccacgtgatgacagccaccacattcctaaagttagaaaattggcaaacctgtaaaaaagcatcacttccccgaaatcgcaggtcatatttctatgaaaacgaaagagagttatctatatagtaaatggctatattcatatttgccccaccacccatgacccatctcagttaataaatagttcttctattcacctctatactataatcattcactttatcttatatatagtctataaaactaaacgtaattcgcatgattttgcctttcgttgcatgaaaaatcctccttgacaatgtacaattcgttagtactactcgatcagtcgccttgactcacgacattttctctagccactgttttatcttcacacacaagtaccaattttaaactgttgtacttaactgtataacatcctttatacgtaacgtaagccaaaaattatgatctaatcagttactacagattaataataagattaataacggccggtctactaattttgaacacttgtgcatgcattatctctcgttgaaatagtaaattaatgcaactaactttacaagattaatcgaggtatattatagtctaaaacaaatatttaaattaatgcaactaactcttgaagattaatcgaggtaacgcatcacactaatcatatttaatcggataatacatatactgttagtaaaataaattaaaaaagatttggtagataaacgacaaaaatgtttttcgtcttgttgttttcgagaagcttctttttccggattaaaaaaacattatgcaattccacgtcatcagcgcattacaaacaatgaaagactacacacgaccttgggtcagcattccaaagacccaaccctgactcgccacgtcgacatatgccagctattaatgaagagggtaattccgtaacttactctaaccacagaacccttgaatttaaagtgtagcagtaaaatctcatttctttgagttatctcgtttgttcggagttagagagagagagaaagatatagagagaacacagagaggcgagagcgacgtagggttggtgtttcgtacggattttctcggtcaatcttagtttctccggcgagagattgcttttcaggtaaaaatggcggcggttttggtgtttgttcttcacttaatctgtgttcgatctgcgtatgaactcgatttttccactcgattgggtggatccgcttcgttttggtgttatggttcactgatagtgttgtatgtttagttgatctttgcgatttcggatctattagcttcgtagctgttttggtgtgtgtgttcgtcttcgaagatatttaggttttttttttttgttgcttcaaatttcttactgtttcgtgcttgttttcttacttcgttttctgtttaggtctttgattgtttcttactaggttttctatgtttgctttgggctgttgaatttggttttctatctctctagctaatcactggttttcgtgcttctgagtcgtttgtttttgaagctagttagggttttcttctgttgcttctatatttcgatagttttgtgcttgttttcaatgtttgcttcttattttcaaggataattttaaaatgacccactgtttttgggtggttgtgttattttcacaggaatcatcatg

SEQ ID NO: 22577 - DNA, 3003 bp, Unknown
  misc_feature (1)..( 3003): 2750-1469P.txt file - cDNA_ID_2106497; gDNA_ID_1620521; Annot_ID_159482
acaaaggtaagacgacagctcatgagcttaacatagtaacatatctagtacagtcacggactcatcaccaaaagaaaaagaaagcaacaagatattatagttgggtctgggactatcaatagagtttccctttctaagactactatagctaataatgaaaaagtgaagagactagacaagatgtaccaagtaattgggctagttgcgtgtcagactccctcctaaaagagtgagatgactgctccctgaatttgaggcttcttgagagagattgcctattaatcttaagggaaaatttacaaaaaaaagattatcctaggagactatggatcttggcccgaaacttcattaaacagaaaattaaacaactagagaagaggttgtttaacaaatggtatatactaagcttttggtcacaaaaaagacaattatgcatatataattatatatccatacatacaaaacagtaggacagccacagagattaaaatagctacctaacatctatcaatagagtctcatggactcttcaaaaacgtaaaagaaagcaacaaagctttaatacttgggtctaggacgaacaatggagcttcgcttcataagagttcttacgttaaatagatgaagcaattagacgagaggcttaaagaggttatttcataaatggtatagtatacctaatatctggtatactcacggaccttcacacacacaaaaaaaagaagcaacaagctttgataattgggtctagagggccaacaatggagcttcgctttgtaagatttcttacgttaaatagatgaagaaactagacgataagcttataaataggttattccacaaatggtattctacctaatatctgatatagtcacggactcttcacacatgcaccaacaaaaaagaaaaaataagaaagcaacaagacttgctaatggggtctaaggcctacaatggagcttcgctttgtaagagttattttgttaaatagatgaagaaactagacaagacgcttaaagaggttgtttcaaaaatggtatattacctaacatttagtatagtcacggactcttcacaaaatttataatttctctatttcactaattaagcacatcactttggttataggtataacaaaagagaagggttatgttaaagagcaattaagaaacctggaaatgggttcagggaccataaacagtaaatccccataaggaatttaataaaaatggtagaagcaaaattcaataaaagaacagtaaatgctaaagatagactttgaatttcttcatttgtaaaaatgtacttccctttataaaggtgcatggattctctttttttttaccatattcgatttctcctttttactatttatcaaagtcttcttaaaaatttggaagtaatggagacaaatcattccctcaaacaaaaaaagttaacgagtgttgttgtgtaacaaatccacctgtgaccgaggatacatatgactgatgagctaatattagttgaaacaatttttcttttcttttttaccaattggaaacaatttaatatatatggtatgaattacttatactcttaatttctctatttcagggaatataagaaaaagagattgataagatctttgatacgctaccgggaataatattgaacaaaatgctatcaaccaaataagacatataactacataagcaaatcatacaatttggaaagtgtttttagtttcattttaaatcattgtaaaatagcataattgtagcatgattatcgtgaaaatccaagttgaggccatatttcaagtgcggtcccgccaaaaccctattgaccttaatcatggcatcttctacaccaaactcgtattgtttatctttctccatgtctatttcactcttttcaatgtaacctaagttgattttctaagtatgaaacatcaattacatcctgcacaaggtgggtgaaaactaggacatgcaaacagggtgtagacgagtagttcctagtttttatcacttttctaattgcactctgaaactagattctccttctatctttaatctctcctgaatttcttcttatctcatgcatgtcttcttctatttattttttatttttttaaatttgtcgacaatttctatttctttttattattattttttgtatgaatcgtttctaacctctttcactcagcacttaattagaaatctgaattaaagatcaatataccatgggttcaacaattgaatgaataaaattttagaaactaagatcgaaaattatattcaaagtgctaagagtaatcattattttgtgtttatattctggtttctacttttatgttcctattttttcttctcattattatatttttttggtttaacactttttcttttttccaactcatgttaacaaattaagctacaaaaaaaaatatgttgtaatgggaaacaaaataaaaaagaattatgttatgcgaaaaaaaaaatatgcggcaacaaaattttggcttgttttaggtatcaaataaatttggaccggcactgtttgcgagcgtagaagaaactgttcacacatactaaagtaatggttgacaagatcagtttcagagttgacgataagaaatcaactaggttaacaaaatgtaatgaaatcagaacatggaaatctgaacgtggcagataaatatacatattcaaactcttttctgttaatttgcgcagaaatgcaaattcaattgctaagcctatgcggcctttacaacgaatcagttaaaataatcaaagtaaatcaaataatctaatgatgatatatcgtgtttacaggtttatatggaggaaaatatagtgatatgataatcctcatttaaatcattatatagtgaagatactacttacacacgtaacctcctcgatcgtcttttccgattgaagtggtacagaatcctatatatatgactaccttcttgcaagttttccaccaacaccacatctctctctatctatg

SEQ ID NO: 22578 - DNA, 3003 bp, Unknown
  misc_feature (1)..( 3003): 2750-1469P.txt file - cDNA_ID_2106516; gDNA_ID_1620666; Annot_ID_163945
gaaagacaatgattcagagccagaagaattactacgtatatcatcaactgcgttaaatatggcgtctgaagttgtgagaaagagagaaccgccttctgatgattcattcttggttgcaattggaaatgaggattggggaagagaaaccagcattgagaaattcaatgcaggtgagaatgttcggataataaggaaagggaacaactatgacgaggagatgttgaatccgggtagaagcgatgaatcaagaagctattcgcaggcagagatgtcggttcatgatgggaagctcagaaccagaaatgaggcggaagaagactggttcatacgtaaccaagctggtccagaaacagatccaagtcttgtcaaaacatttgtaggagaccatttccacttaaataagagcagtgagagagatgtcctgaccgatgactctttcatgatccattctcgtgttgagaaccaagtagaagattctcggttaaggacagaaatcatggacttagacgtttacggaaccacccaacaagaaaacagtgccccggagaacactccgcatgaaccagatgacctatacatggttcttggacgggaacaagatgttaaacctacattgttaccatggacccctgaaattgactttgagactaacactttggctcaaagaacaagcagaatcgatttgataactgccacaaaggcctctgcaggtgaacaaaccttagatggtaaagaaaagaagagtcgtggtatctccaaggggaaggatgcaaagtcaagagcatcaagtagacctgacccggcgtcaaaagccaagagacctgcttggggaagtagagctgctgtctccaagtccaaatccgagatggtaagttccgtaaccgcttttcgtctttcttgattagtttccttctctcatctggatttggttttttgataggaggaagagagaaagaagagaatggaggaacttttaattcagaggcaaaagagaattgcggagaagagttccggtggtagtgtatcaagttctttagcgtccaagaaaactcctactgtgaccaagtcagtgaagagctcgataaagaatgagaagactcctgaagccgcgcagtcaaaggctaagccagtactgagaagttccaccattgagcgccttgctgttgctcggaccgctccaaaggagccacagcaaaaaccagtaatcaaaagaacatcaaaaccttcaggatacaagacagagaaagctcaggaaaagaaatcgagtaaaataggtcaatcagatgcgaaaagtgtggaactttctcgtgacccgagtctcgaaatcaaggaaacggtggtggaagattcacattcttacttgtcagagaagcaagttgatgcacttcctgctgttgcttctgttgatgatttcaaagacattaaagaattgcatagcttgccatcagaagaaacggccagagtaaagaacagaccgaatgaaatcatagcagagaaagtacaagatcagacgaagatcgatgatcaggaaacagtgaagaatacatctgtttctgaagataagcaaatcaccacgaagcattactcagaggatgttggagaagtccaggcttcacaggaaaaaccggtgtctccaaagaagtcggtgactttttcagagacaaacatggaggagaagtattatttctcaccagcggtctcagagattgacatctcaacgccacctgctactgaagcagatcattcgaggaagaaatggaacagtgaagagacgtctcccaaggcaacggctaaagtcttcaggaagcttcttatgttcggaaggaaaaagtaaaaccgacgttggaattcttcttctccggcatcatcgaacctttgttttgagacgacgtcatgttgagttcagttaaaaagcctctcttattctttaaatttttccttgtgtgatattaaatactgtttttcattttattgttgttatcagtttgatttgtctgtttatattacatttgttgatgtgttgtttatagcattgaaagtgggcatttgagtgtgtataaaaaattggtttggtgagttgaataatgtaagaatcttttgtatttttctaattaaactgtttatgatcattaggagaacaatatatggggatgtgttggaatcatgaatcgtaggttaaatcctacaagaggaaaagcttcaggagacagagaagatgaagagaagagaagaaaggaagaagaagaagaagtcgtgacaaagaaagtcagctaatagacatatctccgctatttaaagtcgagtctaagcctttatacacttaaaggttgagggttcgaacccttgttatgtctttttgccctaaaagaaaaaaactttctcatgaaattccgtgagatgattcttccattctaagcatttggttctgttagattgataaagaagtctcctacagtaccaaggcaatgtgccatccatctacaatttgtataactatatcttttggtaacatgttcccatcaagtgggaatctaattcccctgttattcttttcacgttctaagcatttttcaagctgtttaccattttgaaacttagtaacgatcaaaaagaataagggatttcgtcacgtaaattaaatagaatctgtatacaggtcatttaaaaaaatattttagtaagatacacaggcacagctcaacgtctgatcttggtttgtcataaacagcagagaattctaccacaaggaagctctggtactatctttctcattaagcatccgcgactacaatattccccaatttattaaataaacttttccatgatgcaaaagtaccttttattaaacactacgaataaataaataaaggtgaaacacccatttcaaagaaatggtaacgtgtctttttcattaggcgagactagccaatctaagcaaacagagtcgtctttatatctaaacgaacattttgtgaaagaaagagagactaaggtgaatccatg

SEQ ID NO: 22579 - DNA, 3003 bp, Unknown; identical to SEQ ID NO: 22578
  misc_feature (1)..( 3003): 2750-1469P.txt file - cDNA_ID_2106516; gDNA_ID_2926191; Annot_ID_201029

SEQ ID NO: 22580 - DNA, 3000 bp, Unknown; identical to SEQ ID NO: 60
  misc_feature (1)..( 3000): 2750-1469P.txt file - cDNA_ID_2106619; gDNA_ID_1933; Annot_ID_145435
  misc_feature (2002)..(2002): n is a, c, g, or t
  misc_feature (2016)..(2016): n is a, c, g, or t

SEQ ID NO: 22581 - DNA, 3000 bp, Unknown; identical to SEQ ID NO: 2475
  misc_feature (1)..( 3000): 2750-1469P.txt file - cDNA_ID_2106638; gDNA_ID_1620543; Annot_ID_160079

SEQ ID NO: 22582 - DNA, 3000 bp, Unknown; identical to SEQ ID NO: 4253
  misc_feature (1)..( 3000): 2750-1469P.txt file - cDNA_ID_2106659; gDNA_ID_1620692; Annot_ID_164832

SEQ ID NO: 22583 - DNA, 631 bp, Unknown; identical to SEQ ID NO: 4139
  misc_feature (1)..( 631): 2750-1469P.txt file - cDNA_ID_2106659; gDNA_ID_1620686; Annot_ID_164627

SEQ ID NO: 22584 - DNA, 3000 bp, Unknown; identical to SEQ ID NO: 4253
  misc_feature (1)..( 3000): 2750-1469P.txt file - cDNA_ID_2106659; gDNA_ID_2926202; Annot_ID_201930

SEQ ID NO: 22585 - DNA, 3000 bp, Unknown; identical to SEQ ID NO: 8489
  misc_feature (1)..( 3000): 2750-1469P.txt file - cDNA_ID_2106682; gDNA_ID_1971812; Annot_ID_175785

SEQ ID NO: 22586 - DNA, 3000 bp, Unknown; identical to SEQ ID NO: 8489
  misc_feature (1)..( 3000): 2750-1469P.txt file - cDNA_ID_2106682; gDNA_ID_2926171; Annot_ID_199529

SEQ ID NO: 22587 - DNA, 3000 bp, Unknown
  misc_feature (1)..( 3000): 2750-1469P.txt file - cDNA_ID_2106686; gDNA_ID_1620459; Annot_ID_157690
atgatcttattggttgttttttgtttatatgcaggtactgtatccggtggggtctaactcttccaagtagaaagttacgtgaatctgcttggaagaagctttatattgatgtgagtttctccttggtttttcgtataaacttgttagatgtttccaagtagtattacattgctgaagaatatacagtgttagtttgcgttgctagtagaagtcagatcatatatatttttaagtgattcctttctcttgtcgaattttagcgtgatgaacaggacatgattgaacttgtcagaacctgtccgtcggatttcaaggagtattacgtacatatgcaagcagcaaagagaagccaagcacctcttccgtcccaggtaactatttataattatctgtttatgttttaggacaaatcatcacgtgaagaattttctcatgttcttgtttgcaatttttagatggtggatgaccggataattcttgacaatactgtacttgaacaagtttctctatggaagaaaagcaaaggacttactgataaggctgtcactggccatatttgtttgggaaccaaatgttcataccatcagattgacgacgtgttcatatgcaaagagacgggaaatgttcatggtatgtaatgaaatgctgtaaaatgtaactttgttactgtgttttactctaaacttacatagtttttatggtctttataacagtatgcgatgataactgcaaggaagtaatactgagtccagagggtgacctcatggtgtgtactatctcaggagtttgttctgatactttacttgtacaaactgagccagacgcagatgggtgttatgaggaagaagctgaactagaagctgaagtattcacagataaaagccgattaggtacacatctatctatctctttctcatatctctcacacacttccttttccaaatattatttttattttccaacataagtgaactatttgcgtcttcttttcatcgcagcccgagcttttgaacttggctacaactgcgatgatgagcaggaactggaacgtaccctgaggttctgctgagcaaaagtctcgaccttttgtccaatttcataaggcctactttctgtaaggtcttctctctctctctctctctgacctgattctgcctgggttctgtggagttgaaatgaatcaaatgtagctcttgttttaatcagtcagctttgtaacgtatacatatatatcattgtatgtgattaacattgtccttaaaaagtgttacacctagtaattacgttccaactttatcagtaaacctattggtaactagtaatttgctcccgatattggttttctcattaatttttatagccattctttgttcatttaaaccatattacaaatttgtcctggttagaactgattatgatgacaaatcgatgattagttcaaaatgaagtttatagcaatatattctaataactatacatcaattatcaccactgatgtgtttgaatgaaaaatgaattgataatcttaataaatgtttgattttatagataagtataaagtatgaatggatttagaaaattttagtatttagtgagataagcataagcaaaactagaaaaatgaaattattattaaataaattcattaatacacattggcaatgtgacattgcctaaaatcaaatatgtactaattcaattaatgttaataagaattttttggattcgattctcttgcgaaagtgcaaattaaaagacattcttatctcctacgtaaacagaatcacgcgtccattgcgcgttctcgcaacgctaaaatatttacgttggaaaatattctcataattctctcctttgcccccacagtttaatatatttcataaacacccccacgagaaattaaaaaccgttccaaatttgaaaaaatacaacaaacaattcatgaaaatattcaatctataagcaaaacattggtagtgttacatgtgtcgtccttcgtgctgaaaatttggatagcattgttaattatgacaacgtaagtgtagcctgtgattcatagtaaaatataaggactaaaaataaaaatatatcttttttggaaatcgtaccgcgtaagaaacatgtataaatacctataaggtcttatttttttctcttccaatttcgtttcgacatatttcgcgattcgtctaaggtaaaaaaaaactcatctttttttcttttagatcgttaatttttgatcagcgattcgctcttctgatctgtgttctttaagcttgtcttctctcttgattcgatctgctgaaaacctagaaatttttgatttttttgtttgttttgctccatgtgtatgggtatatttacgattttaacaaaacaaaaatatgaattgaggttttttatttagcgaattgggttttaattgttcacattcgtttggctctctcgaggtgagtgataaagtatagaactttcttatgcttaggatcttaaattcgagttctttgatttacctgtcatgtgttattgattgatctcatttatattgtgtctgcttgatgtttaaagcttggtgtatgcaatttgattgggtttactggagattgatctgtgacctaatcaatgagtgataacattgctggttcatctgatttctcatctggtgtgtctgctcgattccctgaagaaagtttgaaactcaggcttggtttgtgcagtttgattgatttatctcattacttgactctggtgtacttgattctttgatgaaagcttgaagttaatgtttggtttgtgcaatatgattgggattaactgcatttgatctctgaccaaaatcagtgattaattacattgcttggttatctcattacttgagtttggtgttcctgcatgatcccctgagcttgaagttcatgcttggtttgtccaattgtgacctaaattgatgttttcttgtggtatcttttcgtaggttttgttactgattgagaaaacatg

SEQ ID NO: 22588 - DNA, 3000 bp, Unknown; identical to SEQ ID NO: 8855
  misc_feature (1)..( 3000): 2750-1469P.txt file - cDNA_ID_2106710; gDNA_ID_1971906; Annot_ID_176996

SEQ ID NO: 22589 - DNA, 3000 bp, Unknown
  misc_feature (1)..( 3000): 2750-1469P.txt file - cDNA_ID_2106717; gDNA_ID_1620544; Annot_ID_160105
agattaacacgctgcaacagatcctaaaggagtatggggatgctacgggtcagagagtcaacttggataagtcttctttatcttttggctccaaagttaattctgttctgcagcttcttatcaaaacaaagatgggaatcatgaatgaaggcggagcaggtacctatctaggtctcccggaatgctttagtggctcgaaaatccagcttcttgactatattaaggacaagttgaaggctagattgtctggttggtttgcaaggtctttgtccatgggtggtaaagaagttctacttaaagcagtggcattggctatgcctgtttacgctatgtcctgctttaagttaactaaaacgacttgtgcaaacttaacaagcgcaatgagtgatttctggtggagtgctttagaacacaaacggaaaatggtttgggtgagctgggagagattgtgtttatcaaaggctgaaggtgggttagggttcagagacattgaagttttcaatcaagctttacttgctaaacagacctggcgtattcttcagaatccggattgcctttttgctcgcttaatgaagagcagatactttcagtgggatgacttcctgaatgctaacatcacctcaagaccctcttatgcatggagaagcattttacatggtagagagttgttgtgcaaagggctgaggaaaatggttggaaatgggaaatctctgaatgtttggattgactcttggatttacgacaatgggttgagagctcctcttatcaagaacccgatcattaatattgatttaatggtaaaggatctcatcgatgtggaggctagaggatgggatagagacatattggaggagcttttctatcccaatgatgttcagcttattctctcaaagaagcctgtggtctcaaaagatgatttccattgttgggagcatactaaaagtggagattactcagtcaaatcgggttattggtttgctaacagatctcccaataaccaggtttttcttgatgcaattgtccagccatctttaaatgccttgaaagagcaagtctggttggttcaatctgctccaaaaatcaagattttcctctggagagctcacagctcggctcttccggtggcaaacttgctgttaactagaggcatgaagattgattcgaggtgtcaaatgtgtggacaagaaggtgaatccataaatcatgttttgttcacttgtcctgtagcgagacaggtttgggctatctttctgtttcctttccctgaaggcggttttagtgaggagtctgtttacagaaattttcaatctctctttgatataaagaagaatggaaagataccgctaagaaacagaagatgttttccttggattctctggagactctggaaaaatagaaacaagttctttttcgaaggggcaagttactgtccagccgagactgttgttaaaatagatgaagatatggatgagtggttcacctctcagctcatccctacttcggttgatgtggaagaatcgatctctaggttagaggtaaagaaagaatgggaacctcctcctactgattgggtcaaatgcaacattggtcttaggtggtctaataagcatggtttcgctggagcttcatgggttgtgagaaatgcgtcgggagtcgttttacagcacagtaggagagctttccttgatgtgaaggataaaaaagaagcaactcttaattgccttacttgggctatcgacagcatgcactctcttcatttaggtaaagttgtttttgctttggaagctcaggatattgttggagcttttcgaagacccaaggcttggccttcctttactcatcaggtaacagaaattaactattttttggagaagattgtggactggaaattagtgttagaaactgtggaaaccaatagaggagcctcgttaattgctcaatcggttgtctcagactttagactcaactcttatgttgcgtctggacatccattctggctcaatggcctttttgttgaagagagatcctcctcttgatcctggattctccttttgtccgctgtccactttctttggctatattttttggtagattaggattattctcttctaattcctaatcttctcatcttggttttgtcaagattgaagtatgatgtatgtgtaacattttaaccatcaatataattattcagacgacaaaaaaaataaaaaaacataaaacaatgttactatagtaaagtttgaaaatccaaattttaaaaaatcttatataactcactaagatatttggaaaattttaaattatacaaaaatcaattatgattacaaatatattttagttacttcaactaggtgttagaaactcaggtaatgtttaaacaatcgtcttgatcgcctaaataaacatatattttattttagtgtgtttttaaaaaaaaataattaactaagtttttcttcatatacataattataatttttaatatatatgtcaacataaattaaacagtattttgtcaaattattattttcgatttaatatatattttagaagagattttatatattttttaaataatatcctttttataacattttattttataaacacttaaaatgcctaaaaccaattaaacattttaagcattagacaataatgatcaacacatacttagtgactatcgttttcttgaaaattgcttcatgtacattgaatggaattattatagttgattagtcttcattcttgacttttcacccttcaaaacaaaagtttttttctcactatgagtcatttgataattaattgaagaaaaagaaagaatcaataatgcatgttgacagaaagacatattaaataaataaataaaaaagctaatgattcttcttaaaagtccaaagtaagaaacagtcaacaaacgttggctatacaacaagaaataaatacatcacatttttcagacaaaactccaatttcacagtgaactcaaaaacaatg

SEQ ID NO: 22590 - DNA, 3003 bp, Unknown
  misc_feature (1)..( 3003): 2750-1469P.txt file - cDNA_ID_2106795; gDNA_ID_2684129; Annot_ID_191175
cacagttactccgtttggcaaataatttatgctccctcattacttccaataccagttttaagtgctgcaaatgctccttctttgatttgctatagataaggatatcatcaaaaaacaccaagacaaacttccttagaaacttttgaaacactgaattcatcaacccttgaaaagtagctagtgcattggtcaatccaaagggcatcaccaaatactcgaaatgaccactatgagtcttgaaagcagtcttgggaatatccttctccaccattctcacttgatgataacccgctcttagatcaaacttcgagaagatcactgccccacccaactcatccataagatcttcaataagaggaatagggaaacaattcttcactgtaattccattcacctttcggtagtccacacacaatctccaagagccgtctttcttcttcactaaaaccacaggggaggcaaatgaacttgaactaggctggatgataccgctctctaacatatctttgacaatcttatcaatctcatctttttgatgattagcataacgatatggtcgcatgttcaccggattagtgccctcaatcaaaggaattggatgatcatgatgtgtccgagaaggaggcagccctttaggttcagcaaacacatccttatactcatcaagtaattgagaaatagcagaagtagtacttggtggtgacacctctgttgttaaagaagacaactgcaacacctctccctcatcctcatcagcgtctgcaacacacaacatagacagctgaacttcggagtctctcagtttgttcaatttgtcagccttgatagcacgcaccgacgaaggctgaataccatgtatcatcacccgtttcttatcccatttaaactgcattgtcaacaatgtgaaatcccatgtaataggacctagaggtttcaaccaatgtacacccaaaactgcatcaattcctttcaaaggaattaccataaagtcagctacaaaagtcgtgttatgaatctcccacttaaaattctgtattctcgctatcaccttcagattgtaaccatcagccacccgtactcttgcattatcactaggtaggagtgagcaacccaacttctttgccatttgaggatccataaaattgtgagtggaacccgaatcaaccaacataaaaatggatctcttctgacttgtacccttaactcgcatagtgttgtaagttgagataccctccatagcatgagttgagatatgagctacttccccaactaactccttatgctcttcttctgcatccaagaacacttcctcagcatcttccatttccaaaacaaacaattgtgttttcttgtgaatcttataatgttcagatgtgtattgttcatcacaaaaataacacaatcctttagctctcctagcactcatctcttcagtagataagaaccgccttggctgattttgttgtgtgtctcttggtttttcctgaaacgctggtttattgccctgctgctccatgtctttcttaaaggagaactggccctttgaagtagccttattgttcttccaagaagtcgcattgttctgcacaggatgagcagtttcatagagacgtcccaacatcaaacactgccgcaccgtttggggttgaaacattcggatatgcatctgtgtctcaatccttaacccaaccaaatacgcactcactaaataatcctccgtcatccttactcgagtccggatcgcctcaaactttgcgtgatagtcatcaatgctagcagctgtttcctgcaacttcttcagctcagcaataggatcctctccaaccatctcaaacctctccctgatcctagctttgtacacaccccactcaggaacctgcacttcatcctcaatcatattctggtgccaagtagcagccagaccatccaaatgaatagaaactacagacactcgcatctcttcaggtataggatccaccgcaaaaaattgatcaaccttaaacaaccattccttaaccttctcaccactgaatctgggaaaatccaacttccctaaccttgttactcccgaatgattgttagcgtgaccttgccttctcatgtaatccacgtctgttgctgaagcggatgaagcacgagctgtttgatgagtctcacccagatttgactgcttagatggagacagcatgtggatcgcctcaaacatctccgagatatggcgctcgatcttcagattttgagcatcgatcttgctctcgatcttctccatctgtgactccatcgattcctctgcttctaacgccttctctcgacgagcttgagctaactcctgagctcgagtctcgatcaccatctccgagaaacgtctttgctctgatacctttaatacagtaaaaccacaccacaacacaatcaatcaaccaaagcaatcatcaacaactccgattacttattattacgatgtaaataacaaatgaaatccaatgttcataaaacaagggatttctggattcacctcgcaagaatcgacgttctatgcagaggatgaatctcggaatgttttcagagagaaaggaataacaacaacttcaacgataacatgaaaatacgatgacacttgatatttattagcttcagctctacgcacacttaatttgaatcacagccgtccattgatcttctaatcacagccgtccacgtggccttactcaatatcctgtatcacacacattattctcctgcttgttctgattttttttttcttttttcttttctagataagatttcaattcacaaatttctttttcctcacgtaaaaaaaagaagaaaaaggtcggtctacttgtggctcactcagtggttcgaacctgggtttagattttgacttgaccataacgaaaactaactctaatgattaaaaaggcttcttttattgtgctccgattccaaaatttcacggaaaatagaagcgtcgagttcctcctctccctcaggttgtcaatg

SEQ ID NO: 22591 - DNA, 3000 bp, Unknown; identical to SEQ ID NO: 6368
  misc_feature (1)..( 3000): 2750-1469P.txt file - cDNA_ID_2106795; gDNA_ID_1621090; Annot_ID_170683

SEQ ID NO: 22592 - DNA, 1373 bp, Unknown; identical to SEQ ID NO: 2638
  misc_feature (1)..( 1373): 2750-1469P.txt file - cDNA_ID_2106809; gDNA_ID_1620568; Annot_ID_160797

SEQ ID NO: 22593 - DNA, 3003 bp, Unknown
  misc_feature (1)..( 3003): 2750-1469P.txt file - cDNA_ID_2106821; gDNA_ID_1972003; Annot_ID_177776
ccacggacgaagtcagcaccttcacggtatgggtcgtacaaggtgttgaagaaaaatggagttgatgggcagagaaggttcttgatgtgttgctcaagagcgttcacagcttttccagatggatccttagcaacctataacacatgacaacaacaataatatttaaattataagcaaagaatattcaaatgcatctaaagccaacaaaaataagaaaaagagacaatacgttacacatgactaaaccaacacaatatgaaagcaacatcaatgctacaatcatggcgtaactgaaaactcaattctaaaaagaaagccccacaaataaagtttggacttttctttgccttaagccttatgaccacaacataaatgtgcaggacaatgacatgcaagaatcttgtgaagttaactgttaagacataacatagaaaggttggtccaacaacaatgacattacctaaacataagagagatcatggcaatgccgacaaacataagactaacacaatttcaattctgaaaacagatcgaaacccatcaagcagatgaatatatagatctaagtcaaaacagtgtgtttcttaaagttgacctagagaattgtgatcgtattttcaattttcaattcaaagatcagtcaaatctacagactttatcactagatctcaaactgaacctatgaagaaggaaaaaaagaacagatctataaacagaattgtggaaacttacgaagcaatcgtcatcaatagtgaagatgtacttcttcttggagaccatgtagccgaagcaacgacaagcagagtccttgaaggaaatgcaggaagctttaggaccaaggatacggttgatgtcgttcctgttgtagagttcgtaatcgaacccttcagggacagcaatggtcttcgatggatctccatcttggacgataatcagatggtaaggctgaagaaaaggcctccacatctccaggaaatcgaggttacggatcgtggggatcacgatatcgagctcatccttcaacaatgggatgtggttcaccggaattccaacggtgttcgccggctcaaccatgattggattgattcagagagaagagaatttggagagaaaagattgtgagatttgagatcggaggtgatgggagactctgaagaccgtcgctttggcttttatattagttggcacgtgagagggctttgtgtgagttttgacacgtggtggattataagtcgttcaccaggtcaaaagaatttttaaccttgttatggtgaggaagtgaagactttactattttgtctcttaattgtccgttttctaggctattaataatttgtcttattggtttagaaaacatttgttaattaatttcccataaaaatagaagcttataatattgtctagagattatattttagatatttatcaccacaaataaaataaaataattgtcaatctttttaaacagatacttttgaagaatatccatactttttgatattcttgtttagttattaaattaaattatcagatatacctacgaactaatatggatttatatatttcagttacacttttggttttataacttgttgtcaacagaaaaataaaattgttgtcaagacatttgaattttagaaactaacttattttggttaattaaaaggtcaaaagattcaaaataaatttgtttctcaaattttagtggtcaatattaaatttctgaccaacaaaaatcacaaaacctcagttttgatcatttattattaattatataattgtgaattttgttttgatttaaggctttttaataagttaaaaagttttgtttcttgttcgtttaggtttttttttttttgttatacttataatcagttttagacttagaggaaattgaacagtttagaatagtaggtctagctaacctctttttttttggccggtctacataaccttgcgaaggatagatctttcagctagcaatttaattcatttctgcttaccattgtttcttacttaaattagttacattaccatcaatgtacctcaattcgtgtgtgagcgtttttaacaaacaaaaaaagtcgttcgtgagaattaaaagatggggggatacaaaaaccgaacaataattgaatactttttgaccggagtgtaacatcaataaaggtgttaattagagaatgtaattaggctttttactaacgggaataataaattaaaaactgtcctcgatctactttactatgtatggaaggaacattcgcatgtggcattgtgggaagctgaatctcaaaacttattttaagttttgacattccttacacttatgaatatactatacgattttttttttatcatcaatatacggattagtacattgatgataaaagaaaccacggatgataactattaataattattttattatatgatgaaaatgattatgcatttcacgaaatttcactaaaaaacaattattatgaacaaattcattttgtttatctaataacaataaaaatcattggactttgattttatacgtcgtgggaaggtcgtcgaagcacgttgcgtttgatcattgcatgcatcgtgaaaattccactaaacatcgtcttttaaaaaaagaaacctttaaaacattacaaatggaacgtgaacctataaaatatgataggtagatctcacactttatttacagtattaaacaatatggaacattgacgttaaattattattttctacttataacaatttacacctcccaaaatttggaaaggataaacccaacaaggcaacaagtatcacaaatgtagctgaaatagatgggcttttaaagtttatggattgggccgtcatgaacacatattccataacataacctaattgggtgctccgacttcttttcgcgccgctcgcttgtacatgtcctcttcttcgacttccagataaaatcgcttcctctgtttttttccgatctaaattcacagctcatcgaaaatg

SEQ ID NO: 22594 - DNA, 3000 bp, Unknown; identical to SEQ ID NO: 1506
  misc_feature (1)..( 3000): 2750-1469P.txt file - cDNA_ID_2106824; gDNA_ID_1620410; Annot_ID_156247

SEQ ID NO: 22595 - DNA, 3000 bp, Unknown; identical to SEQ ID NO: 8894
  misc_feature (1)..( 3000): 2750-1469P.txt file - cDNA_ID_2106879; gDNA_ID_2926147; Annot_ID_197801

SEQ ID NO: 22596 - DNA, 3000 bp, Unknown; identical to SEQ ID NO: 8894
  misc_feature (1)..( 3000): 2750-1469P.txt file - cDNA_ID_2106879; gDNA_ID_1971919; Annot_ID_177160

SEQ ID NO: 22597 - DNA, 3000 bp, Unknown; identical to SEQ ID NO: 8894
  misc_feature (1)..( 3000): 2750-1469P.txt file - cDNA_ID_2106879; gDNA_ID_2926265; Annot_ID_204893

SEQ ID NO: 22598 - DNA, 3003 bp, Unknown
  misc_feature (1)..( 3003): 2750-1469P.txt file - cDNA_ID_2106908; gDNA_ID_1620321; Annot_ID_153333
gaaaaaaaaatgttatcatcagaagtttgtatatgaaaacccggaaagaaaaaagcttctccaaagactggtccgccacgtatgacgtatcgtttgtgattccgttggtagaatcgtaatgcaaaattatccaaacacgacaaagacgatacacacgaatttgcttgaacaataataaacaaggttctttgaagaaaagaaagtaataaactatgcacggcactaggagtagaaatgattgaaaccctttaacaaattgaactcatcttgttgccgaagttatacagataacgtatggaatatgaatgggtttgcgattattagtttattggactttcaggccctttttagagaaaattagtttcctcctcccgaaatagtcctgcattatggaccacattatgggcccatattgaggcccaccttaatggtacttatatactattttgtacggaactgattgatagacattagacacggagacattgttgtcgttcttcgcagacatttcgattttgaagacaaatcacaatgggagaagcgcctgcccagattccgacgagtttcggccacgagcttagggcttgtcttcgatgccgcctcgtcaagacctacgatcaggtctggattctcttgtcacttgtgatttgcgtgtttcttctcttgcgaatattttttgcctaatctggtttctccaacagtttagggattctggatgcgagaactgtcctttcttcaaaatagaagacgatcatgaacgcatcgtcgatgttacaactcccaacttcaatgggtatggcttaaattcgaatccttactttgaaaatttacatggcactgttcataagtctgtctctcgtacttgtcgttacattgaaatttctgaacctagtctatacttatgattaaatcgtatagtctatacttattgagaagacttattgttggtcgctaatctctcgtttttttgttgaatgagtcgttgcaaattgtgaaatcactgtggtggatatgaccataaagtttgctgctttacgttaaaatgagttaatagtaacagagatgatgctagtgttgattatacttgtcatttgttgatgtcacgtccatgtaattatgtattgatataatgaatgtttttgcagtataatctctatgatggatccacgcagaagttgggcagcaagatggttaagaattggtatgtttcagctctgtttcctgatcatcctcattgtcttttagagtttactatactgtgtagcttcttctttccgtttcctgttattcttgtctcaccattatactttataaatggggatattagtgctgaatttaactgtgttgtctgcatccatttgagcggtagctgcattctgatttgctgtgtgtttatggcttgatgacctgatgttgtattccctaatattgccagctttgtttcagacagaagagaaataaatctaacacattgcaatatcttgtttccagggaagtttgctcctggttgctacactcttgctgtctcagaggcactcccagaggaaatgcaggtaaacatatttacttctcttagaaacctaagaagggattaataagcaaatccttagctctgttttcgtattgactgttcgtctttttcacatgtatgtggcggaaatccgctggcagttcatatgccaacaagcacgggtgcagtacgttccacccaaacgtatttgaaaccttttgcaggttgcagcaagtgtctccatattagcatctctgcaagtcgtcagtttcaagacaacttagtccgatggaggttatgaatggaagtagttaagttttatgtactttgtttctgatttcaactaatatagagagatttgatcctcttattgttatcaaaaactcttatttgatccggaagatagagatagattacattttttttttcaagtatggaatggatttcttttcctgtgatattcagtacattatttgaattacaaaatgaagaaactttaaattgagcacctagcagaaatgtgtggtaccaataattcacagaaaaaatgtcaactacgcagttgatagaagaagtggctccttaatcaggccaagagggaaacaaggagagatatttattggtttttggaatatgaccattgaaattcccaaagaaccgaagaaaactatgggaaaatgtataaaatgcctgtctttataccaaaaaaatataagacccacaaattcatggatacaaagtacaaacaaacaaattatacacaagaatcatcttccgatccaaggtatattcttctgctagagtaaatcatggacgtaacatgcataattaacaatggttacttaacaacaagtagtaatgaaaaattgaagacgttcagtctatttgggcaagaggcaaatattaattttcgttactatacgtttattttcttggcaatttagtttaattttgtttaggtcaaaggcaatttattttgttattaaaaagataaattagatttttttagaaaatagcctttctatattaattttaaattcgagttcacgtggcggtcgctaccaaacttcgctaaactttagtgctttactccaaaacccagagtccatcacacaagtccaagcccgaaaacaagggttcttgctccgacacgacaacaaatccagattttgagcttaggtaaactcctaactccccttatactctcttcttattcaatctaccttgtttctatgccttgaatccaattcccagacactctggttgcttgtaatctatgttcggttgagagtgaatctgtgttcgatcgtgtgtattaatacctccttctttggttcggacatggatctctgtctataaataacgggaaatctagactttaagtatacgaatttgagaaatttcgattctttcgcttgttttgttgatgggtgtgagtttttatgcttaaattctttttcgttgcagggaaacttgagaaggagaaaaaaatg

SEQ ID NO: 22599 - DNA, 3000 bp, Unknown; identical to SEQ ID NO: 2898
  misc_feature (1)..( 3000): 2750-1469P.txt file - cDNA_ID_2106933; gDNA_ID_1620614; Annot_ID_161999

SEQ ID NO: 22600 - DNA, 3003 bp, Unknown
  misc_feature (1)..( 3003): 2750-1469P.txt file - cDNA_ID_2106939; gDNA_ID_1620324; Annot_ID_153425
gtgaggttcctccccatcaacatcaagaacagtaaaatgaggtccaaaatcacaaaacaaagacccaaacagccccctaacatcagccttgatgaatgcaataggaggctgatgactgtgacaataatcatcaatctctgtcgctttctcaaaagagatatccacaaataccacaacctgcatcaaggaaaaaaaaaagaaatcaaccactaaagccaaacattctgtacttttagtagaaacgttttcatccacgttcagtcacctctaatctcttttacagataattatgtccatgaatcatgatagtattattaacaactagaacaaggaagcaaagacaaaccaaataaaggaagggtttggatacctggaaatcagaaagctgctctttggttaacttcccagtcaaagttgagacagccacagcattgttgagttcttgcaacttgtgaacagaagcaagtgctctattcttaccaatgtcctcctccgtgaaaacaaagttactagataggtcccatagctcaaccacattttcatcgtgaagggtcactgacttcacaccagctagaataatattcttggctaaataagaaaaaaaaaaaaaaatcatccatcagaaagaaggaaataacgaagagaataaagagctataccagtcattagttcattacaaatctatagtgaatattgaataatccttccattatataatgtgtcactaactcattagaaaatcaggattaacaagttaatataccaattttacaatctcaacttcaagtgcccaaatgtacacacaacatcaaaacagcttaatcacgaaatacgtttgctcaagcttgaagctctttaacaaccagcaggacaagcacaggaataacatgcaagcagaaattaacaacgaaaagtacaaaaatcgttaccaatctcaacaccaaggccctgcatcccagagatgagaacgttggaagcgaaaagcttcctcatagtctcacggccgtaaacggcgagctgtctgctatgaagatcttcatcgatctcctgattgttggagttgtcgttaccaaactccgccatgctcatcaccgtatcgttaccaccgatgctgttgttcaaaccgatgctactggagttagaagcgttaatcgcagaaccatcagctgactcagtgtgatcgatccgtcgcttcttcatcggcgaagaagcagatgcgatgatgttctccttaacaacgaatggttccatatagagtaactgaaagagaatatgtatcaaataaacagaagaagcttcgaataacaaacaaagacaataaatgaattccgatgagaaggttcctagagctaatcgatgaaggaatctgaagaagaaacgagaatcggaggaaatgaaaacgaaaccgtacctttgagagaagatcggaggcgataagcggcgaatttgttgttaaagtagaaagagagagtatactaagcttttggctttgtaggttgtgtagaaagaagcggcggtatataacaaaaattgggcgatgattgttgggctttgaaactatttgtgctgaattcagaatcagcctgtgttgtgtggtaagttttttcgttttttcaagtggaccagtttaagataaatatctggttttggtcttgtaacattgaaccggatttgagtatgcaatagaccaaattttaattcaggttaggtgtgattgaatttaaactttgaaattgttaatcaatcaagttttgttttttatttgttgattgataaagagagagtagttgttggatatttgaatgtgtgtcgtacttgctaattcctaaagattaatagacatttcaaagaagtgtaataagagtgaaacttaagcataatgtgtggaaatgtaccttatgaactcaaccattttggtgtgagcatttgtgtttggaaaatgatatggggatgctctctctatcacttataccaacaaacacaatctatgttttatgtgtgatttctaaacgaaaaaaataatattaatggatttgtagtgtgactacattagcgtgaaaaaaaactcttgtatcttgagaatttgaccaacattgcttgacaagtatattcacggttgtatgataacgatgaaaaatgtctcacattatatttcttgtgtgaattggcgttggtaacaaagattgacaaggaccccttaaaaaaaaaagtcaagaaaaacattcaaaagacatagaatttcggttgaaccggattggtcagcttaaattactaacgtatggttggttaagcaagctgaggaaatgtgtctccatttcgtgatttcttcttccctcgcggggatttagtcttctctcttccagcagaaaccagaagaactgttcctcgcttactacgatccctaaccggacgcgaaatttcaaggttcgtcctcctcttaacttctcatcagttaatgtctcttttaagttgaatttgactagtatgattccaatttcagatgatagttaggggattttatctctcggatcgatcgttttgggttacaagaactaagatagaatcaaatgtttttgtttctccattagttaattagtctaagagatatagaacaaaaagtttcgcttctttcttgttatcttttgatgcacagaaaggtcatgaaacctagaactagggggagtgatcaatggtatttgtagccaaaactaaaaaaaaagtttgtttacctctactttgatcaattcgatgctagatcattgtttattcaatgtgtggtcctttcttcacccaatttctccaagtttccaactcatgaatacttgtagttttttataaaaaagaggaaaccttattggtgctcaagttatatgagtgatgattggattcactatcttactttccacttctattagtattgagataagtttagctacaactttgtcagttatcgttgaatctaatttgatttgtgaatattctttagtgttttttcatcacatg

SEQ ID NO: 22601 - DNA, 3003 bp, Unknown
  misc_feature (1)..( 3003): 2750-1469P.txt file - cDNA_ID_2106946; gDNA_ID_1620525; Annot_ID_159556
agtctcgcgattgctatctcaatatgtacgcggagaagaaacctgacaaggttgatcctaatgagcagaggctctccaaatggttgaattgtgctttgtctaacgagcctttggctgagccgtgcgtgattgatctccttgggaatttgttcaataaagaagttttggtgcacgctttgttgtctaagaggttgcctaaacaattctcgtacattaagggtttgaaagatatggtgaatattaagcttacgcctgttgctggttctgatggttcatcgcaagatacgactagtgcacagtttcagtgtccggtctcagggcttgaattcaatggaaagtacaagtttttcgctttgaggggatgtggacatgtgatgagcgcaaaggcgttgaaggaagtgaagtcttcttcttgtttggtgtgtcatgcggatgtcaaagattctgataagattgtgatcaatggtactgaggaggaagtagatttgttgagggagaggatggaggaggagaaagctaagctgagagagaagaaaggtgtctcaaagaagagtaagaacggtgctgctgtggtggctgatacaggtgcgaaggtcgcaaagagacagatagaggatgggaatgtcaatggcaatggtataactgtgaagaaattcaaggcggcggataaagtgccggttaatgctactaaggaagtctatgcttctctctttacttcctctaagaagaagtctgatttcagggagacttactcttgcaggtcacttcctctcggcaggaattgatttgttggatcaatgttgtttacctgctcgcttcatttgctctgtaatctgttttgattatattgatatatcaacttgcttttgtaatttcgcctactggataatataatgtttttcttttccttttgcaattggtaaaaacagtaaacatgtttgcatccactatgctaaaactagtaaaagtgttgtatcataagctgcaattgtaacaagaggatatgtatgttgtttacatcaatgcacgggtcaatggctttgcagctcaattcaaaatgttatatagtcatccaaaaacagatagcagatttgcacaagcagttcacataaagccaatagtttccagatcgtggaaactcgtgaccatagtactctcattggcttagccgtgcctctctcttaagcacctgtgcggcatagaagtaaaacaactgtcaagaattaagtttttcccacaaatctagatgaggaaaagagatgaatgtaggcattaacctcatcagcaaacttgatcaaaatagtagttcgaggacgttgttgtccttcaatgggtacaaaatgagccgttaccacagcaggaaaccctgcgttatccagaactccctacatagaggaaaccgtgtcaggctcattatcttcttcctctaccaattaaatttgaaccctattcgtgaatatgtcaagggagcactcaccttcactatgccagcaacaaacgctccgcagttgaatgttcccatgtcttttggaatcgaaatgaacctacactttcacatttgttatcagttttcttgaccttaaaaaaattacattatctcagagtgtttatggaaagagctggagcagtataaacctgttaacaagaagctccttttcactgatcatgtactcatcttcatgttctgttcctttttcaagtgaatcagcaacctatggcatgttcgttaagtgtgagttagaatccaggaacaggcatgtcgatagaaacactcaacaactaattgaatttgaaatcgccactcacctttccaaacaacactttccacacagtactgtgaacgaaagacagaattcccagtaaccgtgtctctcttctgtttccctgaaacaatgaaacaatatatccataagacatgattgaactctgcattgctcttccatgaacaaaactagaagtatggaaacgttcttttttttttccagtttttgaggcaaaacacacaagtaagaatatcagattgcaaaaataagatgtaccttttcccggttgcaaagaagctctagaactcgagatccaactgcatacccagcatcctctagtctgagagtcatcataaaagaaaacacattgttaaggatggaatgtaaatgaattagactaataaaaaaaaatcatatgtatttctaagaatccaatcagctcaccttctttcaagttcagctatattgtcaacctgggtttgattgtactgaacgagctccgagaataagaaagcaaatgcggtcaagctcacctacaacacaagtacagttccaaaacgactaaccaatcagcagatgctcgaaatcgaatgatcacaataaagagatcaaagaagaagaagatcaaaacccgagagatttgaaatcgaaccctcccacaactattagatccggatccaaattgaacaatgttctcaatttccatacttagttcagtgtaaaagtttctgaggaaagctccgaaattggaagagaaaagtggatctacgtagcgaaaacgtacctcttgcttgcctttgctgagaggcttgtcaaggacgttggagtactgtttcattttcccgactccgatcatattcttcggttttccggtgagaacgagcttcccagaaccagaaccctaaacacagaacctttcttagttttccggtgaaagaatctgaagatgcttttgtttattgcaacctggtttgtcttttggttcgatgaaagtacaaaaaaagagtttatttacatttttgttaatattaatttttactttttcactaatcctaattggggtagaaaaaaaaaggggtaaataagtgtataaataagaccctagcgatgataaaaagaagccgagacttgttgagaagaagcccttaaagcttcaccgtctctctctctctctttctcgtgagcttcaattcgaatcggccgttcttcttcttcttcctccaatctctttactccaatg

SEQ ID NO: 22602 - DNA, 2341 bp, Unknown; identical to SEQ ID NO: 1273
  misc_feature (1)..( 2341): 2750-1469P.txt file - cDNA_ID_2106958; gDNA_ID_1620379; Annot_ID_155257

SEQ ID NO: 22603 - DNA, 3003 bp, Unknown
  misc_feature (1)..( 3003): 2750-1469P.txt file - cDNA_ID_2106965; gDNA_ID_1620328; Annot_ID_153573
aattttacgtaccgcatcaggtgcatggcaagttgcttctattgcataaactgcatcgaaactgttttccgggaatggcatcttcatgaagtcagcctgcaagattaacaagtgacagcaaccttcatcatgttgtcctttgcaaggtgttttcttattcaaaacatgatttatagcttatgcaataattacaagaactatgtactcaactgaccttgacaaagttacatgtcttgtcgacacctgcaagtcggtttagttcctgcaaagagaaagatgccaatatgaattataatggacatagcaggaatgcatcatctttcacaaatgtagatacgttaccttgcctctggtgatctggtattcgttattgttgagcccggtaacaactgaattgctgcaacagagcaaacacaaacacacttcataattgaacaactatgttcctaaccataaaatctatttcaaaactcatgtatagtagaagcacatgatgaaaagagtgtgtgtgcgcttttggtatgtgtagtcattttacctgaatcttgcaatttccctcaacggtccaccaattccacatcctacatccagtacctactcagaaacataatggcaatgagcatctgatggcgatggcgaagggtccattttcaagtgttcggttaaggtttaacaaaccttttgtcctggttggatgccaagctgaagagcaagaaagtgctcgtgtcgcttaatactctctcgaagcgattctcctttccatctacaaacccaaaattcatgtcaatcaatacatatataactatagtatcagtagcatctatggctgtaagaaagaaagtatattgaaagtcaagaattacctttgtgcaaaatggaaggattctccccatccgtactcataaaagctagtagcaaggtcatagtacttattaacctgaaaatttaatcaggaaatactcattccaacaggcaatgatttgttaaagaaattcaatacctagcctagtgaagtagtactttaactattttaaatatgatctcctggaacaatataggcttttttagttgtcgcatattctcaaagtcaggagacacaactacaaggaacaggcgtgtctcaaggtggtgaaaattttataaaatgtaaaaaaaaaaaaaaaaaaaacatttttgaatttaccatgtcagtataattggcttttctctcttcctcgtttcctccatggaagacatgatattgctcatacctgaatcaccaaatcactaaaaattaataatgtccaggacaaaaaaaaaagtccaccaaataacattttttttttttttttaattcatagaactctgaaaaactttggccaaaaaaaacaaaccaattgttctatatagatagatagatgaagtcaatgacaataagattggtggtcgggccctcaagaacgtgacagtagtgaaatacacgtcaaatggatcttttatagagccaaaaacgaaactagggaccatctctcactcatcatttttcttttttctgctgtattgaaagctcagttccatgaagcattaaaaaccaaaacaaacataaaaacagaggcgaaatccaatgccatcatggtattcgtggaattggtaaaaagcgtaaacgtatggaaatagtaggctcaaaatatacgttgattccaaaaatatggagatgctacacaaaacaacaatcaaatcttaatcttaggagttgattatagataaaaaccaacgagatcaatatgcatgagacgaaaaaagcgaattgtaagtgaatcggagatggaaactacgatcaaagaagaagggagaagaaattacttttcgacggcggtgagaacatcggatttatcgatcttcccaccaagattcgacgcgagatccatagcacttatgcaacaacggacgagatctgcaaaaagtgagactgaatcagaataaggatcaaggagaaaagagaaatcggaatcggaacacacattggaggagacttacgagagagaggataaagatgaatcggagtggtggggaagagctaaagaggcacctgactggctttagtttataactagtaagatagagaggtcacaagccgtcaatcccagcttggcaatgagagtgtattaccattatatcctctctacttgtccaaattaattatgaaataattagagcctatataactctactctctagtgttaagcatattctccactatctcgtaatttattctagtataaaataaaacctttactatagaatctcaccacctaccaagaacaggcgcgacattcgagtggttaattggttttaaatctagatcaaagattgaatctacctactacttccttgatcttctgtttttgccatcctgattcctgaatgtttttaagtgtttgtagcaagaatatttgactttctactaactccaaacctggtttaaaattttgtgaaatattcaatggtttcaagagaaaaaaaaacttagaatttttttactagtccactacttcactcctactttaatctctaaactccaaattctgattcttaactcatactgtatggtctgtatatgtttatagtttatacacatgggtatctcaggaacaattgctatttttatttttatcaatattatcggatttgattacatgtaaaacacaacaacaatagttagtctatgtcaacaatagttaattagaaaatgactaatctacctatcatttaattaaaaagttatagattacgttgtgattaactagagtagtactaatagttagtctatgtcatgattaacgtaggaaactaggaattgaccgtttgggttaaaattccaaaggaaaaaccaacttcaaccacacaccacatatttctctcccgcctaatcctccgcgttcccaagccgacgcgccgatctttcttctactacttgtcctccggcaataacaaactaaccatttcgaaaagtaattatctatg

SEQ ID NO: 22604 - DNA, 3003 bp, Unknown
  misc_feature (1)..( 3003): 2750-1469P.txt file - cDNA_ID_2106980; gDNA_ID_1971791; Annot_ID_58034
cttgagtctttgatttatttattcttggggttattttgatatcaaattgaggaaatttggtttcaaaagtcaaatttttatttagtgagatttcataaaaacaaatagactctgtaattttgttttgcagaagttgaggattgagtttttttttttttttttgtgtacagcaaagtgtacaaactaaattgtgcttcctaaacttcagatttctttattttactacattttctcataaatatagaaataccatttgttggccaaaaaagaacgaagaacgaattaccacttaaagtgtataaataaatatttttcaataactcatcaatctctttttctttgacattgtatatggtagctcatgcatgagacagacagtaacactcgaaaaggtaatactggaaaatcttgaaagtaacaacactcaaaaaggttacaaagtaagtaccgtgtaccgagaggtctaaagactaatacatagaagatgatagaaacggcgtcgttttcgataatcatggttagatgccatgtgactgattagagccgtcatgacttaaaaagttaaaactcttttattgattttgtgtattatattagtttataaaactttgatcaaataattcatgtgccaactagcgattgacctagtttttttaatcaaccgaaacatgagtcaataaaatgtgcaatgtaactctctctccctctcttttttccagagcaaattaactagttaaaatgattcataagactcatcacatattgccacatctctctatagttggacgtcttaacgaaccctaatgatttttaggctttttagcttgtcgtactctaaatgacaattatatataatgtacgaaactttctagtttagacttaatttgatcatcaagacagaactattcatctagctgaatttaatattcaacccaagcgataacacaactataatagcaattattgacatattgtcatcatgcaaattgtaaagtcactagtcattgatgtaagatctcttaacaaactcttttttcaatatatttctaatgtgaaatcggataattataatatgtagaaaagttgatacaatcatttactttcaaattaattatcgtctaattcatataaaatcatgcgtagttgtggaactttatttactactattagtaacttattttactgttataatgaaattttgcgtgaaaagcttcttacttgtgaattaattcgcatttggcattacagtgacatgccttgtcgcttttttccagtttagtgtttttttaatcgtatattcgtatgagagaatatcattaattaaaaacgttaaaacaaaacattatcaactcaattattgacaatattacagcatcaaggaacatgttcgtgaccgcgacgcccatttttttattaggataattttcttacattttgttttattgtggatcccttaataatttcatagaaaactaaaaaaactgtccctaatacggcaatcagggatttaatcattttcttaacgacgattaaaattaggtctaatacattacaatatatgtatgaaaacgttgcatcgtctcgcatgacttaattgtctcccaaacatgtagtatttgatgatctttgacgtaatttttttttgttagagtatctttgatgtatatatttatcatccaatttataattagtagtgtaatgatatcacaatacagttcttacattttgaatgacattggtttccagatttaacttcatatgtcttgccaagtaaaatttgtacgcattgatatagtatcatggtcctgactttaagcattggcgatgggtaatgatattaatgaaatatcggcgaaatttcttggataaaaagaaaagattcgtacgcatgaaaccaatatgtgatgttggttccatattcacatagcatttgtaaaatttagaataaaatcgagtttacgtcagagccatccaaccattaccattaaaaattggatgaactgatgaacaggttgaaccagaaattgtcactcaaagttagagcttggttgataggttcttaagactaaacagttcctcatcagtatgtaatataatgaaataatttaatctctttgtgtgtaaggtgttaactggactaccactagactgaatttttaattaagtcttatcctatagtcttttcaataagttcacaattgcaagtacttaataaacaaaataattaatcagttaattatgacaaattagtcaacatccgatcacattccacgttgtaaagttaaattttaaggtagatactaatcatacttgtaaaatgaataagatgagttcttcttcttgtcacctctcgatcttgttttaagtagttggtgagatgtgataaacttgtaacatgccactgagttgtcaaagacaagcatctatacagttattaaaaaaaaaggttaagcatgtaaaaatacacacacatgtcgtagtaaatatacacctttttataattaattatattgtaacgaatttgttgttttgttataatatatagattaatgcatgatgttttgcgattaaagccagacgagttgtaatatccacagccttgataagctctacatgcagtgaacaattttatacatttagaaaaaataatcactatctcgaccatatagaccaggccactacattacagctaatctctggatttacttgataattaagacaaatatagaacattaaaatactaactcgatgcctcaccttagcctcctctcaaattgtcaatatctagatggagtgttacatccacattcctaacagtttttactctttattttaatatatccttcaacagatcatcatcagaataatcatcaaatcattattatatatttaactagcccaaattgtaccatacctatcaatttaaatttctctttctatctactataaaaagtgactctctaagaactccaaagattagaacattgaattgaattagccatg

SEQ ID NO: 22605 - DNA, 3003 bp, Unknown; identical to SEQ ID NO: 22604
  misc_feature (1)..( 3003): 2750-1469P.txt file - cDNA_ID_2106980; gDNA_ID_1971791; Annot_ID_175559

SEQ ID NO: 22606 - DNA, 3003 bp, Unknown; identical to SEQ ID NO: 22604
  misc_feature (1)..( 3003): 2750-1469P.txt file - cDNA_ID_2106980; gDNA_ID_2926197; Annot_ID_141331

SEQ ID NO: 22607 - DNA, 3003 bp, Unknown; identical to SEQ ID NO: 22604
  misc_feature (1)..( 3003): 2750-1469P.txt file - cDNA_ID_2106980; gDNA_ID_2926197; Annot_ID_201548

SEQ ID NO: 22608 - DNA, 3000 bp, Unknown; identical to SEQ ID NO: 7882
  misc_feature (1)..( 3000): 2750-1469P.txt file - cDNA_ID_2107008; gDNA_ID_1621171; Annot_ID_57253

SEQ ID NO: 22609 - DNA, 3003 bp, Unknown
  misc_feature (1)..( 3003): 2750-1469P.txt file - cDNA_ID_2107046; gDNA_ID_1620648; Annot_ID_163365
aacctgagagcggtggtcgaggctgctgctgatatcaatctcggtgagccagattgggagctggagcgtagcgagtttatcgaggatggctctcatcagcgctacgtttggcgtcgtgaagtgaccctcgagaccgattccgtccatccttatgccgtcgtaccgttggagttccctcaccctggcgatgtattcgtcaaccgttgacttctcgtcgctgcaagtctccaccacgttgaaatcattgaagaacagagtcgccaacgagtcaatctcacgaaccgcggcgaagaacccgtacgacgttcttccccagtctgctctcgtagaagtcgaagtgaagcatctcgttgctcacgtcccaatgcacgaactctcctctgtaccgagtcattagactcttgattcgccggttaaccgccgaccggagatcttcgccggttagattacgaacccagtcgggattgtatttgggatcctcccagaatatgttgtggccgcgagcgatgattctgttagctctgacgagattcatcatcttatcagccaatgtgtagttgagtttgccttgatcggactccgtcgcgtaccatttcagctcgttctcgaataccgtggcgtcgaatctcttgacgaaccattcctaccaaaacagaatccgtttaaagaagcaaagacattgttgttttagtgtagactttagcgagtgtgttttacttggtaaggaatgtttccaaggatagttttggagatggcagatccaatggggaagtctttagagatctgctctactgtcacctctgctccttcaacgctctctccgttttcttttgacacgtgaattgtcactgctcgttttctcgcttgaaaatgagtgttaagagggaaccacataaagaatacagtttgcgattttgatgttagaaatgagtgtgtgtattatgcaacatggtaaactattattgtgtcgatagtcttcctagctagaagagttaggcagcgtgtcctgtttatcttaacagcggtacaagacaagtatgagttgcatttcagctacaagagagtacaagagattgtctgagattaaggcattgttttgtgatacatcagcttaagctatatcatcatcaaaacatgaagaatgctccatgtaaagagaggacaaggttgcagttattaaagaaaagttcttggtggttcttttgggaataaaagaattagattgagtggctacatgaagaaaggagatgtgtcacacgttttggcacactttcttaagagttatgtcacagaaactcattcggatacattagaacgtgtgagtgaatcaaagaaacagtgaagagcatgcagcataactcatagaagagaagctgagcttacaaagacaaagtgacatccttttttttagtttctggtgaagctatgttcatggaggttgtcttaggtatgtagctcaatggatgagtcaaaaggctgcagaaaatgtttgataaagattcatggaagttcagtttaccaaaagaaaggaaagccaagaataactggttatgaacaagttcaaaggttataaatctgtgggtaaaaggactcttacggatttgtttgaaggtcgttgattggttaagatattcagaaacgaattgcagatctctagagaattgcaggttttcgaaactaagttgcagatcctagaataagttgcaggattctgaattattatgttttttagggctgagtaagctaagaagaggttattggagtgattcagtgggattcttagaagaagaaaatggaagagacaagtgcaagtgctgcatgaactgtctcaaggctactcacttcaataatgtgaaagtgtcatgtatctagtttgataaacgacacatctcaatgctggtggcagtggctgaaaagaagctctagaaggaagcaaatgcaagaaatttaaactgcatttagaagacagtaactaaggagtttgagttagctgtctgcatcatgagaagattacataagtaactactcaagggaaattcactcgcaggttagtcaagtgaacggtttttcaaagtatcagagaatcataaagaagacaaaggctctagtaccaatttttctgttatccacctgttttatatatagatttgaagagatgagatttttaaattgctacaaaagagagagtctacaatttcacaagcttgtaccaatttcagcaaaatgattggacaaacttgtaccaatatatttaacatgtttagaaaatattcaactcacttagtttgatttcttcagctgcgattctttgaatcaagttttcagttataagcttcaacctgtaaaaatggctgcagaacaaaatgatgaggaaattttttagtatcacaaagtccagattcaagttttttttcaattgtatctaaaacacacacaactttcagattgaataaaatctgaatttcattctcagcaggggctaatataaaaatgacaaaaggagaggaggaggataggagctatatgtctactatttttagttttttagccaatgagagagctccacttcataccccacttttaccgatcgtgccatttcacagtcactctcacccatgtcgcgttgagcgcgtgtctacgatttctaaagggggttaatccacaaaaatcattcatttttcgatccacgcacctcattctcaaaaacccgtcgcgtgtcttatttttttttgttttcttctctaaaccaaagtaaaccgaaccaagatcaatttgaatttcaaaaccaatgtaaacccataaaacccatcgctgtttcactttcactatccaattccaacgaaccagattgataattttgattcgattccacacagagatcataatctaaaccaatgcgattaataagagagccaaatcttacagtatagcttaaaatcttagctaaatcccaaaaacacgagattctaggcgaaaagagaagaaaaaaaaattgccagaatg

SEQ ID NO: 22610 - DNA, 3000 bp, Unknown; identical to SEQ ID NO: 3866
  misc_feature (1)..( 3000): 2750-1469P.txt file - cDNA_ID_2107050; gDNA_ID_1620671; Annot_ID_164103

SEQ ID NO: 22611 - DNA, 830 bp, Unknown; identical to SEQ ID NO: 3085
  misc_feature (1)..( 830): 2750-1469P.txt file - cDNA_ID_2107050; gDNA_ID_1620623; Annot_ID_162384

SEQ ID NO: 22612 - DNA, 3003 bp, Unknown
  misc_feature (1)..( 3003): 2750-1469P.txt file - cDNA_ID_2107050; gDNA_ID_2926200; Annot_ID_201803
cctgtaaaaactttttccctggaaggcatttatcgagggcaagaaattttgtcactgacccatcattcccgtgttgaacagcagcagcaaatttgcaatgtaaatgagctgaaaaccaatattgaggcttcagtttttctagcagtagagccgctggtttacttccaagagttttttcctcgatctgtaataaattttggtcaaatcaattgaaaacctctcaaaaccaaaatgaagaagtagaatcatgttcccacagatttacctcttgacgaaagtatggtttttgccgcataagtgattctgagtctccataatcagtgattccaacaggccaatcatgtgatagaaatatatcaagcggctcttcaagttgcatcaacttctggacatcatagtcacgaacatgatagaccgatctgatggtgctctcgttatatggtggccgctcaaagtgtcctactcacacaaatgactgattctcactttattgacaccaaacaaatcaaacgaattccctaatctatacatttccactatagacactaactcagaaatccaactttctcccatttcaaaagctgaaaaattggtactttgtcagagagatgaagaagaaacaaacctgaacggtaatgacgctcattgtatataccagaaaggccaccaattcgcacattaccaaacttgacaactccagcaaaacccaaaaagtaaatattggtggcagcccaacccccataatacctatagcacaacaaccagcaaccatcaagaacacattttttaagcctcggaatcctaaactcaaatactagataacttacaattcccataagtagttagaagcctcatgattcccaccaatgaaaattgtgggaatcggagcaacttcttggccggagtagtacttccagaaagatttcatctctctgtattttctaggtacgttaaggctatccatgtctttctcatttctaacagcctaatgttttccacaaagaacgaatcttttcagacttaggaagcagaatcgaatggatttttattttcaaggtaaaaaaaaacaaacgattacctgaaaatcgccgcagcagaggaggagatcgactttagtgttgtgaatctgttcgtaatgttgaattgttttatacacattgtctaggtctccatgcatacaaccttcaattgcaatcttcatctctctgctgaattctactattctcgggtttcactaattcgacgagctcaacttacaaatttgaattcgtgccgtgagacgaacaaacgattagtggacaaggaccaagaaagaggcagaagaattgagtaagaagagcagagaagaagcgtggatttagggttgtggattttgagaatcaaaactgaggaagaagaagaacaaaacgatgtcgtttcaataaacaccaaaaccacggtcgtttcgaagagaagagtcaaataaagaaaaaacgcgggacggcggcgcggaatgaagaagaacaaccaaaagcccaaaagctaaaattgaaaataaatttgggttaggcccaaaagcccactaaacattttccatgtgtactgcgagttttgattttagtccgttaaaatagggcctattataagaaatggtctgtctttctttttttgataatgggttaaaatcatagttgcaacagttgattatgagtttgatatataaataattttttgtctgttaatttttctcgaaactaaacgaatgtgagggatatcctaggttttgcacctatatttgttagatattagaataattaaattcatgttcgtcgtagtttccttgtaaaacacgttttgttttagaatctaaagcatgtgaaaggcatgcctcgccaacttttagttttcacaccatgcgtgcctttttcttgttctttggtcggtcgtagtcttcttactaataacgaattctattccatgacgagttccttccacttttctcctttctaatctaaaccttttataaattattgattatatctgagtgagtagctcaaatataactataaataacaaaagtacctcaaaattatagtattaaggtataggaacgagtggagaattggaagcatgaaacacatgtgcatcagaatgccaacgttgactcacgagttttgaaatcttaatgaattcgataaatcgtctgagtcggattatacttcgttttttcataactctttttcagatacaagaatcggttgtttaagaaaaaaagaaaaatcgctgtttaatgaatcattttaccaaagaacccatgtagactatctatatctatagtattataccatgtggcttggatcgggtccgaagtactataagcctaaggcggaaaatcttttggttgagagaattgagctaaaatatcaatccagtatataaaaaacatataccgtatctctattcattataagttggttaaaaccattcccaaactcatgataatcactctctcaccaaaaaacaaaaatcaaataaactgatatatatatatataagaaaaacttgaacatttcctcacattgttactctagattttaaaggtgatagtgatacaatggctgataaatgtgctaaaatttgaaattaatttgtccattatgccgacatccatttataagcttttaacatgatactagaatcaacaaataaatatttttattattttatttggaaactattaatgagtacacgatatttacatttacataaattggttgattggttacctgaattttggtagaaattgcccacagaatattcggataagtatttcggtttagccaaaagcagtgtcgtcttcttacacaaaaacaacaaaactccaatcgtcctccctcgtcctgaatccatccatcatccactctcctcttaaaaatcctatctttgtggtttgcaatctctcccacgacgcgcttcatcattcatggctatttgaatctctcttctctctctctatcaaatatg

SEQ ID NO: 22613 - DNA, 3000 bp, Unknown; identical to SEQ ID NO: 8500
  misc_feature (1)..( 3000): 2750-1469P.txt file - cDNA_ID_2107183; gDNA_ID_1971813; Annot_ID_58162

SEQ ID NO: 22614 - DNA, 3000 bp, Unknown; identical to SEQ ID NO: 8500
  misc_feature (1)..( 3000): 2750-1469P.txt file - cDNA_ID_2107183; gDNA_ID_1971813; Annot_ID_175836

SEQ ID NO: 22615 - DNA, 3000 bp, Unknown; identical to SEQ ID NO: 8500
  misc_feature (1)..( 3000): 2750-1469P.txt file - cDNA_ID_2107183; gDNA_ID_2926218; Annot_ID_142322

SEQ ID NO: 22616 - DNA, 3000 bp, Unknown; identical to SEQ ID NO: 8500
  misc_feature (1)..( 3000): 2750-1469P.txt file - cDNA_ID_2107183; gDNA_ID_2926218; Annot_ID_203140

SEQ ID NO: 22617 - DNA, 3000 bp, Unknown; identical to SEQ ID NO: 4592
  misc_feature (1)..( 3000): 2750-1469P.txt file - cDNA_ID_2107235; gDNA_ID_1620716; Annot_ID_49119

SEQ ID NO: 22618 - DNA, 3000 bp, Unknown; identical to SEQ ID NO: 4592
  misc_feature (1)..( 3000): 2750-1469P.txt file - cDNA_ID_2107235; gDNA_ID_1620716; Annot_ID_165646

SEQ ID NO: 22619 - DNA, 3000 bp, Unknown; identical to SEQ ID NO: 4592
  misc_feature (1)..( 3000): 2750-1469P.txt file - cDNA_ID_2107235; gDNA_ID_2926190; Annot_ID_140998

SEQ ID NO: 22620 - DNA, 3000 bp, Unknown; identical to SEQ ID NO: 4592
  misc_feature (1)..( 3000): 2750-1469P.txt file - cDNA_ID_2107235; gDNA_ID_2926190; Annot_ID_200970

SEQ ID NO: 22621 - DNA, 3000 bp, Unknown; identical to SEQ ID NO: 6661
  misc_feature (1)..( 3000): 2750-1469P.txt file - cDNA_ID_2107285; gDNA_ID_1621100; Annot_ID_55837

SEQ ID NO: 22622 - DNA, 3003 bp, Unknown
  misc_feature (1)..( 3003): 2750-1469P.txt file - cDNA_ID_2107289; gDNA_ID_1621135; Annot_ID_56536
accagaaacagaattatttctcaagattttgtggttacggtttttgctgctatcatatccgaaagcatacgagcaaaagttctgataactctcgaacaagctacggttttgaatcaacctagtttcccccaagtacatgttacataccatgagcgtgtagttgctgtagtggttattggagatgcaaaacaataagccgtcgcagtgaaagagttgagatatcgcgaatccatcaaatgcacttacttgattcactgatgtgtcaacaaagtcatcgccgccatttaggtccagcttcattgaacagatcttgtcaccaatgaggataaaccctacgtgactgcttttccttgcggttgctttaccacctacaagattggttttcgatgaagcctcccatttcttgcacgttgatcggagtgatctaagagatgtaatgggaaccctagcgagaatctcgtctaccaaaaccactggaagggttgacatcgtcgtcgtcatttctctgaacttcagaaaaaccaaggactgttaggggttgtttcgtttttgggttcagtgtagccactagacaaatgtgttagtttacgatttaagggtaagaaatcttttctaaattggcaataaatgcttaatacagaaggaaatctggaaaagattttaattatttttggtggattttattccatctttgtatccctaatctacaaaggtgattggttaaaatgactaacagtaatcttgttcaaaaggacgttacacgaaacaaaaggagatgatgcaagaagaaaaaaaaaaattattgtaatcagtggaactaatttaataatctctctcgttacttttgcccggttgatagattcttcgtatatgcactaaacttggaacgtaagaagagaacacaagtggatcaaaataatatctaaacattttaggtttcgagatgtgatctgttccgattttcacaacagatttgtccaatgatgttaactgtttcgtatccacagttttcgttcggtctatacttacgagatttggaaaccacaacaactttcttctcctcgtcgatatagaagctctcaacacgaaatttactcgaaaaatcagagagcgatgtcctttccattgtgaagaacttggtccatgcatgatactgcattggactcaattttagtcgttatctccatgaccaagtccaaacataagtcgtagggttgatataacatagcgagctgctcttctctgatacaagatatatagagtcacagtctcttcatcactagagtgaaacggaagaggaagacgcggtccaaacctttctgatgtaaaatcaaaacagagtaaaaaaacaatacgatttgaaactgcatggctatctgacttctttttgtggagcataataataagtatttcccttcaaagacacaccgttgttgttgttgttgttgttgttgtttgtcgtaaccgaaagcatacatgtctaatctgtggaacttatggtatttgcttcttggttggatccacctgaattccccttaataagggttccacaccatgagcctccttctccttttgtgtatgacgcataacaatcaagccgtcacagtgaaatatattagatatatcgtattgatcaactatatatatttcctttaaagatggatcaacgaaatcgttgttgtggattccttggagatcaagtctcagggaacaaaccttagaatacattactacgaaacctagaaattgcttacttgtatctgctttaattaccaaaaacataattttccgacaaaacgttccaggataaagtgttccacgttgtacaagtacattgcacttcactcagagatatcaatggaactctagagaatatctctcccaccaaatctactgaaagatcggacaaagtcgtcattatttgttcgtctccttaaatgatgaagtgagagacgacacttgtatattctttgctaagaaccgtcatttgtgatcaaagaacaacttgaccaaatgatagatacttattgttctggtatttacaacattaagaactaattacaacttaatgaagaacagaacttgctggtctttgtgttagtctgactgtagaccataagtattagagatcttaactcattcattgatctgtaaataattcacagaactaacaactccttataaagcaaacaaaaaaggaccaatccaaaaacttgaacttttcctactatatacatcttcaaaattagctaacaaaagaaattaaaacttcaaacaagaaaaagatctaagaacaaaaatatcagtctcaaagattgcttgcggtgtacgtcaaagagagccagaagaagatatattaggttccaatctcatacttgaaccaaccttggtttcaagctttcattagtaatttcgagagcgagtcaaggtttgatcatccaatgggtggcttagcgattccttgtcctgaagatacctacatcactgcaaatccaacattttgttcttccgagttgaaaaatagacttactcattttaaacgtaggagtttttccccctcttcttcttaaagtttgaagatagaatgacaggtttttgcaatagacatgatcatgttcatgtcaatacatttaggatcgatcttagaaaaagaaagacaatagactaaaactagtcatctaaattttattgccaagagatgtacttcgaaaatgctagtatagattttagtctcttgacaataaaattttgtataaaatttgtctcctaaatagtatgtttttgtttttgttgtattccccaacagctaattctgtcttctggtatatgggtatacttcggttagtttcggtttgattacggttcacctttcaaatttaaacattgaaattgtaaaccatcttctttgtccaaaacgatgtcgtataataataacacgtagccgttaaatgaaaaccgaagcgtcaaaaaatcaaaatcgataaaaactaattagggtaaatg

SEQ ID NO: 22623 - DNA, 3003 bp, Unknown
  misc_feature (1)..( 3003): 2750-1469P.txt file - cDNA_ID_2107289; gDNA_ID_1621135; Annot_ID_172621
gctgctatcatatccgaaagcatacgagcaaaagttctgataactctcgaacaagctacggttttgaatcaacctagtttcccccaagtacatgttacataccatgagcgtgtagttgctgtagtggttattggagatgcaaaacaataagccgtcgcagtgaaagagttgagatatcgcgaatccatcaaatgcacttacttgattcactgatgtgtcaacaaagtcatcgccgccatttaggtccagcttcattgaacagatcttgtcaccaatgaggataaaccctacgtgactgcttttccttgcggttgctttaccacctacaagattggttttcgatgaagcctcccatttcttgcacgttgatcggagtgatctaagagatgtaatgggaaccctagcgagaatctcgtctaccaaaaccactggaagggttgacatcgtcgtcgtcatttctctgaacttcagaaaaaccaaggactgttaggggttgtttcgtttttgggttcagtgtagccactagacaaatgtgttagtttacgatttaagggtaagaaatcttttctaaattggcaataaatgcttaatacagaaggaaatctggaaaagattttaattatttttggtggattttattccatctttgtatccctaatctacaaaggtgattggttaaaatgactaacagtaatcttgttcaaaaggacgttacacgaaacaaaaggagatgatgcaagaagaaaaaaaaaaattattgtaatcagtggaactaatttaataatctctctcgttacttttgcccggttgatagattcttcgtatatgcactaaacttggaacgtaagaagagaacacaagtggatcaaaataatatctaaacattttaggtttcgagatgtgatctgttccgattttcacaacagatttgtccaatgatgttaactgtttcgtatccacagttttcgttcggtctatacttacgagatttggaaaccacaacaactttcttctcctcgtcgatatagaagctctcaacacgaaatttactcgaaaaatcagagagcgatgtcctttccattgtgaagaacttggtccatgcatgatactgcattggactcaattttagtcgttatctccatgaccaagtccaaacataagtcgtagggttgatataacatagcgagctgctcttctctgatacaagatatatagagtcacagtctcttcatcactagagtgaaacggaagaggaagacgcggtccaaacctttctgatgtaaaatcaaaacagagtaaaaaaacaatacgatttgaaactgcatggctatctgacttctttttgtggagcataataataagtatttcccttcaaagacacaccgttgttgttgttgttgttgttgttgtttgtcgtaaccgaaagcatacatgtctaatctgtggaacttatggtatttgcttcttggttggatccacctgaattccccttaataagggttccacaccatgagcctccttctccttttgtgtatgacgcataacaatcaagccgtcacagtgaaatatattagatatatcgtattgatcaactatatatatttcctttaaagatggatcaacgaaatcgttgttgtggattccttggagatcaagtctcagggaacaaaccttagaatacattactacgaaacctagaaattgcttacttgtatctgctttaattaccaaaaacataattttccgacaaaacgttccaggataaagtgttccacgttgtacaagtacattgcacttcactcagagatatcaatggaactctagagaatatctctcccaccaaatctactgaaagatcggacaaagtcgtcattatttgttcgtctccttaaatgatgaagtgagagacgacacttgtatattctttgctaagaaccgtcatttgtgatcaaagaacaacttgaccaaatgatagatacttattgttctggtatttacaacattaagaactaattacaacttaatgaagaacagaacttgctggtctttgtgttagtctgactgtagaccataagtattagagatcttaactcattcattgatctgtaaataattcacagaactaacaactccttataaagcaaacaaaaaaggaccaatccaaaaacttgaacttttcctactatatacatcttcaaaattagctaacaaaagaaattaaaacttcaaacaagaaaaagatctaagaacaaaaatatcagtctcaaagattgcttgcggtgtacgtcaaagagagccagaagaagatatattaggttccaatctcatacttgaaccaaccttggtttcaagctttcattagtaatttcgagagcgagtcaaggtttgatcatccaatgggtggcttagcgattccttgtcctgaagatacctacatcactgcaaatccaacattttgttcttccgagttgaaaaatagacttactcattttaaacgtaggagtttttccccctcttcttcttaaagtttgaagatagaatgacaggtttttgcaatagacatgatcatgttcatgtcaatacatttaggatcgatcttagaaaaagaaagacaatagactaaaactagtcatctaaattttattgccaagagatgtacttcgaaaatgctagtatagattttagtctcttgacaataaaattttgtataaaatttgtctcctaaatagtatgtttttgtttttgttgtattccccaacagctaattctgtcttctggtatatgggtatacttcggttagtttcggtttgattacggttcacctttcaaatttaaacattgaaattgtaaaccatcttctttgtccaaaacgatgtcgtataataataacacgtagccgttaaatgaaaaccgaagcgtcaaaaaatcaaaatcgataaaaactaattagggtaaatgtcaacaacaatccgatttctgagaattgtcacaagtcgagcaatg

SEQ ID NO: 22624 - DNA, 3000 bp, Unknown; identical to SEQ ID NO: 3895
  misc_feature (1)..( 3000): 2750-1469P.txt file - cDNA_ID_2107309; gDNA_ID_1620673; Annot_ID_48178

SEQ ID NO: 22625 - DNA, 3000 bp, Unknown; identical to SEQ ID NO: 3895
  misc_feature (1)..( 3000): 2750-1469P.txt file - cDNA_ID_2107309; gDNA_ID_1620673; Annot_ID_164155

SEQ ID NO: 22626 - DNA, 3000 bp, Unknown; identical to SEQ ID NO: 3895
  misc_feature (1)..( 3000): 2750-1469P.txt file - cDNA_ID_2107309; gDNA_ID_2926200; Annot_ID_141456

SEQ ID NO: 22627 - DNA, 3000 bp, Unknown; identical to SEQ ID NO: 3895
  misc_feature (1)..( 3000): 2750-1469P.txt file - cDNA_ID_2107309; gDNA_ID_2926200; Annot_ID_201770

SEQ ID NO: 22628 - DNA, 3003 bp, Unknown
  misc_feature (1)..( 3003): 2750-1469P.txt file - cDNA_ID_2107426; gDNA_ID_1620639; Annot_ID_47447
caagagcagaatctctctcttgctaagctaagaaaacatgaaaagtggaataaatatttttaaaagaaagaagagtatagctcatacatgtgtatgcattggttaattgggggtatgttgctttgatgattgtaggaaggtacttcacttgaatagaggggattcttccctttatcttttgggttcttcacaatctaatctattagcttttcttttcatgcagtatttttcttgttactctaaacctcttccaaatcttcttggatattctcatatcattatgattccaaattcgtttctctttattaaaaaccccaataagaattggattctcatggttttcgatacgttattcagccatacgacgactatgagtgattctagtgagactaattgaggattttttttttctatttttacatgagaatactgaagatgtttaatttatctctgattaaatataatccattatacagcatattacgataagtaacaccgcctcgtttgtttttgtttagctagtaaaccgaaattttgatcgaatacattatataaaaattcatgtaaaatactctacaatataatactctcttgtagtctgaatgtaattataaaaaaatgttttgtgtagacattaggtaaaccatctagagtattagaaacaaaataatgtaagtaaacgtaaaactaagacgatttcatgactaaattattttgaaggtcgaaccaaccaatcttaaatacacatatatgaagaaatatatgttttcgaacaaatggcaatcaagaaaatgctttttgtgtgttaatgaaatataaggttgacacatcaatatcgcgttgatattctcattgtagattgttggttatgtagggagactaataatgcgaactagaaaaagatatgtgagtcaactaaggttagtgttgatatagcaactctcttatgtttttaaatttgccataaaataggttgttagtccaaatagccgatataaacatcaatagaagagtaattaatcgttccatcggaacatccgatgaaattggaacgagacctatacagaagaaaacaaaagagcaactaatcatcttgatcacatgcccaatatgcatttaagtaaattggagagaatgatatagaaaaacaagacattatctacaactacaagatatcaaagcactcggttaaccgcgtccctgtgaagtgttagttatcagtacatgaattgtgatttcagcatcttggtccttttttttttggacaaccgtcatctttttcttgatcggtttttataacgtacaaacatatactatttcaacagttttcttttaattttttttttttttgaatatacactttctttcttttatttgtttgattacaaaattttcaaaaaatagtgttcggcaaaaaaaaaaattagatcggccaatgcattatatcccctagcgtaagctctttttcaaccaatcgagagtccatgttttcaataaaaatagggttttattagtaacagtagttaaagcatttaacatacgtaatcccaaaaaaataaaataattctgtatagggacgaagactagtattcgttgacgacaagagtagagtagactctagctagctgcaagttttgaagaaatctaataaccaaatctaagtcattttacttacatcatcatggatcatcattaaccacatgaggctgagcagatatcgaacgtgtgattgcgatgtggagaagtaaaggacgaggccacgcgcaactgagcaggagcgcgtgagattcagggttttagggcagagatacggaaagagacagaggttttatagcattatattgaaagagaacaaataaaaataaaaatatgagcctcgtgatcggagatttttgcagtgatgactgtactcttcttcctcttctctcccccttgtcacgtgggctaaattttgaccacccttcttcaatgaccatcaacatcgcatcacactctctccttcttcttcttctacgttttttattttctgttaaatttcctccacaaaatcgataatttcaattttttcatacaatatcatagttctagtaaagtaaacattcgtgtgtgagtgacataataattgcttcaaaaagaaataacgaattaataagagttgtgtgcttgatggtccaaaagtcgtatgtttttcaccatcacaataagatttaccatatctacttaaaccaaacttcaatctatgatatttggaagctagcaatgaatgattttgttttagcatatgttaccgagcctattcatctttagattgaaagttttgtgtccaacaactagcaaacccttcgctttttaaaccaagatcagtttttctacatagtttcgactttttgttattttacttcccatcatattttgttttatttactactgacattttcataatgtacggtacattttcatatattagcatccttatctaaaagctaatcaactccataacgtacttgaaatagggatattttagttgaattattcaaaacaatcacacagtgacacagactctatgtagaccaagcatgtgttatgtaattagaaaaaataaactgtgattaaaatatcttttaacttgttaacttggctgcctaaagaaacttgatactgtatcatcgttcatcgtattttgtaattaataaaacataaaaaagcaaggaaaacccatttgagtaaatgatatattaatattacttcgtaaaaagctgcgtccccacatattctattgattttaaatactattcgtattaatataaacctgcatataagcgtacatatacatttctgattctatatataggtgtgagaccttcttctccattctacacttcactccaacgtgaaacctgcaaactgaacttatctcttcatattttctttagcttctcttaattttacacttagggttttcaaaccagtagagagagagagaagtgtgtaagagcgatgatg

SEQ ID NO: 22629 - DNA, 3003 bp, Unknown
  misc_feature (1)..( 3003): 2750-1469P.txt file - cDNA_ID_2107426; gDNA_ID_1620639; Annot_ID_162986
attcaagagcagaatctctctcttgctaagctaagaaaacatgaaaagtggaataaatatttttaaaagaaagaagagtatagctcatacatgtgtatgcattggttaattgggggtatgttgctttgatgattgtaggaaggtacttcacttgaatagaggggattcttccctttatcttttgggttcttcacaatctaatctattagcttttcttttcatgcagtatttttcttgttactctaaacctcttccaaatcttcttggatattctcatatcattatgattccaaattcgtttctctttattaaaaaccccaataagaattggattctcatggttttcgatacgttattcagccatacgacgactatgagtgattctagtgagactaattgaggattttttttttctatttttacatgagaatactgaagatgtttaatttatctctgattaaatataatccattatacagcatattacgataagtaacaccgcctcgtttgtttttgtttagctagtaaaccgaaattttgatcgaatacattatataaaaattcatgtaaaatactctacaatataatactctcttgtagtctgaatgtaattataaaaaaatgttttgtgtagacattaggtaaaccatctagagtattagaaacaaaataatgtaagtaaacgtaaaactaagacgatttcatgactaaattattttgaaggtcgaaccaaccaatcttaaatacacatatatgaagaaatatatgttttcgaacaaatggcaatcaagaaaatgctttttgtgtgttaatgaaatataaggttgacacatcaatatcgcgttgatattctcattgtagattgttggttatgtagggagactaataatgcgaactagaaaaagatatgtgagtcaactaaggttagtgttgatatagcaactctcttatgtttttaaatttgccataaaataggttgttagtccaaatagccgatataaacatcaatagaagagtaattaatcgttccatcggaacatccgatgaaattggaacgagacctatacagaagaaaacaaaagagcaactaatcatcttgatcacatgcccaatatgcatttaagtaaattggagagaatgatatagaaaaacaagacattatctacaactacaagatatcaaagcactcggttaaccgcgtccctgtgaagtgttagttatcagtacatgaattgtgatttcagcatcttggtccttttttttttggacaaccgtcatctttttcttgatcggtttttataacgtacaaacatatactatttcaacagttttcttttaattttttttttttttgaatatacactttctttcttttatttgtttgattacaaaattttcaaaaaatagtgttcggcaaaaaaaaaaattagatcggccaatgcattatatcccctagcgtaagctctttttcaaccaatcgagagtccatgttttcaataaaaatagggttttattagtaacagtagttaaagcatttaacatacgtaatcccaaaaaaataaaataattctgtatagggacgaagactagtattcgttgacgacaagagtagagtagactctagctagctgcaagttttgaagaaatctaataaccaaatctaagtcattttacttacatcatcatggatcatcattaaccacatgaggctgagcagatatcgaacgtgtgattgcgatgtggagaagtaaaggacgaggccacgcgcaactgagcaggagcgcgtgagattcagggttttagggcagagatacggaaagagacagaggttttatagcattatattgaaagagaacaaataaaaataaaaatatgagcctcgtgatcggagatttttgcagtgatgactgtactcttcttcctcttctctcccccttgtcacgtgggctaaattttgaccacccttcttcaatgaccatcaacatcgcatcacactctctccttcttcttcttctacgttttttattttctgttaaatttcctccacaaaatcgataatttcaattttttcatacaatatcatagttctagtaaagtaaacattcgtgtgtgagtgacataataattgcttcaaaaagaaataacgaattaataagagttgtgtgcttgatggtccaaaagtcgtatgtttttcaccatcacaataagatttaccatatctacttaaaccaaacttcaatctatgatatttggaagctagcaatgaatgattttgttttagcatatgttaccgagcctattcatctttagattgaaagttttgtgtccaacaactagcaaacccttcgctttttaaaccaagatcagtttttctacatagtttcgactttttgttattttacttcccatcatattttgttttatttactactgacattttcataatgtacggtacattttcatatattagcatccttatctaaaagctaatcaactccataacgtacttgaaatagggatattttagttgaattattcaaaacaatcacacagtgacacagactctatgtagaccaagcatgtgttatgtaattagaaaaaataaactgtgattaaaatatcttttaacttgttaacttggctgcctaaagaaacttgatactgtatcatcgttcatcgtattttgtaattaataaaacataaaaaagcaaggaaaacccatttgagtaaatgatatattaatattacttcgtaaaaagctgcgtccccacatattctattgattttaaatactattcgtattaatataaacctgcatataagcgtacatatacatttctgattctatatataggtgtgagaccttcttctccattctacacttcactccaacgtgaaacctgcaaactgaacttatctcttcatattttctttagcttctcttaattttacacttagggttttcaaaccagtagagagagagagaagtgtgtaagagcgatg

SEQ ID NO: 22630 - DNA, 3003 bp, Unknown
  misc_feature (1)..( 3003): 2750-1469P.txt file - cDNA_ID_2107486; gDNA_ID_1621099; Annot_ID_55815
aagaagaaatagacatataattataatctctagtagagatatttgtactagtagtctatgcacatgatgtgtaaaaccagtggaagataaatgagtctttatgtgaaagaatagtgaaattaatgagattttcacaagataagaaatgtattatgaagagatatattctcttgtggtggatgtaatatttttaagtatctaaagtctgacaataagagacagaacactggatatgacatttatatgaaattattgaaagatataatctctgaaggattaattatatgagaattatgttctctagaactctactcgatcgaataaaaagaaatatgtaacatgacatataatcatataaatgtatatttatgttgagtttgtcaaaatatattgatcaaactaatatttgttttgaaaatcattaaaactcgtacagagttatcataagtaatacgatgacaataatctatgataaaatatcactagataatgatatttataagtctatatgaaaaccatataattttgatcattaagattatggttattaattccaacgagatattgtatttgattgaaaatcatctccttaagaagatgtttccgagggggagattgaatgatatgcgtggatgtaccctttttccttatcatagtttttatcccacatgatttttctatgacaaagtttttaacgagacattaaagaacacgcaaataatacacttgatgaatattaagaaattctatcaatcatccaaatgaatattatacactaatgatatttagagaaataaataagatggtcaagatgaatcatctaaaagattcatgagcagaagaatgacgttgtactttatccagaaatttgttcaagagaagatttggcagacttattctcaaatactgtttattctctgccacatcttctaatcatgcagagattttactaattcatgaagctagccgcgagtgtgtatggctaagatccatagttcaccatatacaagaagactgtggtatgtatgcagggaaaaaaactccaacaattatgtacgaagacaatgcagcatgcatcgcacaactcaaagacggatacatcaaaggcgatagaataaagcacatcctaccaaaattcttttacacacacgatctacaaaagagcggcgatgtacgagttctacagatccgttcgaatgataatctggctgacttattcaccaaggcgctacctactgctactttcaagaagttagtctatcgtatcggattacgccgtctcaaagatctcgacgaatatactcataagggggagtaattgtatgttgcactctttttcccttaaccaaggttttcctattgggttttcctggtaaggtttttaatgagatagcatttcaaatactttacgagttatggtactataatggtcatcaagggggagtgttatgaataaagatggatgcccattataagacccatcatctaagcccatcatttagatgtttgtagagttttacctttttcttgtactcctatataaagaacccttttctcaatagaaaacacactcatttcttctatctctttctcaagagaaatttattttcaacggatacttgtgacttttggagactcgagaatctaaacaacggcgatctacaaagataaagagttattgagctcactatgccaagttctgaaaaggcccacttcaaattataaaggcccagtttaagcccactatggaaacgagacagaagcaaatgggtataatcttcaagtcaagcgaacgatcggtgacggtgttatcttaccgccggagccggagtttcccactctattgtaataacagatatttcgaccggagtttctaagtgaatccaaatttgttgttcttcgttgcggctccatctctcgctgtgtatttatagtcaggtcttttgagttatcccattttgcgcgatcccgtcttcaccgtttccatcttccagcgagcacatctctgttgatcgataattttgtacctagttcaggttagttgcgtaattatacttgtgtaatttctttttttggattctctctgaactgatttgctgggcgtggaccttcggttttgttcatttcgtagtcctctatgcgaatgtttccagcgtttgatctttagatctgtagttcgattgtatgcttctaatagttattcgttgtcttgtacatttgatctataatgagaactgatgcgcggttttagtcgaacgcgacatcgtagttcggattagagagtgtactaatctttgtttaacaaagatggcatttcatcttttgactgtgtgatatgtcaaacccgcagaatccataaaactagtttactttgatatgttttgttcttcttcattgaatgtttgtgtggtgtcttgtagttgtaggaaagatgaacaagctgttggaatatgggagaaaagctatgttctatgtgagagttctctccggctatgaagaaaggagaatccggagttacaggttgcaactcgaaaagcgtatccagcaggtttctttctcaccatgcctctatctaatttcttagcataaatggtagaataagatgataaaaccctgctttggactatagttggtcgcataaatttgaagaaccctgtctataaacattattacccttgtttttattcattgttaatggaagtcaatatgtgtacttctagtttatgataattgaataatatctataaattagaaaagcttagtacttattgtacattgtgaagactgctgaaataagatcttccttacattatagtttcctaatcgtatagacttctgtacttgtgacttctagcttctagcttgggttggtcatggacctcatggttacctttttatctgatcaaacctctggtcctgcaggctaaccaaaggaaagtagagataaacagacttccagagcagattgtattatctgaagtccgccgtatggttgaggagatg

SEQ ID NO: 22631 - DNA, 3003 bp, Unknown
  misc_feature (1)..( 3003): 2750-1469P.txt file - cDNA_ID_2107486; gDNA_ID_1621099; Annot_ID_171299
agataaaaagaaatgaattatcaatgatcttcggagtaaagaatgtatattaagagtccaaaagataattcaattacagaatttagcgttgtaattgccagaggcatttgctgacccaaataaagtgatgaagtcacctataccagttgtaaattaaatgctctagaatataatgaatgtcctgtaaggaccaatttcaaactgctattgagtcttaagatcgcatgaagcgtaatagaccttggttccaaatataaacatcctcgtaaaagtgaaggagcacaaaattaaaaatgaccaaattgaggaaataaatattttgatgatctcttgaagagagtgaatgatctctaaaagagacataaacatgacaaatgaaacattcaagtacttgacaatgaagagatctagctagttatgtcatgtcaaaatataatggaatcaaaagcaaatcgacgtcgtaatatatttgcatgctatgagcagttgatattatggacaaaaaggaggatcatgaaagaaagtctattgaaaagtgtacacaaagtaatgattagccaaaaatggaaaagaagaaatagacatataattataatctctagtagagatatttgtactagtagtctatgcacatgatgtgtaaaaccagtggaagataaatgagtctttatgtgaaagaatagtgaaattaatgagattttcacaagataagaaatgtattatgaagagatatattctcttgtggtggatgtaatatttttaagtatctaaagtctgacaataagagacagaacactggatatgacatttatatgaaattattgaaagatataatctctgaaggattaattatatgagaattatgttctctagaactctactcgatcgaataaaaagaaatatgtaacatgacatataatcatataaatgtatatttatgttgagtttgtcaaaatatattgatcaaactaatatttgttttgaaaatcattaaaactcgtacagagttatcataagtaatacgatgacaataatctatgataaaatatcactagataatgatatttataagtctatatgaaaaccatataattttgatcattaagattatggttattaattccaacgagatattgtatttgattgaaaatcatctccttaagaagatgtttccgagggggagattgaatgatatgcgtggatgtaccctttttccttatcatagtttttatcccacatgatttttctatgacaaagtttttaacgagacattaaagaacacgcaaataatacacttgatgaatattaagaaattctatcaatcatccaaatgaatattatacactaatgatatttagagaaataaataagatggtcaagatgaatcatctaaaagattcatgagcagaagaatgacgttgtactttatccagaaatttgttcaagagaagatttggcagacttattctcaaatactgtttattctctgccacatcttctaatcatgcagagattttactaattcatgaagctagccgcgagtgtgtatggctaagatccatagttcaccatatacaagaagactgtggtatgtatgcagggaaaaaaactccaacaattatgtacgaagacaatgcagcatgcatcgcacaactcaaagacggatacatcaaaggcgatagaataaagcacatcctaccaaaattcttttacacacacgatctacaaaagagcggcgatgtacgagttctacagatccgttcgaatgataatctggctgacttattcaccaaggcgctacctactgctactttcaagaagttagtctatcgtatcggattacgccgtctcaaagatctcgacgaatatactcataagggggagtaattgtatgttgcactctttttcccttaaccaaggttttcctattgggttttcctggtaaggtttttaatgagatagcatttcaaatactttacgagttatggtactataatggtcatcaagggggagtgttatgaataaagatggatgcccattataagacccatcatctaagcccatcatttagatgtttgtagagttttacctttttcttgtactcctatataaagaacccttttctcaatagaaaacacactcatttcttctatctctttctcaagagaaatttattttcaacggatacttgtgacttttggagactcgagaatctaaacaacggcgatctacaaagataaagagttattgagctcactatgccaagttctgaaaaggcccacttcaaattataaaggcccagtttaagcccactatggaaacgagacagaagcaaatgggtataatcttcaagtcaagcgaacgatcggtgacggtgttatcttaccgccggagccggagtttcccactctattgtaataacagatatttcgaccggagtttctaagtgaatccaaatttgttgttcttcgttgcggctccatctctcgctgtgtatttatagtcaggtcttttgagttatcccattttgcgcgatcccgtcttcaccgtttccatcttccagcgagcacatctctgttgatcgataattttgtacctagttcaggttagttgcgtaattatacttgtgtaatttctttttttggattctctctgaactgatttgctgggcgtggaccttcggttttgttcatttcgtagtcctctatgcgaatgtttccagcgtttgatctttagatctgtagttcgattgtatgcttctaatagttattcgttgtcttgtacatttgatctataatgagaactgatgcgcggttttagtcgaacgcgacatcgtagttcggattagagagtgtactaatctttgtttaacaaagatggcatttcatcttttgactgtgtgatatgtcaaacccgcagaatccataaaactagtttactttgatatgttttgttcttcttcattgaatgtttgtgtggtgtcttgtagttgtaggaaagatg

SEQ ID NO: 22632 - DNA, 3003 bp, Unknown; identical to SEQ ID NO: 22630
  misc_feature (1)..( 3003): 2750-1469P.txt file - cDNA_ID_2107486; gDNA_ID_2926167; Annot_ID_139954

SEQ ID NO: 22633 - DNA, 3000 bp, Unknown; identical to SEQ ID NO: 3129
  misc_feature (1)..( 3000): 2750-1469P.txt file - cDNA_ID_2107558; gDNA_ID_1620627; Annot_ID_47176

SEQ ID NO: 22634 - DNA, 3000 bp, Unknown; identical to SEQ ID NO: 3129
  misc_feature (1)..( 3000): 2750-1469P.txt file - cDNA_ID_2107558; gDNA_ID_1620658; Annot_ID_163698

SEQ ID NO: 22635 - DNA, 3000 bp, Unknown; identical to SEQ ID NO: 3129
  misc_feature (1)..( 3000): 2750-1469P.txt file - cDNA_ID_2107558; gDNA_ID_1620627; Annot_ID_162532

SEQ ID NO: 22636 - DNA, 3000 bp, Unknown; identical to SEQ ID NO: 3129
  misc_feature (1)..( 3000): 2750-1469P.txt file - cDNA_ID_2107558; gDNA_ID_2926186; Annot_ID_140819

SEQ ID NO: 22637 - DNA, 3000 bp, Unknown; identical to SEQ ID NO: 3129
  misc_feature (1)..( 3000): 2750-1469P.txt file - cDNA_ID_2107558; gDNA_ID_2926186; Annot_ID_200661

SEQ ID NO: 22638 - DNA, 3003 bp, Unknown
  misc_feature (1)..( 3003): 2750-1469P.txt file - cDNA_ID_2107626; gDNA_ID_2926148; Annot_ID_197847
tttgtgaccaagatggataaagtctcaatccttggagacaccattgcgtacgtaaatcatcttcgaaagagggtccatgagcttgagaatactcatcatgagcaacagcataagcggacgcgtacttgtaagagaaaaacatcggaggaggtggaggtttccatcatagagaatgatgttttgttagagatgagatgtgagtaccgagatggtttgttgcttgacattcttcaggttcttcatgagcttggtatagagactacggcagttcatacctcggtgaacgaccatgatttcgaggcggagataagggcgaaagtaagagggaagaaagcaagcatcgctgaggtcaaaagagccatccaccaagtcataatacatgatactaatctatagaccctaactttattgatgccaactctagagaaggataattaagcgtatttttgttttagcctcacatgtattaagacatcagttacatatatagccggatgcaacatataaatgaaaatgtactagatgatattgttcatttgtccaatgtagtacttgtgtatgatgcaattgcaacatataaatgcaaatgtactagatgacgatgttgttcgttgtccaatttagtacttttgtatgaatgcgatatttggatgcagattcagttgcatctaaaacatcatattttttttgatgcataaagatgtagaatttctatgtagttttttcttacgttcaaatttgagaaaatattattaaaaaatctttacaaaattcattaaaataatttatgccaaaatttgtatgtcataatttatgtaattttatcattaacctcagattagagaaatcaaagagtttatataaaacattacattctactttggtgctcaattttaagaatcaagttgtagcacatcaaattacgaaatcaaattttccagcaaaattacgaaattgcgttttagtgtaagaatcaacaatttctagagtagactaatagttatactcataattagtgtatggaagaacatttataagtcaagaatattaagctatcaaccaacgagataaatgtattgacaatgttcatagttgcagcatgagctatatatatttttctcttagttgatcatcatacattatcaaagctgcaagatgtgtaactgcattggctccacttcctttgttgtcttctttcttgaatagtggtgttcaatagtgtaagatatctttctatagtttcagcacttagcaggctgcttaaaattggcctggcccattcgattctttgatttcggtatgaactgttagaattctgattgaattcagataccaaaccttgccaaaaagaaaaaaaaaacggtttaaatgaatattaacttactttgaccaaaaattgatggcagggtaaaaagactcaagataatccaaggtcaaacctattttaatttcagaactttataataatcgttttaaactgaaattggtttaatgtaaaaatttaaccaacctgaaccgagaactacaatcaaagtaaacaggagattatattaaatcgaaccactcttacaactcataggggtgggcgtacggttttatgatttggttttggtttggttttttcggttttataaaaactataatcatagaaaaacagaaaaacagtatgtaattcagtttggttccggttcggttttataaatattaaaaccatatgtatctcagttcggtttggattcgatttgtttttggtttggtcccggttttttagttattccatacttttacaaaaaaaaataagttcgatgatttataaataaaaataaacataaaagaaaataatatatcaatcaataagttagatataatagatatctttttaaaattaaattcttggtttctaaattactaaaaaaattaataattctaagcctactaaatttttttttttaaaatgaaactattattaatcaaactaatcacactataaaatggacaaaaatatttatcaataattatttttaatttctctaaaaaacctaaaaataatctggttttacggtttttaaccaaaccaaaccgaaataataataaaaaaatacaaccaaatagtttttttttttaaaactataaccaaaccaaactatttttttcgatcgggtacggtccgggttttcggttttcggtttttttgcccacccttacttacaagtcaaatgatgacatttttttaccggttaacataaaaaacacacacacacacaagttatagatgtttgtttactcttattgtgaaaattaggcccatttactagtgccccacataaaactaagataaacaaatttagggattacaatttttcattttctctataagcttggctttctacctctcaatctctatttttctacttttaagagaaaaaaactataaaaaaagaataagaatctttgtgcgataaataaaattaagaaaaaaactctaaaaccttaaagaaaacccttaaaaaaaatcatggaggtacgtataagttttgtaagaaaaaaacagatttatggagatacatatacataatattatttctgaaaaatacatatacataattttattttacccattaacaagtttgtaaattctcctcttccctctatacacctcttcaattacttctcttaaatcttttttcctctgtaatcaactcaaaaaattgtttacaaaaatttgctaaaactctcttcaaaaatatttaacacaattaacaaaaacaaattccaaaactttgtaataagacaataagtaatcaatctccaaaaaaaaaaaaaacaaaaaaaaaaaaaccttgttggtttgtttgggtcttgccgtttcgtataaaagtgcgaagtaccctctctctacccaattcctcttgttttgtttctctttcataatctccaatcttcttcggattcgacgaatccgtcatcgccgacggaatcgtggccgtgtaatattaacagatg

SEQ ID NO: 22639 - DNA, 3003 bp, Unknown; identical to SEQ ID NO: 22638
  misc_feature (1)..( 3003): 2750-1469P.txt file - cDNA_ID_2107626; gDNA_ID_2926148; Annot_ID_139164

SEQ ID NO: 22640 - DNA, 3003 bp, Unknown; identical to SEQ ID NO: 22638
  misc_feature (1)..( 3003): 2750-1469P.txt file - cDNA_ID_2107626; gDNA_ID_1620633; Annot_ID_47306

SEQ ID NO: 22641 - DNA, 3003 bp, Unknown; identical to SEQ ID NO: 22638
  misc_feature (1)..( 3003): 2750-1469P.txt file - cDNA_ID_2107626; gDNA_ID_1620633; Annot_ID_162776

SEQ ID NO: 22642 - DNA, 3000 bp, Unknown; identical to SEQ ID NO: 3900
  misc_feature (1)..( 3000): 2750-1469P.txt file - cDNA_ID_2107665; gDNA_ID_1620673; Annot_ID_48188

SEQ ID NO: 22643 - DNA, 3000 bp, Unknown; identical to SEQ ID NO: 3900
  misc_feature (1)..( 3000): 2750-1469P.txt file - cDNA_ID_2107665; gDNA_ID_1620673; Annot_ID_164166

SEQ ID NO: 22644 - DNA, 3000 bp, Unknown; identical to SEQ ID NO: 3900
  misc_feature (1)..( 3000): 2750-1469P.txt file - cDNA_ID_2107665; gDNA_ID_2926200; Annot_ID_141466

SEQ ID NO: 22645 - DNA, 3000 bp, Unknown; identical to SEQ ID NO: 3900
  misc_feature (1)..( 3000): 2750-1469P.txt file - cDNA_ID_2107665; gDNA_ID_2926200; Annot_ID_201780

SEQ ID NO: 22646 - DNA, 3000 bp, Unknown; identical to SEQ ID NO: 8093
  misc_feature (1)..( 3000): 2750-1469P.txt file - cDNA_ID_2107797; gDNA_ID_1621193; Annot_ID_57507

SEQ ID NO: 22647 - DNA, 3000 bp, Unknown; identical to SEQ ID NO: 8093
  misc_feature (1)..( 3000): 2750-1469P.txt file - cDNA_ID_2107797; gDNA_ID_1621193; Annot_ID_174626

SEQ ID NO: 22648 - DNA, 2055 bp, Unknown
  misc_feature (1)..( 2055): 2750-1469P.txt file - cDNA_ID_2107895; gDNA_ID_1620643; Annot_ID_47525
gaattcaaaacactattatattatatattaaacatattggaaagggttgacaaaagaaaaacataccggaaatgagatcctctctttctaagtaattattggcgttataactttcatcataaatcataagcacggcttataggtatacatgtcactgaaacttgtatcaaaacatgtaactaacaaatatcattagttattgtatatatataaacaaaaatgctatgacaggaagcaatctaaagactatactcattaacgaattaggttctacaattacactcgatcacataaatttctgttttatatttattacaaacccatgtatgtgtagagtctatagtttaatagtgtttaattaaaatttatcacaaacccatgtatgtgtagagtttaatagagaaggaaaattttagtgaatcgctaaggtaatgacaagatacaatgatacatgcattctaagtaactccatgcgaaacgatcctaatattgacttacaaacatatagcattttggctgtagtatatttaataatgttgtaggacacaacatgtagattaattgattaaagacaacgtgcatgtctcttttttttctctatgatgcgggccttttagcagaggaatgctacagacatgtaaagttttgataaaattgaataattagctaattatggcctgacttgtttaacctctatatccagaatgaacattatattgaaaactgatctttccacaactatatatgtaatatagttttttttgttttgttgcattctgatctcgtcattctgatgtaatatagatccttgccatcataaaaaaaaatggtaatcgatttttagttaagtatgaagttgtcctcttagtttaaaattacagtcagcgcaaatgaattatcttcccagaaatcaattaattttcttgcattttaaaaagccagacataaagttttgactgattaagacatacatgtatatatatggttaaatgatttatcatttttctcgatcgattggataaaggacatggttttcttagaaaagaatataagataaatgacaaataacagaaagaagcgtgattgcctttacttgcatgcagatgcagtagtctcccattttgaatgactgctctaaactcttaaagtataactattctcgtcaactaaagtttttgtttcttttttaaacgtcaactaaagtctatatcaataacaataatttatcgcctaaccagtaaccatagataaagaaaactttaaatctagaaaccattagcttctgaaacaaagtaaaacagcccttaataaagccatgaccatgtcaactgtttcggaccatgtgtagtgtacgtagtaaacatttaaattgataatgaaatagcaagacgcaaatggacgtttgtaaaaattgtatggttggtaaaaaagacatgaggctatatatgaatttctgtcattaaatcagctttaggtattacttgttaggattaaggttatcgtagttgattagactaattaactaatatatgaaccaaaaaagtataatagtcaggagtagtagttgagatttcaaaaagattcaaggtggccataacacaaatattattcgcaatgacaagtgaagcatcgttttcacttttcaacttatccctctcaatccccaccaccaccactctctattccctcatatagatagatcatcctagtgatcatatacacacacaaacattgatagagaacaaaacgaaattggaaaaattcattttaaattttaaaaatacaaaaataatggaattggaaaaagtcttttttttgtaaatactaatcaaatattttaaaattaacaaaaaattcaatagtaaaaaaaagccatcaaaaaatgatgtcaacaattagataagtatttagtctttttctcttttaaaaaatgatatgcaagctggccggcgctacttgtgcgcacacataaaagcatatatataagatccctcactcgattcatgtaattatacacatatagagagattgagtgaaaatatttttttttaaatg

SEQ ID NO: 22649 - DNA, 3003 bp, Unknown
  misc_feature (1)..( 3003): 2750-1469P.txt file - cDNA_ID_2107895; gDNA_ID_1620678; Annot_ID_164324
aaattcggagattttggaatctggattttgtgagaatcgattgggttttagatgggaactgagaaattgaagatgaaaatgagatttctggtgctgaagatgaacaaatgcgaaggagagaagaagatggagatgaagaacaaagctccattgcttctttagactgttactatcaaacaaaaattaagaatcaaatcatccaattcgactcgagaacacgcaaaagacacgatttttgcagcagtagaagaaaatggtaacgaagaagattgcagagttccatggataaggtcatggcggggagatttttctaatggatcatggtttcagtgtaaatcattcaggcccgtaaaagcctattataaagcccaataatatagcaagacccgtaagacattgtagtatgaaatgatcatcattaatatagcttagacttagattatttcacattcaaaattcaaagatgctcaaatctatatgtggatctctgttacgttggatacttttctatagcatgcattcaaaatctatattattttgcttgtataaattgtattgtattgcagcatgaattatcatatgtaatacgtaatcatgacaatagactatagatataatcatataatctatgatactttatatataaatatgtcacactttgcaggaaaaagattccttttgtgttggtcttttttctttaaatcacgtggcacatgttaatccgatttgcattatttagaaaaattatagaaaacgtacaagtcatcctatattggtctttcttacaactatttgttttatttaagtacaaacattatattgtttactgtttcatggtcaagagtctctacgcgtgttatctaagtaatctaatgaattggtaaaattaaatctaaattagattatagtattttgtaaacgatttgaaagaatgagaatccaattatagaattcaaaacactattatattatatattaaacatattggaaagggttgacaaaagaaaaacataccggaaatgagatcctctctttctaagtaattattggcgttataactttcatcataaatcataagcacggcttataggtatacatgtcactgaaacttgtatcaaaacatgtaactaacaaatatcattagttattgtatatatataaacaaaaatgctatgacaggaagcaatctaaagactatactcattaacgaattaggttctacaattacactcgatcacataaatttctgttttatatttattacaaacccatgtatgtgtagagtctatagtttaatagtgtttaattaaaatttatcacaaacccatgtatgtgtagagtttaatagagaaggaaaattttagtgaatcgctaaggtaatgacaagatacaatgatacatgcattctaagtaactccatgcgaaacgatcctaatattgacttacaaacatatagcattttggctgtagtatatttaataatgttgtaggacacaacatgtagattaattgattaaagacaacgtgcatgtctcttttttttctctatgatgcgggccttttagcagaggaatgctacagacatgtaaagttttgataaaattgaataattagctaattatggcctgacttgtttaacctctatatccagaatgaacattatattgaaaactgatctttccacaactatatatgtaatatagttttttttgttttgttgcattctgatctcgtcattctgatgtaatatagatccttgccatcataaaaaaaaatggtaatcgatttttagttaagtatgaagttgtcctcttagtttaaaattacagtcagcgcaaatgaattatcttcccagaaatcaattaattttcttgcattttaaaaagccagacataaagttttgactgattaagacatacatgtatatatatggttaaatgatttatcatttttctcgatcgattggataaaggacatggttttcttagaaaagaatataagataaatgacaaataacagaaagaagcgtgattgcctttacttgcatgcagatgcagtagtctcccattttgaatgactgctctaaactcttaaagtataactattctcgtcaactaaagtttttgtttcttttttaaacgtcaactaaagtctatatcaataacaataatttatcgcctaaccagtaaccatagataaagaaaactttaaatctagaaaccattagcttctgaaacaaagtaaaacagcccttaataaagccatgaccatgtcaactgtttcggaccatgtgtagtgtacgtagtaaacatttaaattgataatgaaatagcaagacgcaaatggacgtttgtaaaaattgtatggttggtaaaaaagacatgaggctatatatgaatttctgtcattaaatcagctttaggtattacttgttaggattaaggttatcgtagttgattagactaattaactaatatatgaaccaaaaaagtataatagtcaggagtagtagttgagatttcaaaaagattcaaggtggccataacacaaatattattcgcaatgacaagtgaagcatcgttttcacttttcaacttatccctctcaatccccaccaccaccactctctattccctcatatagatagatcatcctagtgatcatatacacacacaaacattgatagagaacaaaacgaaattggaaaaattcattttaaattttaaaaatacaaaaataatggaattggaaaaagtcttttttttgtaaatactaatcaaatattttaaaattaacaaaaaattcaatagtaaaaaaaagccatcaaaaaatgatgtcaacaattagataagtatttagtctttttctcttttaaaaaatgatatgcaagctggccggcgctacttgtgcgcacacataaaagcatatatataagatccctcactcgattcatgtaattatacacatatagagagattgagtgaaaatatttttttttaaatg

SEQ ID NO: 22650 - DNA, 2055 bp, Unknown; identical to SEQ ID NO: 22648
  misc_feature (1)..( 2055): 2750-1469P.txt file - cDNA_ID_2107895; gDNA_ID_1620643; Annot_ID_163096

SEQ ID NO: 22651 - DNA, 3003 bp, Unknown; identical to SEQ ID NO: 22649
  misc_feature (1)..( 3003): 2750-1469P.txt file - cDNA_ID_2107895; gDNA_ID_2926213; Annot_ID_142092

SEQ ID NO: 22652 - DNA, 3003 bp, Unknown; identical to SEQ ID NO: 22649
  misc_feature (1)..( 3003): 2750-1469P.txt file - cDNA_ID_2107895; gDNA_ID_2926213; Annot_ID_202776

SEQ ID NO: 22653 - DNA, 3000 bp, Unknown; identical to SEQ ID NO: 4407
  misc_feature (1)..( 3000): 2750-1469P.txt file - cDNA_ID_2107920; gDNA_ID_1620704; Annot_ID_48838

SEQ ID NO: 22654 - DNA, 3000 bp, Unknown; identical to SEQ ID NO: 4407
  misc_feature (1)..( 3000): 2750-1469P.txt file - cDNA_ID_2107920; gDNA_ID_1620704; Annot_ID_165197

SEQ ID NO: 22655 - skipped

SEQ ID NO: 22656 - DNA, 3000 bp, Unknown; identical to SEQ ID NO: 4407
  misc_feature (1)..( 3000): 2750-1469P.txt file - cDNA_ID_2107920; gDNA_ID_2926206; Annot_ID_202185

SEQ ID NO: 22657 - DNA, 3000 bp, Unknown; identical to SEQ ID NO: 4275
  misc_feature (1)..( 3000): 2750-1469P.txt file - cDNA_ID_2108207; gDNA_ID_1620694; Annot_ID_48648

SEQ ID NO: 22658 - DNA, 3000 bp, Unknown; identical to SEQ ID NO: 4275
  misc_feature (1)..( 3000): 2750-1469P.txt file - cDNA_ID_2108207; gDNA_ID_1620694; Annot_ID_164884

SEQ ID NO: 22659 - DNA, 3000 bp, Unknown; identical to SEQ ID NO: 4275
  misc_feature (1)..( 3000): 2750-1469P.txt file - cDNA_ID_2108207; gDNA_ID_1620699; Annot_ID_165001

SEQ ID NO: 22660 - DNA, 3000 bp, Unknown; identical to SEQ ID NO: 4275
  misc_feature (1)..( 3000): 2750-1469P.txt file - cDNA_ID_2108207; gDNA_ID_2926208; Annot_ID_141858

SEQ ID NO: 22661 - DNA, 3000 bp, Unknown; identical to SEQ ID NO: 4275
  misc_feature (1)..( 3000): 2750-1469P.txt file - cDNA_ID_2108207; gDNA_ID_2926208; Annot_ID_202412

SEQ ID NO: 22662 - DNA, 3003 bp, Unknown
  misc_feature (1)..( 3003): 2750-1469P.txt file - cDNA_ID_2108258; gDNA_ID_1621097; Annot_ID_55707
aaggaaagaggaggaggcttcttaattgggggaaacgtgacttgaagtcttaataatgtttttattttatttgttcacactataatgattcaagtatgcaagtgtgtgtctattggtgtgaatggatagtatcggatgaatgaatgacaagaaaacaaaattaatgatttggttaaagtataatagaggaatgaagtgaaatagataatggacttttcttatctttctaaactggagattgtttttcatgttatgaaaaaagtttactggaatatagatttacctcactctgtagcaaattgtacccttttagtggaatataaaaatataattttctacttctttttacccatcatttttatttatataaactagtataagctacatactagttgattttggtctataatatccagatttgagactaattttggcaatcaatatgagaaaataaatttcatgcaattagttgcaccatatgaataggattggtaaaagtgatatagttttcttcttaaatcacccataaatcttaacctaaggatgggcattgaagatatgtaagtagttaagtcaatttgattacccttttctgaccggagtttgattctactaaatcgcgttatcttgcgtagtatggattgactatacatcgagtcttgtggatccaaaaatgtatataaaataaaagatgggcacaaatacttggtaattttcctttatccaccttgaaaacataaacactcatcattattaagataactaatactcattctatttcatattagttgtagtttaaggtttttacacacatattaagaaagtttttaaaaattcatttaatatatctcttttatataaaaacatcatttattataaccaattcaaccaataaaaaatatataattaagtatagttggttaaaaagtattgaatatatttattatttatacacaaagttgaaaacaacagttattgtgaaaaaatataaaaacctttaaattacatttatattgaaacaaagggaataataagtaacataactttgatacttacaattaatttgcaaatagttttacaaaaaacacgtaatagaacaaagcaagtaaagtaaaatatttttagcaaatatttgaaattgaagatactcgtttctcacaagtcaaatacgaatactaattttacccttacaaaatgggtcaagtagcaaatacttgtcctgtgcccatccctaatttttgcaagcaagatgcactaagtatgagagagttttgtagaacctagtgttttatagcaaatctgtaactaatcctaaaatatggaattacataagtagtaaagtagcaaccaccggtttactttctgaggaattagcaaactattaatggaatgaagaccctttctggggaattagcatacaaaactaatatgagaatttcatgtggtgattattggccaaggcaaaagtcttgactacataaattctaccttttattcagactgaacaacagctcttttaatttttacttcctgcgctagttttttgttcctattaaaagagtcattcaagatttcttaggtaaattcttaaatgaactaaaaataaattttgttaagtaatcagaatcaaaggaaaacgatggtataacagtctggtatcatatcccacttggttgctactcgctagtaaacttcaaccacaaccctctgtccctctatgacgttgatgccacttttaagactaacaacaataatattgtcttttttttcttctttcgaatccacatctcttgaaattttgttaaataatttaaaatatgtaatctatatgtctgtgtgtacatatgcataaatcatactccctctgtttctaaatatttgtagtttaaaatttttgcacacaaattaaaaaaccatacaaatctcatttaatttatctctttcctataaaaacatcattaattacaactaatccaaccaataaaaaatatgatgtaaaatacaattggttaaaactattaaatacatttaatgtttgcatagaaaagtaaaaacaacacttatattgaaaaaaataaaaaacctttaaactacacttaattagaaacagagggagtaatacggatctacgagaaaaatttagtgaagtcgcggtcgaaggaccttaggttggtggctagaccatttcgttcaaatcaatcccactttctttcatcaagataacaaagattcacaaacatccttaccaaatgatacaaccaaatgaccaaccaaatgataaaaactacctaaggtctatcatcaagtttttataagttctatttatcacttaatatcacaatggtgcattcgagaggatacaaccaaatgaccaatacacatgtatttttaactgcttgtaagtatcacatatctcatgattttaaaacaaaaatattgatttacttgtttattattattattattttttctatacttatttggtttgatagtagatgtttttatatatatttaagatatcattttatatatcttgagactgtatttatacctctcttctttattctacaaactacctgtcaaaatagttggttttgaaatgtaacattggtgatgatttttcttttgtctttaaatgtaactttggatgacaaaattcagtaataataatgggcctgaggttatgaatatagaattccactttatcacattggacccaaatttgccatgatataatataaaacgacgtggtatcaagtgttcagtgagtgtgagtcctccgacacgaataatctagaaaattttactaagactagtgtcagtatttttctaccacactcgtcgccttgctttacgctttattctctcttctttagctttttatttcttcagcaaatctgatttcaaaaaaatttcatcgaggaaactgaaaaaaaaaaatgagtgacgggaggaggaagaagagcgtgaacggaggtgcaccggcgcaaacaatcttggatg

SEQ ID NO: 22663 - DNA, 3003 bp, Unknown
  misc_feature (1)..( 3003): 2750-1469P.txt file - cDNA_ID_2108258; gDNA_ID_1621096; Annot_ID_171059
tattggagaaagagtttctgagagagagagaaagagaaagagacagagagacaaagagagaaaggaaagaggaggaggcttcttaattgggggaaacgtgacttgaagtcttaataatgtttttattttatttgttcacactataatgattcaagtatgcaagtgtgtgtctattggtgtgaatggatagtatcggatgaatgaatgacaagaaaacaaaattaatgatttggttaaagtataatagaggaatgaagtgaaatagataatggacttttcttatctttctaaactggagattgtttttcatgttatgaaaaaagtttactggaatatagatttacctcactctgtagcaaattgtacccttttagtggaatataaaaatataattttctacttctttttacccatcatttttatttatataaactagtataagctacatactagttgattttggtctataatatccagatttgagactaattttggcaatcaatatgagaaaataaatttcatgcaattagttgcaccatatgaataggattggtaaaagtgatatagttttcttcttaaatcacccataaatcttaacctaaggatgggcattgaagatatgtaagtagttaagtcaatttgattacccttttctgaccggagtttgattctactaaatcgcgttatcttgcgtagtatggattgactatacatcgagtcttgtggatccaaaaatgtatataaaataaaagatgggcacaaatacttggtaattttcctttatccaccttgaaaacataaacactcatcattattaagataactaatactcattctatttcatattagttgtagtttaaggtttttacacacatattaagaaagtttttaaaaattcatttaatatatctcttttatataaaaacatcatttattataaccaattcaaccaataaaaaatatataattaagtatagttggttaaaaagtattgaatatatttattatttatacacaaagttgaaaacaacagttattgtgaaaaaatataaaaacctttaaattacatttatattgaaacaaagggaataataagtaacataactttgatacttacaattaatttgcaaatagttttacaaaaaacacgtaatagaacaaagcaagtaaagtaaaatatttttagcaaatatttgaaattgaagatactcgtttctcacaagtcaaatacgaatactaattttacccttacaaaatgggtcaagtagcaaatacttgtcctgtgcccatccctaatttttgcaagcaagatgcactaagtatgagagagttttgtagaacctagtgttttatagcaaatctgtaactaatcctaaaatatggaattacataagtagtaaagtagcaaccaccggtttactttctgaggaattagcaaactattaatggaatgaagaccctttctggggaattagcatacaaaactaatatgagaatttcatgtggtgattattggccaaggcaaaagtcttgactacataaattctaccttttattcagactgaacaacagctcttttaatttttacttcctgcgctagttttttgttcctattaaaagagtcattcaagatttcttaggtaaattcttaaatgaactaaaaataaattttgttaagtaatcagaatcaaaggaaaacgatggtataacagtctggtatcatatcccacttggttgctactcgctagtaaacttcaaccacaaccctctgtccctctatgacgttgatgccacttttaagactaacaacaataatattgtcttttttttcttctttcgaatccacatctcttgaaattttgttaaataatttaaaatatgtaatctatatgtctgtgtgtacatatgcataaatcatactccctctgtttctaaatatttgtagtttaaaatttttgcacacaaattaaaaaaccatacaaatctcatttaatttatctctttcctataaaaacatcattaattacaactaatccaaccaataaaaaatatgatgtaaaatacaattggttaaaactattaaatacatttaatgtttgcatagaaaagtaaaaacaacacttatattgaaaaaaataaaaaacctttaaactacacttaattagaaacagagggagtaatacggatctacgagaaaaatttagtgaagtcgcggtcgaaggaccttaggttggtggctagaccatttcgttcaaatcaatcccactttctttcatcaagataacaaagattcacaaacatccttaccaaatgatacaaccaaatgaccaaccaaatgataaaaactacctaaggtctatcatcaagtttttataagttctatttatcacttaatatcacaatggtgcattcgagaggatacaaccaaatgaccaatacacatgtatttttaactgcttgtaagtatcacatatctcatgattttaaaacaaaaatattgatttacttgtttattattattattattttttctatacttatttggtttgatagtagatgtttttatatatatttaagatatcattttatatatcttgagactgtatttatacctctcttctttattctacaaactacctgtcaaaatagttggttttgaaatgtaacattggtgatgatttttcttttgtctttaaatgtaactttggatgacaaaattcagtaataataatgggcctgaggttatgaatatagaattccactttatcacattggacccaaatttgccatgatataatataaaacgacgtggtatcaagtgttcagtgagtgtgagtcctccgacacgaataatctagaaaattttactaagactagtgtcagtatttttctaccacactcgtcgccttgctttacgctttattctctcttctttagctttttatttcttcagcaaatctgatttcaaaaaaatttcatcgaggaaactgaaaaaaaaaaatg

SEQ ID NO: 22664 - DNA, 3003 bp, Unknown; identical to SEQ ID NO: 22662
  misc_feature (1)..( 3003): 2750-1469P.txt file - cDNA_ID_2108258; gDNA_ID_1621097; Annot_ID_171083

SEQ ID NO: 22665 - DNA, 3003 bp, Unknown; identical to SEQ ID NO: 22662
  misc_feature (1)..( 3003): 2750-1469P.txt file - cDNA_ID_2108258; gDNA_ID_2926164; Annot_ID_139849

SEQ ID NO: 22666 - DNA, 3003 bp, Unknown; identical to SEQ ID NO: 22662
  misc_feature (1)..( 3003): 2750-1469P.txt file - cDNA_ID_2108258; gDNA_ID_2926164; Annot_ID_198998

SEQ ID NO: 22667 - DNA, 3003 bp, Unknown
  misc_feature (1)..( 3003): 2750-1469P.txt file - cDNA_ID_2108270; gDNA_ID_1620649; Annot_ID_47694
ttgatggaccaaccaaatatgctcaaagccaagagtaaagagagcggtgaaatctgcatcaatgatttcactaccacctgaggtttgaaaacaattggaaccatgaataatgcagtaggaaaagctcaagagattaaaggggaaagagaatagaagagaagctcacgttcatcaagttttcggtttggttcgttgctatgagaagaaggattatataaagaacctgtagtcatttgactatttgagaaactctgtgtttacaatatctcccaatagaaatacattgaaaaaaagttaagtagctcagatatcaatgatccaattacctcgcaggaaacacagcaataacccatgaacatccggtttccataatagagtctaaagagccagctcgtgctatctttcacatccttatggctggtcttccctgataggaaggtactgcgaatcaagtattaaattcctggtttgctatgtacaagaacaatacatctaagaagttgaatgaagattttatgtagcaacaaagagtacctgtacatttgcagccagtgactagcgatatctaaagccagcaatgacaggaaaaccaagctaggcctgtttgtaattgtgaaagtccaagactacatgttaaacaaagattacgtagaaaaccagataagtccatgaaacggagatgtcagtgtaaagaagtagagaacactgacacctgtatatctgggagagaatcacgagaagacaggctgtgctgactctgtaaccatgcgcagaccccaaaatatatgacaaaaatgttaaatgagattaaaagaatgagcaagttgaaactcgggaatatgtagcggaagattcacctatctgtaaccatatccaaaacagctccaaatgtagagactgaaaggaaaagagttgtgtgttacgttcaatcgtttctgataatgtagaacaagaataaactgtgtatgggactaaaaatattgatcaatgagacaatgacatgaaatgtcatatttaatcaatgtcaggatcatagaggaagcataagtaatgagttagttgaagctaagaaaagagatggggagaatgaaaagagcaccttggttaaatttacgagcgcaccatccatccacagcatcacaacaaaaactggaaacaagattgggtaaagagtgactaacatatgaaagaagaagcaccaaacacacaagatcaaaaaaggagaagaacatgatgttggtaccacaaggataaagtcacctgaaaaagtacaagagggagaagagtgtcttgttggagaagcacacagagaaggcaatgcagttcaagagaactctcatgtaccctgccaattttgcatgtaacaacactaatctcatatggtttaaaaaaaatgaaatttttaaagacagaagaaaggaagtagcaaaaaaccgaccaacgatattgggaatgtagaggtagactgacaacgtcgccggtctctgtttagccataacagagagagagagacttcagtttgggcaatctgttccccaacgaagaaaacaaggatctcgccaatgaagggatacctacacgagattagaaagaaaaaaggaacaaactttgtgggaaaatgcgtacggacagaggaaccccaaatccggtaaatacgtgaacacacacacacaaacaaagtaggtcaatcgattttcagacgcaactggaaatatcaaatctcaaagtaagtatggggaaattaaatatttctcacctgcctaagagaaattgggaacgaagggatccgcaggatgagcctgcagactttgttggaagctctcacaagaatcagattcgcctctctctcaagcaaaaacgttttttcgtttaatattctcaaattcaatttgtgaaatacagtactaacatttgttaaattatttgtaaaacttttctcggtttcgccgcttcaacactgaaaatttgcatattttatttgcaaacaatacatacacgcatatatcgttaattttcttcttcttccacgcacactttatttactgctgaattcggattgtgtcattagtcattactcactcattactaatttccacaaacctttgtatcttcatcgcttaagactataattgatgatgggattttcggatatatgaacttgaatcccatgggggtccagatatccagatggttctacttgcaagtcttgcaaatctaaatggaattaaaactcggttgatttttgtcaaaaaatcgccaaaaatataaaatggtaagtaagtgggcctcagaaaaatccattagaaagcctagaccaaattttggagtgggcttcataaaataaacaaatctggtcatcaaggtcggtacgtcggtgtgactttgcgagtcatcatcgattatccaaaaacaataactcctctctttactttcttcccatgcaccaagaatatattttttttattattatttattaaacaaaaaaaaaagtaaagcagcagaaaatctaacgcacgactcttgtcccaagatcagtctcagtcatcatcaaaacagaaaattttattatccattgtaattttatttttttcttacaaattacaactcttttttttttcattcatggaattggaatgaagaaatgttttaagccaatccaaaaaagaaaccgaaaaaaaaaaactagaaattaggaaaccgttagcaagaagagaagaatcgagacggcgactaggaaactgctgggaccagaaaagaaaggtgacccatccatcattcacttaattagatacatactgtattacttattacaataatgcctatatatattctcccaattcatcatttacttctttacacctccactttcccttttgcccctcttttttacagatttcactctctgctctactactctctcctcctcctcctcctaaagaaagttcttaactctcctgggttcttcaggtttttccttttctggaataaaaagaagaagaaatg

SEQ ID NO: 22668 - DNA, 3003 bp, Unknown; identical to SEQ ID NO: 22667
  misc_feature (1)..( 3003): 2750-1469P.txt file - cDNA_ID_2108270; gDNA_ID_1620649; Annot_ID_163400

SEQ ID NO: 22669 - DNA, 3003 bp, Unknown; identical to SEQ ID NO: 22667
  misc_feature (1)..( 3003): 2750-1469P.txt file - cDNA_ID_2108270; gDNA_ID_2926215; Annot_ID_142197

SEQ ID NO: 22670 - DNA, 3003 bp, Unknown; identical to SEQ ID NO: 22667
  misc_feature (1)..( 3003): 2750-1469P.txt file - cDNA_ID_2108270; gDNA_ID_2926215; Annot_ID_202938

SEQ ID NO: 22671 - DNA, 3000 bp, Unknown; identical to SEQ ID NO: 5722
  misc_feature (1)..( 3000): 2750-1469P.txt file - cDNA_ID_2108291; gDNA_ID_1620813; Annot_ID_50613

SEQ ID NO: 22672 - DNA, 3000 bp, Unknown; identical to SEQ ID NO: 5722
  misc_feature (1)..( 3000): 2750-1469P.txt file - cDNA_ID_2108291; gDNA_ID_1620813; Annot_ID_169131

SEQ ID NO: 22673 - DNA, 3000 bp, Unknown; identical to SEQ ID NO: 6597
  misc_feature (1)..( 3000): 2750-1469P.txt file - cDNA_ID_2108377; gDNA_ID_1621098; Annot_ID_55786

SEQ ID NO: 22674 - DNA, 3000 bp, Unknown; identical to SEQ ID NO: 6597
  misc_feature (1)..( 3000): 2750-1469P.txt file - cDNA_ID_2108377; gDNA_ID_1621098; Annot_ID_171229

SEQ ID NO: 22675 - DNA, 3000 bp, Unknown; identical to SEQ ID NO: 6597
  misc_feature (1)..( 3000): 2750-1469P.txt file - cDNA_ID_2108377; gDNA_ID_2926166; Annot_ID_139925

SEQ ID NO: 22676 - DNA, 3000 bp, Unknown; identical to SEQ ID NO: 6597
  misc_feature (1)..( 3000): 2750-1469P.txt file - cDNA_ID_2108377; gDNA_ID_2926166; Annot_ID_199159

SEQ ID NO: 22677 - DNA, 3003 bp, Unknown
  misc_feature (1)..( 3003): 2750-1469P.txt file - cDNA_ID_2108405; gDNA_ID_1621111; Annot_ID_56093
cgcttgtcaataccacccaacttgtagatcaagtgtccagtggtggtcgactttccagaatcgacgtggccaatgaccacaatgttgatgtgaaacttctctttacccatggttagagactgtcaaacaaatctgcaataaaaagaacaatcaaatattgaatcaagaaaaacagtagacttatgaacacaaaaaacaatcattgttaaaagccgctatcggattcaaaccgatttctaccacaaaaaatgtggtgctctatcaactgagctaagcgaccctaaattcaatcaaaacagcaattctggagatatacagcaaacaatcctagagtttccacaacttggtatcaagaagaatgaatcaattgattgtttatgctgctccagaattacctaatcacaattcaaatcgacaattaatatcacatacatcaaaagatccaatcaacaatccattgaacaatacaaaaatttcagaaccagatcgatcatatagtttatcatcagctggcatgaagaaaaaaaacaatacgatggcactgtaaaaactttgttctcctaaatcgataaaactttacaccacagatcagaaattccaaacgatctataaacaaagagaatcgaatccaagagattacaacaaacaaacgagaaggatcgaaacagattcaacacagatcaacagaagagaaagaagcagatcgaagatggtgacgaaaaagcttacctcagagatatcgcaagagagtaaagcggctagggtgacgaaaaatgaagcaaggaataaagctatgtttgggattcgagtttatttatagtggtgaatcgaaagaaataataagttagggtttaacataacatcgtttgccaaattacaaacgtacccctatcccgccgaatattctctttttctttgggccttgaagagtcggtcgcgtttcataaaagtccactaacctcgaggggtcgctcttgtttcataagtcaagctaatttgaatttgatagtttcaatccaaaagtggaatataattaaatttggttcaacgcgaattaaatcaagaaggttttacttggacgatatacactttgcaggttaagagaatgtaatttcacgtaattatcaaaacatacaagaggataacagcaaaaaaatcactaatgattgatgaaaacatcaaacgcttgttcatcagactggaacatttaagattgctaagtaatatgcgaattgagagaggaaatatgatcaatgtgggaaaggatagtccaaaacgttgtccatgacttcaaactgcatatccttcgatggccgtttcctctggtttatgaaccaattgttttatctgtttcctctggtgtctccaggcattctaatatcagatgtctagagtcaatctctgagcagaagagtaatagtgagactcgagctctttaagattggcagatgcatcatcagcaattctagccaacaatcgatttgtcttctcggcctcttgatcaaactcttctattctttgttctacatgatcgtttagtgatgcaaatcctgaaaatatcgctgtttgcttaagttctgatacgagtttcaaaagagaatcagctgcttgaacctgccaccattggtgaggaagtaagttaacaacactccagagactcataagaaaatctttcaacaacacttgagtggcctatgtaacttccctaatccatatgcctaaaagaaatcattcaacaaacacaatgaggacataagctaacaaaacaacccagttttgaaacaacagtaaaaattagattttggagaatcatgagtgaatgtttggtagactcaaaaacattccaaatatgtgtactttggcagagattcaaaacgtttcacatctgatttaaaccctgatttgcatgaacctattaaagaaatcattcgaattcaatggagtgaagtaattatttaccattctagaagctcgcatctccatcatgtatgtctcctgcgagttcttcaccggcggatcactcacctaccgaaaccaaacatgtttcgcctcaataaacactaatcttaaagccaatctaagagattgaaatttctgataaatcctaactttaaaaccggaaagaaaccacacttacccttgaaacattgacgatctgcgtgaagttatcgacgacagatgtgatgtcagtctccactctctgtaacaacgccttttgcttctgtaaagccgcggcggcggcggcggccgttggaccgcttcctccaccggatccgccaccggatccaccgcctttgttcataattatcgctggtcttttgcaaagaaacgaagaaagtaaaagaagctgatggctatgggaagaagatccacccaacaaaaaaaggagcatgatgttagtattgggcctaaagtaatgggcttacgtatttgtgttttaagttattattattaggggacttaactttctaaaaccaaacatgctttgacattcctctctttcttctgctctcggaattggtgttgcagaaggtaagcgattcagacacatctaagatttgatatccctactcttctatctgatccctccaatgaatcttgcttcaattctttcgtattagtttcagatcagatgaatagatcgtttctcttttgaaatgttttctcaaccaaatcctaatttcgtcccttgtaatcggtttggagttttgcctttgctagcaattgattagtaaaaccttgaaaggttttgaaagtttcattcttttaatgttattagttaaactcgggtttgcaacttcaatctatttaatcgtgtgttgtttcataatctttttgtcttagattttggtgtttcttatgctccctttcagtgcactgtgcattgatcctttgtagtttattattttggaaatagtgtggttaaatgcaattattttgcaaatttggaagaaaagttaacaggactggtgaagtatcaaaatttggggttttgctgcgatg

SEQ ID NO: 22678 - DNA, 3003 bp, Unknown; identical to SEQ ID NO: 22677
  misc_feature (1)..( 3003): 2750-1469P.txt file - cDNA_ID_2108405; gDNA_ID_1621111; Annot_ID_171809

SEQ ID NO: 22679 - DNA, 3000 bp, Unknown
  misc_feature (1)..( 3000): 2750-1469P.txt file - cDNA_ID_2108470; gDNA_ID_1620809; Annot_ID_50579
tgaagagcttattggcttctaagagaaactcatgaagaaaaggtcgtagctttatgataaactcgtaaccgtctacgttgcgtctccatagatcttgccttgaatcagtttcttcgagtagatacttctcgcgtttagataggtctgaaaccagaacagagtggagtagcgtgtggtccaagtcaaggactaaatgaagcttcttcttcttcttcttctgaaagagttgcgtagtaagatgcttttttaacatcgcagcgtggttttgtaatctcttgacgaaatcatcgaagcaagacgacgacgaggacgacctctttggtcttttggatttcagttgcagaagatgtttacgtactagaaacataatcgacaaatcagtatctgaaatcgaacggaaaaacaaaaccctagtttgttcggaaacaatgagttgtataatctgtgatgataatgatattgattgatactctgcgtatatatagagaaggatatggaaataacaagacaaaatggaaattggagtagagtaacgaaaaatggaaatcgcaatgtgatgttgacacgtgttcaggtgtgacacttgaagccgttcaatatttgtttggttggtttaaatgggcctaggcctttgagtgaaattacataggccatctggttttacgttttgtaagatttgggaaactacagattttagtatgagcaccccattggagtaccttatttaaggaatccttagaattttttattattagattttgaataaatgaaagtttagaatttttgttgaatctttatattttttgttgtccaatggtggaatctttaagcgggcttttttaaaaaaaaattcaaaatataatattataatattttttattttacaaaacacaataattattaaaaatattaaaattgtaaacatacataacataaaaacaaaacaaacatattaaatgaaaaacttgaatgacgattagaattaagcttgaatcggaccaaacttttgccatatatgttcaaccaaatcagcttttaagtgttcatgcttagtccgatcacgaagtcgggttcgagtggccatcatattaccaagatttgaaggcatgtccgtagaataggtgaaatccacttgtgaagaactagctgattccggatgtgcgaaatcggatacatcatactgagtgtatccatctcgttcgtcttctactatcatattgtgaagaattatacatgctcgcataatattcccgatttttatcttatcccaaataagagcaggatgtttgacaatagcaaaccgagcttgcaaaactccaaatgcacgttcaacatctttacggcaagcttcttgatttgtagcaaataaagaagctttttcatcttgtggaagtgaaatagattggataaatgtagcccattttggataaatttcatcagtgagatagtaagccaaattatactcattcccgttgactacaaaagccattgagttttactttatacttctaacaagtatcaatcggatagaaaatctagtttcgcacatagagattatactaggcaagacatagtctcttccaatgacagagtaaatcacaaacacagaatattacaaaagctaactcctgcatcaacaaatctctttttataccttttgttatcaattagagaagtgtgttagctaatctcaaactttacttattatcttcctacattaaaagacagaaccaatacgaaatcaaggctaatttcactaaaacaaagaagaaatcataactgagtaatttgttgattttataaccaaattcaatacgaaacaataaactaacgaatctcaacaaacaaaaatcatcagaatcatcatcatcaaagaaatcccaattcacgaaaccctaatttcattgcaatctatcaataactctaactactcacgatctacacaatcaataaggtagaatcataccttcataatctgattggagcatgctagcttctgatgattgagagagatttctctcttcgtttcttcggacaaaacaaagcgaacaatagaaatgaaaataaatcacgggagaattttttttttttggttttgtctcttccctcagccaataacaaaaggccacgtgtaagactcttcccaaaccaaaaacacctaagataaggttcgaaccttactaatttcatgacttctgatttaattttagcatattattctaaggacttttgctaaaaaactcataagaattccccactggacatggtctaatttctccacaatttagtaactatatacagtagcgagataaaaatatacgcatattattggaaaatatgaaattaagtgtgtgattttttttatatatttttataaaattgtgtgaagttatatgaacttatttgaatacaggtcgaatttgtggtaaaatatttttttatatagatttatgtgtatgtttactcaaaaataatttattaaattcagtgtaattgcaaaaaattatgaaatattagttttattactgttaataatctttttaccaaaattttcaatatatgtgtatgtatttttttatatctatatatattaactaattgtcaatattcctcgatttgtttgagccttaaattattattggatgacaaaattttttttactaattgtctcttgtgaagacaagaaaaagaaattatttcgttcagctacatatatttaagataaattttaaaaagtagaagtaatacactaccattaataatgtagctaagaaataaaaatggcaacataattaatacattaatacatgtagcaaatagagtaatattaacaataaaacctctcataaattacaaaaattagcttaattaaacccacttcattaatttccgcaattgttgcaaatttcagacaaaactttccttttttttgtccttttcagtcattgttccgtcttcgaccaccaccgtcaaatccggcgacccatcaaccttcagatg

SEQ ID NO: 22680 - DNA, 3000 bp, Unknown; identical to SEQ ID NO: 22679
  misc_feature (1)..( 3000): 2750-1469P.txt file - cDNA_ID_2108470; gDNA_ID_1620809; Annot_ID_168978

SEQ ID NO: 22681 - DNA, 3003 bp, Unknown
  misc_feature (1)..( 3003): 2750-1469P.txt file - cDNA_ID_2108547; gDNA_ID_1621154; Annot_ID_56974
gactctgaagtcttgtttcttcattattctttacctcttccacttcagatgttttctcttttgcatcctcaggtttgactaccagagaaggggaatatctcaagaactcacccgacatcaaaacttcatcaggttttaaattactgtgacgagacccttgagcgtttgactttctatagccatcaattttcagactaaacaaagactcatttgatatttcgctccaatccacatccccattcttactaaacaccgatgcagggattctcccgggatcgtaattcgctataccattattcatcaagtgaactggtcgtaacctagaaggcggagatggagctggttgcatcctgagatgagtcaaaccagatatttcagagccttgagaagaagaagaaggctgcatcctgacatgagtcacacctgatatgtcagagcctttagaagaagaagcatttgaaagttcccaattctgctgactcgtatcctcagaagatgctttggactcttttgtacttctctctacggcatcatcccatgaaacagaggaagacattgaagaaaaagacagagatgatgatgttaggaagatttccctcgcaggtcttgtaatcattctgttaccactcatactcacatataaagctcttatcagttcacttttccggttgttaatctttcaaaacatttcgcagtgattcacggattcgattccatggctgataaactatgaaagcaattaatttttcttacatgaacagatgatgttctagtcccaccgatactacaacttcggtgaaagctggatccttgaagccattagcacaagcaatatccactcttttgcatccaagcacagtgccaagataatttggacaagactaatcaaagatgaatccaatattgcataattcttggtgtcttgtgaattcgacctattggagacggaaacatgtcattttcattcggttcttaaggaactagaaaatgaaaaacaaaacaatttatggagaagttttgaaagtgaacacaaaacaaacatctttgaatttagtaaatttgaacgaatggccgttgatcagagttgaatacagaagaaggaaacggtttcttgtggagaaatttaaggtggcatttgctggcatttgatcacttctatttcggggttgactgttcttcgcgccgttgctgtaaaacctaacttctttacattcattgtggacatcagtatggcccaataaaggcccattttgaaataatcgggctatttggtccacacatgaggacacgtgcatacgtaagagagtaccagaaaaggagattcataaacccgttaaattcgcggttaggaaacttttgccttttggttgaaacatcgttggcctcttgcaagttaattttcttattctatcgactatttcggacattcaatcacgtgattttcgtgtttgaaaagatcaacaattttttttttcgttaaaatatctggcatttaaataaacactatacgtaaattttagcagtatgaaattaactaggctgatggattcgaaaaataatacaataaaaccaaaaagaaaagaaaaacatgtattccaaattacaggagtactatcatcaatcattcaatctttaagtagctacaaaagtctacaacaaaaataaagagaaacaaaataataatttaaaggctagataattgaaaggaatagtgatatgcaagttccaaacacaagtatgaacaagagttaatggaagagactataattatgaaatatcggtcatggactcagggaagtggggaccctatgataacaagccaccaccaaattagcacctcaaaaacaaaaatgtataaaccatattatattgtatattaaatataagcatacattaggttaaagatgtttgctcaaaaattaaaagcaaatagatatgagattgacacctaaacagccttaatctggacccaatctgacagttagggcttaggctatgggtacgacaatcaactagatatgtggacaaaacattctactaattacacaatatacatgtacatggaccaccttttaatttttattttttttgtccttttactttttaacttgtacatgcatgttgtcaatgtctaattatataatcacttttcccctctatgtatgttgttttatacattgcatgtgttatatttgatcgcgagtgaacaaccacttttctcagcgcttattacgtgttttctttttgcggcaaatcattttacgattgattaatcctattcaaattcactacttaaacttactcccactgaacaaagtcccaactaaagcttataaattgtataatgtttacattaagtcttggggattggattgacaatgatgattttggccgatggttagtgctggttgttaaccaacatgatagtataatataaaatgaaacattaatatggactgatgttcggtcttaattaccactccactcttagatataaaattttgcagttaatggtgaacgcaaatttgcttatacgtacgtacgaagctgtatacaaatataagtaagcatcaaattaaacagagagagagaggcgtagtacttacgtagctatatgatgtggacgattgattaggatgtacgtatgctaaaaacaatatacacggccatgtgatacttgtaccacttgcgcatctctacatatatacgatccaacctttggaatttatattgtttacctttataataaccatccttcacattagcaatcaatctacaccaacaactacaactaaattctatctctctctctataataaactagcgagcgaggacgtcaaatgtaataagagtaagaacaagtacaccttttcatccaccaaaatttaacctatgtatataaatatacaacattaccatttaccaaacatccatcttacatatattactcatcatcaagttcctactttctctctgacaaacatcacagagtaagtaagaatg

SEQ ID NO: 22682 - DNA, 3003 bp, Unknown; identical to SEQ ID NO: 22681
  misc_feature (1)..( 3003): 2750-1469P.txt file - cDNA_ID_2108547; gDNA_ID_1621154; Annot_ID_173404

SEQ ID NO: 22683 - DNA, 3000 bp, Unknown
  misc_feature (1)..( 3000): 2750-1469P.txt file - cDNA_ID_2108737; gDNA_ID_1621146; Annot_ID_56760
ccagtaacgtactaaagacgctttgggtgtgaacggatttatctccggtgaaaaaccgccgttagttaaccgttctcctccggctataactacctgcattgttggaagttacaaaaatttcaaaaatgatcaaaagaataaacggaaacaaatccaataaaatctgaagtgaatcgattatagagaaatgaaacaaacggattcaaatgaacgatttaggtttgacttacatggtagagacgtgacaagaaaggcagaagaaaaacaaattgtttgcgcatttttgttgagagttagaggaaacattcgatggagacagagagagtgttggtgagttattatcgatgcaaatgtgtgtatatacacatttctaagttggaagttggaagttggaaccaaggcttatatagtttttaatctatgaatcaatcaataccgaaatgtcacattttactctattaaaatctctgaataaatcgtattagaaaattttgattaagaggaagagataaggaaacagctctaaagactaaaaaggactaaacgcactaaacattgcccacttaacactcatgaaaagatacattactttttgttggtagaaactgtttcttcactaactattttagtattcatacctattattcgtttattatatcaagtttgaagtttcattaccgatacgtgacaaggacaaacatataaaaatgtaagaagataaacatattaaaagacaaaggaaaccaagaagccatcagtcatgacgcaatgatgacacacatttgaagtcccatcacttcacacgacaacatttcttctccacaatcattaacaaagtgattcaagcccatctcgagttgcattttggttaaacttctatttttatatataaccccaaaatagaaagataatcattatggtcgttgatcaacagaggcttgcagttactgtttacttcactaagaatatggattttttgaaacgaggcaaagacaaagagagtaataatgtagcacaaaagccttagcgtgtatgatgacattacaaaagaaaaggtatcacgaagtcataacctaagccaaaagctctgcattcaacttttagagccatcatcactcttacatagcttagtgcaagacatcagctgatcagggtttaactcttttcttgacgctaacataaacggttacggatttgacttgtttattcttgagggcgtttctcctagtggtatttcgaggaatttgtcactcattcaacgacgtttacgagctcatactcgataagggacatgttggtgtcttctttcactttgaagctcgcaggctctgtgacttcaacacgaccccacttgtctacagctagcctcattgatcctttatacatgtcgattttcgcattgcgtagagttacagttgatccctctttcattaagtccactacacacaaaaccaaatcaagatattactagctaccctgtaacattactagaatcaagtacacaaaccgttatatgaacgttttgtttttcaaatgatttattgactgaagtaaagtaccttggtcatttcttgcggtaaagacgatcactcctgtctcgtcaccaacaatgcattcagaaatccgcaactggcgagcttgaggaccatcagcacgacctttctgtaacaccattttcgtgctgacaatcttcacattgacattgtgtccgctagtcccaggacgcagctgatcaaccttagtgaaagctggcttcttcaaccctgctttggtggaatctgccattttcaataacaagagcctgcattgacaatcaatcatttcacttcttaaccaatttaaaatagatcaaatcttctaatgcaaatgctgatttataagatttagataagattgacacaagaattagaaagcagaacaatgaaggacattccatataatcttaacaacagaaatttcatgtaaaggagatgactttcgaccgagttataacaatgaggcaaaacccgaaacaaagggaaatcgaactcaagcattaaacatagtgcatgcatcattattacaaaaagctgggcagatttgaaatcaagacaacaacacatgaacagcaatgtatgagtataagagattcaaaatcaaatatcagggatttagttttttttatcaatagcttacctttggataaatcgaaggcggagacgaacgagaaatatctgattgacgatttccaaaaacaatcgagctcggagaaagttttctcccttctcttttttctagttctggggaaatggacggtggatctttaatctctaccaaggacccaatcataatttaacacgtgtactgatcgtgcttcgttgtgcgcggtttctatggttaatctcatcgtgcctagatgatcgacttttagtactgcgttttctcaactgttgggcttattcataaagcccaatttaaagtttaggcccattaatgtcgattgtatcttcttacgtaaaaattgtacattgtaatgttcaaaaaccgaagtgttttgtgattgttctagacttctgtagttctaaaagaaatgaaacaaagatgaatcacaaaatcagcaccagatcaaaaacgattatgggccacaatttttgtgatataaacattaaaatgacaaccacaagaaaatatcaaccaatcaaagaaagccacgaaacagagtattttaaaaacagaggaaagcgaaagagataagccttttagacaaaactagtggcagactgaaaaatgaacgcagcgcttgcaacaaccaccgccacaactcccgtactccgccgtgagacgcctcttcttcattattgttctctcacaacaaaatcgccggtttaccaaatcaacagagttagattcggatcttgcgtgcaaacagtcagcaagaaattcttgaaaatctcggcgagctctcagagcgcttcagcggcggtcaatgtcacggcggatgcttcgattccgaaagagatg

SEQ ID NO: 22684 - DNA, 3003 bp, Unknown
  misc_feature (1)..( 3003): 2750-1469P.txt file - cDNA_ID_2108769; gDNA_ID_1621173; Annot_ID_57276
cgcaatggggagtggacaatgggcatcttacatctgggccgaagcttgtttccacacaaaccttaggatcaaggactattccatgcagctcaaatacccccagtttctatccgagtatgctgatgagtacaactgttattctacactgctccaccggaaaacatatatgtcagagccccacttttacttcggaggacctggccggaactctcgttgtccttaatctcatgttgattttgtcaatgttcattctcctgtttttttgttagttttatcttcggaggacctggccggaattttgtttgtcttctaatttaaactaatcagagaagatcttatattgatcataatcttttaatttttttcattactaacaaagcctaagaaagtggaaaacacaatagggagggtaaaagaaactgagccaaatcaaaaggaagtctctaaactgctaatcacaaattgcatcgagtcttgatgccgcggtggaaagtttcaacctctacatgtagaacaaagagacatgttgaaaaataaaatgtgataaaataatttttccgtgtatacataaaaaataaaataaactagtttcaacctctatataagtatatattaccgtcgacatcaatagtaataaaaaatactcaaatgaataaaaacaattctgtggataataagttccaccaaaaggaaggatcaaccataagttcatgacttttgggattatctttggtagttaatcttagtttcatagcacaaagaatgagccaaatgtacgttaaatatgcatatttttattaatttgtatatatagttttgtgtatgtttcttatcaacttaaaaaagaggaaaagtaaaatcatatatatatatatatatatatattatataattgaattatactataaggagaaggcaaattttaattgtgtctaagttactatatatatatatataattatgtacatataattaattttgtattaaattaaatatttgctaccctttatggagcttatataccaaattttgtattaaataaaaaataaataaatagtctttaacctttataaggtactgaaaacctttaattcgtataaattaatatatatgttttgtttcacaataactaaaaaaataagtaaaagtagaaacaacagatatgtaagctctataagtagtaggaaaaatgtaattaaggatccaaaataataatatttatattttatttgcaaccgaaaattttatagacaactcgcattgaaaatgttctcaacttgtttttataggaggcaatacttcttgcggtagggttcaattatattggtgctcaatcagggaattgtccgatgccattttccagtggaatttgatagaaaatttaaaattaagcatcaaaaagttgtctgatggcattcatcggagttgtcttgaatcaccatttttccgtttcatctcctaacgtctgtttttcacttaaaaagtctccaattccagtataacttcgtaaaacttgtacaaaacaaccgaaaaatacattaaaaacgaacaaaaatgtgacaaacaactcaaaacaaacactagacaaaggacataagacactaaaaacacaatataccacatacaattttggagacacccgcacaccgctcttcacctcttggactgtcagtaacattatgacatgactatagacattacattcactttcatgaaatttacaactactctttggatttgggttgcagaaagatgcatacagtaaaacagctccatcaacctcttatgctcatgtttcatgcacataagtactcaattagccataggtggaagcttagaccctgtttcgactttcgagtagctcggatatatatgcattatatcacatatcccttagcaccatattttctaatttaatttacaatatcactcattgccacaagtgtataaaaaccatagcaatagaagggtatcaaagttcaagtaaccaattaaattagaacactagaaatacattctatcatccaatctaagcaatcaagttaaatcattagaacaatattgaactaccgccgaagtaagatctcgtctaccggagatattgtcagattcttgcctccgttttgtatttgttgttttgatttgtaaaactttggctcaagtccaattcaggtattataatatttttaaaaaaagaatattgaactattaataaaatcttaacattttctgttggtccctagtacttttgatgggctctctatatcttcgcttttgtatgtttgaagcattaaggccgaattcatttaaaactcaacttctataccaaaaattttattttaaattttatgtaattaaaataaactaaccaattttttaaaaattactattttaatcacatataaaattaagttttaatttatctttctatacaaaaatatcatcattaatgaaattaactaatttattatatttttttaatcattttttcacttataaattttatctaaaactgaatcgattaatttcttatatctctaaagatatccgtatggtaacaaaattgactccaaacatttcttaagtcgatttctaaaaccgctccaaaagaccattgtgcattaaaaatactaaaaatctaaaatttaaaatattctcaataacaaacatttacgaaccactgaattttattttattttaaaaataatctataacataataattgttttatctgttttctaacacaaattattctaaatacatgattgaaatacatttctaaattggcgttttatagactatagtattttgacaactttgttttcaatattggcgtttcattattttggtgaaagattcccaacttataaaaaaaaaaaacgaatttttaattttcgtcctaatcatttatttcctaaccaaagaaaaaggcaaatcgcgacccgtctctctctctctctctctccttgaaatcgaaagatcaaaaaagcgacactgaaaatg

SEQ ID NO: 22685 - DNA, 3003 bp, Unknown; identical to SEQ ID NO: 22684
  misc_feature (1)..( 3003): 2750-1469P.txt file - cDNA_ID_2108769; gDNA_ID_1621173; Annot_ID_174059

SEQ ID NO: 22686 - DNA, 3000 bp, Unknown; identical to SEQ ID NO: 5316
  misc_feature (1)..( 3000): 2750-1469P.txt file - cDNA_ID_2108769; gDNA_ID_1620779; Annot_ID_167874

SEQ ID NO: 22687 - DNA, 3003 bp, Unknown
  misc_feature (1)..( 3003): 2750-1469P.txt file - cDNA_ID_2108834; gDNA_ID_1972144; Annot_ID_179339
ccaactttaatcacctaaaagcctaaatatgtttaaatcaataactggagaaagatcagccatctaaacgtcgtcggtttatcaaatttttattttgttttctgacggcaccggtttatcaactgttaatgtcaacattttttatctaagccaaacgttttgagttttgacggcctcgacgacattcataaatatttgtgtaaactcactaaaaatcctaaaataatcactgcttgagaacataggcaacatttaacatccgattggcgtcaaaggatttcattaaaaatgtagaaaataagtagtataatgatttgttcataagttgattccatagttttgttattctactcattagctggtgtagtaagcaaagagacaacaccacccatgtgcttagtagaaccatacacacacacacttagtggcaacaccacttgactctagaccataatgatcattttctgtctccatttcgtttctgattttataatttcttggatcaatgttcaataattgaatcccaaatatggaacaataataatggtggttgttaataggacaaaagtttctctaaatagatgcgtttttttttaacttttgtaggtttctttccctatctttcgagatagtttcttcatttgcttttgtgaaagattggtttatgtgtcacggatcgatcattgatgaataatgtgagaaaatgacttgctctttatgaagagagtaactgaaaacgatttgatattcaaacaatatttcaaaagttatgtttctcttttgattatgatctttataacaaacaaccaaataaatatccgatcagcttttcttgttcaacaatattttgatctatatacaaatactatcattcattgataaaatttaagatatgtaatgaactatagtatgttctattgttaggatcctacatctaaagttagatggaatctaaagtaatatttaaatgagatacactaattcattaattgttatttagttttgagttagggtctctattaaacttgagaatctaggttattgatccgggtggagtaacctaagaatgatatgttgcatgtccaatcttgagatttggttccacatgaagggatgagaattattgtcttgaaagcatgttaaattttttacaagatgatgcaaatagtaattaacatatcatgatcaaatcttgtaaattgaaaaaactcaaccttttgaggggaaacagctacaatatatactaatgattatctagctactcgtctaagaatataaatgtttagcatttaggtgaccaatatcaaactccgagctacttgccttacgttttacccttgcaagtaagtcaaattaaatttctattcattactaatcacattatgaaaaagggaaaccaaaacttgctgcctacttcattctttttcttgaatctttcgatttttcttaaaaattattattttgataaatatttcttccctatcttagtgttcacataaagtgtgaccgtaagatgggttagctttctcgtggtttgaccaagtcattcaaaaactcaatatactcaatgcctgaatggtcgtgcagcaacatatatgaagtctgctggctacatatgttaaagttggtttcgagtatgtaattttatatataatcttttaatttgttgaaataattttagatattttatacaaaattacaacctatacctcaaactatatattatactatatgcattttgcttgtagtcctatgaatatgagatttgtcttagagtcttcaaaattttatatttcatgaccgatcaacgttcaataaagtcgccgcttctttaaaagaaaaaatttggttgccaaacctattattattatagcttgagatataacttatgatcctacttttaatgcagtttcgaaattattcttctccaagacgaaaagaattgagaaggttggtccataatctttataacttctaagactttaacgtacaaatgatatatcgtcgttggttttttgcatttaaccagaaccagtttcttgtttatttatattttaattaattaattacaaacccctgaacagtaaattaatattggattttaaaacgttcaatttctgtagagcaataatatttcgaatttgtaagatacacgacaatcgatttgaaaaatagacaatagtagtgggatgtcaacgtcatgaacatgtaaggtcatcggacggcagcgatctcccccatatcctcggacgtatgtgggacaaaataccaccaaacaaaaaaaaaaaattgttgctgcatttctttaataatttgcgttatcataataattaattaacaaaaaaatatcaaaatatttccgataaaaacaaatcttcaacaaaatatttaacaaaaaaaaaaaaaattgcgcattttaatgtagtttatgtagtatttcctagtcacaccattatttacctgatataaacaaaaaatagtataaaaacagtaatattatttatcaccatggtttagtgaatgtacatgaaaaatttgttaccataccaatgagttttggaaaattgaaaattgactcagaaaacatgaaaatacaattttgtgatatttgttttgattcctgaatgaatttaataagctcacaaaattaaaattgcgaaattattcttaataaataaatatttcttactaaataaaaggaaacctacggaagagcaaaacataattttcatggcataaagagtgagagagagagagtcatagacaggagacgtttgagattgatgaacagcgaattcgaaacaaatcacatggaagaagagctctctttcgctaccgttaccttctccacttttctccttcattagggttttctctcttatttagctgcgcagctctctctctttcttacggattcacttcttaaaactcgttaatttcttgtgggtttttgtctcttttgcgatctgattccgaaagttgagtgagagtgagagaatcatg

SEQ ID NO: 22688 - DNA, 3003 bp, Unknown
  misc_feature (1)..( 3003): 2750-1469P.txt file - cDNA_ID_2108842; gDNA_ID_1620409; Annot_ID_156214
aagtttttggcaaaagaactaaatctgaaattttcaaaattttcttttgaaataaggcatcaagtgtcagcatattcatcttctgaatctccctcctctaccaccaccacgaccgcctcttcttccaccaccgccaccgcgacctccaccatgtccattgccgttagctccaggagtcttcatgttttcaggcaatgggaggatttgatcaacacacttcctgaagctgaaatcgtctgcagtatcgtcttccctaaccagaaagaagcatctgcttttccacattgggtgggttcttacttggaaggttttgattcctcctccaatcttcttttcaggctcagaatggcccttcttaatcagatctagcagcaccatgtgctcatactgaaatgtacaatccagaacaaagttcagtacaacgagttagttagttggaagctcaaaagaaactgcaacaactgtaatatattacatgactatgcaatgttttatcttttatttgtgccctcaaaatttgacattaacttcattcttctaaccattatatgacatcaagacccaaaaaaactttctaattcacacacaatccacaatcatataatcagtaagaacacgatacatttgaacttttcaactagtaaaaaagctgcaaaggagtccaatttacaagctatctccacttcactaatcctctccctaaacataatacaatatccacaatcatctccctaaacataatacaatatccacaatcattgtaaacaaccactaatttgagacaaaaacaaaattctaacaccaaacactgaatccaaaatcaaatcatatgaccaatacaaaggcgaacccaattctcaatttcttttagtttaaatacaaagcacgatcatcatcagattcattgataaaacatcttcctaaacacatcacagaacttaataatcacaatcagagctcttagattaacctatataagtctcgagcaaaggaatgaatatttccaaaaaatttgaaactttacaataaacaaagccaaaagacaaagacgaagagtaaacccaaatatgtattaccttattaacatcgagatcagttggccaaaagtgtaaaaacttgacaaagtaatcgaacatcgccacagaggtaacaaactccttgggaccaagtttaaccggacctgacttctcttcctctccaaccttctgcttcttcgattcacctccgttctcttcttcctctgtctcctctctctcacgtttctcatcgccggtctcggctttcggggtcgcggtttcgacttccatgtccactttctggtctgggttcacttccgctgacagggaatcgacgatctcttgttcttcagccattgttaagctagtaaagcttccgcctttttttcacctttctacgatttctagggtttaagcttgagggtgtgtgacctacagaaatcgtctaagcggtatatttatatgactttggtttccgattgaaccgaactggttcggtctatttgattttttggctcgacggcatacactacatgaaaaccaggattttcaatgtagtaactaatttgtcgtcattgatctgtccaattattatttttacgtctcttaaatcttttcattttaaagtctacatttttctaatatatttttttattaatcatctcaagatatttttttagtctacaaattacttttactgttgtagaaaatttggataatagtcagtaattctaaataatagaataaaaactcaaatcttaatataatagtttaacaaataaatcatattatactttttttggataaaaaatgttgatataatttacaatgttattaaaaataatttttgggatacctaaacgttttagatgttcagtctgtcgggatatcttggagacttaacttattgatcaatcacaatttttgccaaagaggaaaatgtcaaagtcaaacgaacatcttttgaaattatttacatctcgtggaattaatggaacttcttaaatttttcaaaaatttgacataattggaatatattttttttgcttctagtcaatcttaccatattatctatcaacagtcaaacacctcaatcttaaattttctaaaaataatggaattattttatcgtattttggtaaagagttatttttgtaatattatctaaaatctaaaaagaaccaagatagataggtacaaaaaaaaaaaaaacttttttttgtgaaaatctgattatcataacgttaccgtgtcaaatcgtcaacctccataactccggttttgtgtatttaattatatatttatctgtttacacgcgcttcgaaattttgatttacttatctgaatatttttccagaccgaacatcaaacaagaaaacacatttgtccgaatttcatcttgagagctgtttgtgcccttcaagaaatcgaaagagagcttctttcccccattttctgcgattcacgatatttcttcttctataggtaatcataatttgatcatcttctcttttatctctttttttctttcattttcttcttgggttatggttggttgattctgctatttgggaattttgatttctgtgacttttggggtttcaatttcattcctgaattgtgatggaatcgaatggtatctctcttttgttttcatggttgagatgtgattctgaaatttggggattttccgattaggtttatgtcttgaaaatttggggaaatttggagacaaagacatattttaaactcagatcctaatctcttccaccaagacattttccctgaattgttccgctttaatgaaatgaaatcgattgtctgagctcaattatgatgtttcgattcaaagaaatggagatttttgtgttgatgatggaacatttatcattataagagttatgagatttttattttgaatctttggatctttcttggtttttaacaggacaacgtttttttacacattgaggctaaaagagagatg

SEQ ID NO: 22689 - DNA, 3003 bp, Unknown
  misc_feature (1)..( 3003): 2750-1469P.txt file - cDNA_ID_2109031; gDNA_ID_2096299; Annot_ID_195631
taatctataaattagaagttgaagagcttacattaattatttagtggacatagggcaaatgttaaagtgatgatgtgtcaatcatatggaaagagttggccaactttcatatatatgattggagtgaatcgaatctacatcattcatcaaccaaaaaataatctagaaaaatatatatcataatttctaactaaactaaacaaaaacgctcgttgttatattttagctttttaaatataataaagctcgtattgacaaagctaacggataaacccttattattttgactggttaattgttatctcaaagaaaaagtatttaacatcctgactttaaatttagaaaagttcatcgactatttgtgatgtcccttcaaaaagattaaaaaaccataacaaaagttaaatgtttctctgggttgtacaaatgttagatgttaactggaccagatcacatataatataagaaaatgaacctgattaattctctttactgagctaaattttttactgacaagtctatcaaattttaccatcatacttaaatcctcaaaaacacataaactatacagtacttttttcttattacgtatttactattctatgcatgaaattgcgtaaatgtttggttgtatgcatattagaatattctttttatttttctctccaacagatttaatattgaacggtggtgttcgtatgatataaattcaaaaccacccaccttttatcctttcgaactttttcgagataggataagatgacataattattttatttgtaatttaggaaaaggggtaggcctttttttttttctttcaaattaatgattgtggggctaaaaaaaataatttgtgtccaacacaggatataatattttgaaacttgaacgtaaatgttgacttttgatttttttttcttctcagcttttgttaaatttaaactcgttcccttatcagatttattaaaatggtgagtgacgaaaaaaaaaaaaatggtgagtgaaacgttagagaaatcgacgtatgaaatgaaattatgagagtgtacagagaaatatttgaacaatacttagagctgacaacaaattcaaacactgaattagttcttgaagacaaactcgctctttgctatagttgaggagaagaatcccacatactcaattatagatcgagaacgaatctttacgttttagttttcttgtcacatttactatgtaaaatggttcatattattattaaattttcatttattttcaaaataaattttttacaaatatatatatattttaatatgatgttaaaggtttttgtacataaattaccttttaattttgtttggtttatttagaaatcaaaatgtaatttattatctacctaaaaacacggttctttcagtataaaaatttacagaatataaatcattaaaagcaaataactaattagtattgtattaaaaattaaacacttatctaataatacaaaacttttgttctaaaacatgaaaacggaagaagtatgtttcttttaaaactatgaaattcatataccatattcagttttatttaatatcatttaatatgaatcgactacctcataattatacaatatagcaaactagggaccatcttatcttttacgtgattcctaaaacataaatatttatgggaatgttgcccaaaaaaaaaaatatatatatatatatatttatgggaattttatcattttcttcctattaagaaaaacctcaaaaataaaaatattaaaatacaaaaggaaaacataaaagcacaaacgaatattccaaatataaactaaaaataatactcataaacccaaaaatacatttttcctttcccgaaattcttttttttgttaatattattatcatgacaagacgaaatttactcaaaaggctacgaaccaaagccatgtgatgactacatcagtaccacgtgtcaagatctaaggacttaacgagttacgagtgtgtcgtgggccatcgaccatggaaaagcaacgagtctttaggtgaatgttttacttgctataaccggtaacaacgggtctggtaataccggtagctccggtggttggttgagttatatggctatgggggtttaagcaagaaagacgtggtcgtgttcttcttataagggtttttgtttataatttggtaatcgaaaaagagagatttgataaaatcctttgtgttgaaggaaaaaaaaatcatataggtaacgtttgatacaagtaaaaaaaaaaaatttccatcactttcttgggtaaaaaaaacatgggttagaggaaaaactggggaaaagattttagattaagtgcgtaaagaattctgattccttcgtctccgatctctcatttttctggagaaattgtcaaaaatttcagatatctatattgtcttggaactgaagattcatcgaaaggtgagaaagatttaaactttttttgatggtttttgtgttctcgattttgtcaaaagtttttgtgtttgtttgatcatcgagaaacttagtaaaaattcattttttatgtgaatttagatttggaattttcaaattcaagttcttttggtttggatcttaaaagggtttttgttatctttttgaacttatcatcatcttcgattgaaatttttcgttttcttatatgatcagaatcatctcattcatcgatctgtgaactccgatctgagaatttgaaagtgtctctctttttgttctaagttgatctgtttatcctttaattcaaagatcgaagcttttttataattgaattacgttttgtgttcttcaattcggatcttgtgtttattagggttttagaatggtttatcagatttgatttgatattaccgatctgtgattcttgaattgaattgagtcttcttatggttcttgtttcttatatactacagattggtgagttttattcgctgcttatcgcttgtggcaatcacatcatctgtgttatgcatccaagtaatg

SEQ ID NO: 22690 - DNA, 3003 bp, Unknown
  misc_feature (1)..( 3003): 2750-1469P.txt file - cDNA_ID_2109039; gDNA_ID_1972122; Annot_ID_179050
ctgacaagagcgatgtttatagtttcggggttgtcctggtagagctcataactggagaaaaaccgttgtcccgaattcgttctgaggaaggaagggggttggcaactcatttcctcgaggccatgaaagaaaacagagtgattgacatcattgatattcggatcaaagaagaaagcaagcttgaccaactgatggcagtggcgaaactcgctcgaaagtgtcttagccggaaagggattaaaagaccaaacatgagagaggcttcactcgagctggagaggatccgttcatcacctgaagatttagaggcccatattgaaaatgatgatgaagaggaccaagtcatggagatcagcagagaatgattctggaagcgtgtacaagaatatttcagcctttatgtaatgtatatggtgacaagaaaatcaataagatcactcggcagcaagtcatccatctttagccacaaagtgtatttgaaattcgaagttaacatgtacttttgaaaatgaagtgtggacttttggtgtgacttgaatgtattatttgatgactggaaaaacttacttgtctaggagtcaacgatgtgtcagaaaatgtttgacttcaagcattatggtttcagtttcagagtctcgacctgtgtaggtagtagaagttatatcccgctgctatcatcattccgctggtaagaattcccaaatatacagaaacgcatgagctctaataagagcgcctaatagaggcttgacatacaaccggaggtgacgatccgactcaaaacagtgcacatgtatactctcatctcatctgatgaaataaagttatctttcaattatgaatctctggttttatttcaccatgtaataatacacacaaattgcattatagaataaagaagaaaaagaatgttttagtacaagaacaataaatgtgggggtttcaaactttcaccgatagataaacagtctagaagaatttaagtttccctttggagagagcttgaacaagttgtaattgacacattgccttgtctttcccggtcaagccatagcaggacgagtgcctagcgcctaaagtgactgcaaagtaaagataaacagtacagaggaaagccaaaagagccaaagctgttaagagatattgatgcctctgaataagagtcgaccagctacccaactcgtcccactgcttctttagacattgttgtctccttgacggtgaagatacaagcccatcaagaaccatggctttataataccaattaacctgcaaaaattgacacacaagtcgttttaacacaattttacaagaaacataaacatgctatgaaaaggagatcatcacaatcagattgaatgtaacatttgggagatcacttttccatcataaaccatcataaatgtcaatgagaaacaagaattcgagacacatatcgctgttttgattggttgtggaaacgacattagtcataattataattacaaaagagcttggatcgtatacgaaagatgaaaatgaaagcaacaaattgccaacaataacgtcattctcaatcaatcatcaatcacaatacacaacaacaacaactcgcgatcgatgcacattggataatcgagggaaacagatccgaagtaggtgaaagattattagaaaacgaaccggtgagaatcggtttagagatctggagaagaaaaagctagattccagctccgtcgacaacccccgaaatcttcagcagtgttgttgcgatatggagagagagagagagatggatctcctccgtagattgatgatggctcgagctgggccgatttgccggatacgccgtacgcggcttattatgtccgttacataaaacgggaatttagggattttatatacaaaacaataaaaagataaaaaataggaaagaagatatataaagaggacaaaaaaatgatgatgcgttgtttgttagcttccactcctttgtgttttgaagatgatgggcatgttgttagaatccgatgatgagtgatgacatttacctaggactatgatctgactcttgcagcttccagagggcatttacgaatacgtattaagataaacttttttaatcattaacgagaagacaactcatgttctagtaatcacgataatgtttagtacttttgtatattgtatttgtatgacagtatgaggtgttcaatattttggtttgcttccaactaaactaaaagtctaaaatacattgttttagttgcactgaaatcctaatagactgagttgccgttgccgtgaatcactttagccggttagcatttagcatccaaaccaaaactatttacccccaatagcctagagttttttttttataacttttttctttttctttgtaaggagacttgcaaggttttagtagaggtctatcttaatcaaaagcccatgcatgataaacagaaggagaaattaaaataatttgggccattagtgggccaaacatgaaaacttggtattgatggtttactagttcctttgtaagttggtcaaaagtccgaaatcaggagcgagataataaagaaacaacgagttgttttacttttcaaggagaggatagctcaaggtttttgatcgatcgcaaggtattttgattctctctttctcaagcgattttcgttttccttcttttgttccagaggtcaaattcaatccctaaagctaggtttctcgggtgaagctttagatcgggagctatgatttcatctcgaatttggggataaatttcagcttattttaaccaatttcaattgattccaaataattctgtttatctctgagcaaaattgattaattttcgattcggtctttaaaaagctgcttttcttaccgtctccatccgaaattagttttttttgtttgtttgatgatttgtgttttgatgatttgtgtttgcgttttggttgatactagcagctgaatattgaatccaacctttaatctgagaggagaaagaagatg

SEQ ID NO: 22691 - DNA, 3000 bp, Unknown; identical to SEQ ID NO: 9970
  misc_feature (1)..( 3000): 2750-1469P.txt file - cDNA_ID_2109082; gDNA_ID_2096296; Annot_ID_195565

SEQ ID NO: 22692 - DNA, 3003 bp, Unknown
  misc_feature (1)..( 3003): 2750-1469P.txt file - cDNA_ID_2109090; gDNA_ID_1620328; Annot_ID_153568
catgtcacttgacaatgaaactgggttggatccagctggtattagagttcgagctgtatcaggactcgtggctgctgactactttgctcctggctactttgtctgggcagtgctgattgctaaccttgcacatattggatatgaagagaaaaatatgtacatggctgcatatgactggcggctttcgtttcagaacacagaggttcttttctcatcgttctttctattattctgttccatgttacgtttctttcttcattacttaaggcttaaatatgtttcatgttgaattaataggtacgtgatcagactcttagccgtatgaaaagtaatatagagttgatggtttctaccaacggtggaaaaaaagcagttatagttccgcattccatgggggtcttgtattttctacattttatgaagtgggttgaggcaccagctcctctgggtggcgggggtgggccagattggtgtgcaaagtatattaaggcggtgatgaacattggtggaccatttcttggtgttccaaaagctgttgcagggcttttctctgctgaagcaaaggatgttgcagttgccaggtattgaatatctgcttatacttttgatgatcagaaccttggctctggaactcaaagttattctactaaatatcaattctaataacattgctatattatcgctgcaactgacattggttgattatttttgctgcttatgtaactgaaactctcttgagattagacaaatgatgaattgataattcttacgcattgctctgtgatgaccagtttcttagcttcgacgataacatttgtcatactgtcttttggagggcattgaattttgctatggaaagcgctggagcttccatgcttgcattctttaccaattagcgttattctgcttctttcaattttcttgtatatgcatctatggtcttttatttcttcttaattaaagactcgttggattagttgctctattagtcacttggttccttaatatagaactttactttcttcgaaaattgcagagcgattgccccaggattcttagacaccgatatatttagacttcagaccttgcagcatgtaatgagaatgacacgcacatgggactcaacaatgtctatgttaccgaagggaggtgacacgatatggggcgggcttgattggtcaccggagaaaggccacacctgttgtgggaaaaagcaaaagaacaacgaaacttgtggtgaagcaggtgaaaacggagtttccaagaaaagtcctgttaactatggaaggatgatatcttttgggaaagaagtagcagaggctgcgccatctgagattaataatattgattttcgagtaaggacatataaatcataataaaccttgtacattttgtgattgtatgatgaatatctgtacattttatctggtgaagggtgctgtcaaaggtcagagtatcccaaatcacacctgtcgtgacgtgtggacagagtaccatgacatgggaattgctgggatcaaagctatcgctgagtataaggtctacactgctggtgaagctatagatctactacattatgttgctcctaagatgatggcgcgtggtgccgctcatttctcttatggaattgctgatgatttggatgacaccaagtatcaagatcccaaatactggtcaaatccgttagagacaaagtaagtgatttcttgattccaactgtatccttcgtcctgatgcattatcagtctttttgttttcggtcttgttggatatggttttcagctcaaagcttacaaagctgtttctgagcctttctcaaaaaggcttgctcagtaatattgaggtgctaaagttgatacatgtgactcttgcttataaatcctccgtttggtttgttctgctttttcagattaccgaatgctcctgagatggaaatctactcattatacggagtggggataccaacggaacgagcatacgtatacaagcttaaccagtctcccgacagttgcatcccctttcagatattcacttctgctcacgaggaggacgaagatagctgtctgaaagcaggagtttacaatgtggatggggatgaaacagtacccgtcctaagtgccgggtacatgtgtgcaaaagcgtggcgtggcaagacaagattcaacccttccggaatcaagacttatataagagaatacaatcactctccgccggctaacctgttggaagggcgcgggacgcagagtggtgcccatgttgatatcatgggaaactttgctttgatcgaagatatcatgagggttgccgccggaggtaacgggtctgatataggacatgaccaggtccactctggcatatttgaatggtcggagcgtattgacctgaagctgtgaatatcatgatctctttaagctgtcctgtcagcttatgtgaatccaatactttgaaagagagatcatcatcaattcatcatcatcgtcatcatcatgatgctcaactcacaaagaagcctgagaatgatactttggtgcgaaattctcaatacctctttaatattcttattgaatgtaaattatacaatcctatctaatgtttgaacgataacacaaaacttgctgcgccatgtttgtttgtcttgtcaaaagcatcaatttgtgggttatacgtagtgtagaggatgattcaaatttgtgataaatttggtaatcaaagttaattctgaaaatgcaacaccacatgaactatgtcactaaggcctagaagatcgttatcagtaatagactaatagctcgccaccatgtatgtgaagttgggaatcgataagtcggaagagtgagagacgtggcttaacctggtccctctaaatccatacgatcgcttaatgaaatcctcggaataaaacagcagcttctcctctccaaccaaataaaatcctttaagctcccctctctctcccattctcttctcccttttctctgtttcgcggcggagaaaattgaaatg

SEQ ID NO: 22693 - DNA, 3000 bp, Unknown; identical to SEQ ID NO: 1391
  misc_feature (1)..( 3000): 2750-1469P.txt file - cDNA_ID_2109094; gDNA_ID_1620396; Annot_ID_155768

SEQ ID NO: 22694 - DNA, 3000 bp, Unknown; identical to SEQ ID NO: 2704
  misc_feature (1)..( 3000): 2750-1469P.txt file - cDNA_ID_2109154; gDNA_ID_1620578; Annot_ID_161051

SEQ ID NO: 22695 - DNA, 3003 bp, Unknown
  misc_feature (1)..( 3003): 2750-1469P.txt file - cDNA_ID_2109164; gDNA_ID_1620618; Annot_ID_162145
aagttaaatatcaatattttatgaataaaactgtattttctcagtaaatcgaattaatagaacaattaggagaagattaacgtattaggctccgtcttcttcttcttcttctcccttgtaacgttttctggtatgggccgctcacgatttctctctcaaaatatctttgcctttgtacttatctgatccataataatctctggataacgacgaattgacgattctgagactttatttttgtttggttttttgctagtttactaattcgttaagtgtttgatgataatgactcttgaaaaaagtttactttatcttcttctcttcttctgcttttggtagtcgtctagtaattaagattgatagctaagtaaagccaagatttctctggcttgtttttcaagaggaataacgtaagcgagcaaaaagctccacttattgtcgggaagcaagcttcgattctttaaattcctccaaacaaaaaaacacaacgtggaaacttttctataaacccttttcaaattctgtggattagaccagaagaaagaagaaaatttactataaacccttttcgattccactaattgttttcacaaaactctgttctgtactctgttttttgttaggtcattttttagcaaagaagaagaagaggaatggcgatgctagttgatcctccaaatgggataagacaagaagggaaacattactacacgatgtggcaaacattattcgaaatcgacactaagtatgttccgattaagccgattggaagaggagcttatggtgtggtttgttcttcaatcaacagcgaaaccaatgagagagttgctattaagaagatccacaatgtgtttgagaatcgcatcgatgctttgagaacattgagagagcttaagcttttaaggcatgtgagacacgaaaacgttatctcccttaaggatgttatgctgcctactcacaggtacagcttcagagatgtttatttggtctatgagcttatggattctgatttgaatcagatcatcaaatcctctcagtctctctccgatgatcactgcaagtacttcttgtttcaggtacgttggttcgatacattttctgtttctcttgttaagctttggtttgatgattgaattgtatctttttgtcgacattgtagttgctaagaggattgaagtatcttcactcagcaaacatccttcatcgcgatttaaagccagggaatctcttagtgaatgctaattgtgatctaaagatttgtgatttcgggcttgcgagaacttatgaacagtttatgacagagtatgtggtcactcgttggtaccgagcacctgagcttcttctctgttgtgataactacggaacctccattgatgtttggtcggtaggatgcatattcgcagagattcttggaagaaaaccgatattcccgggaacagaatgtctcaaccaactaaagctaatcataaatgttgttggtagccaacaagactgggatctccagttcatagataaccagaaagctaggagatttataaagtctcttcctttctcaaagggtactcacttttctcatatttacccgcacgcaaatccgctggcgatagatttgttacagaggatgcttgtgtttgatccaaccaagagaatatcggtcagcgatgcgcttttacacccctacatggagggactgttggaaccggaatgtaacccgtcggaaaatgttccggtcagtagtttggagatagatgagaacatggaaggagatatgatcagggagatgatgtgggaagagatgcttcattacctcccccgagcttaaatcaatattttgtaaaatcatctctctaacacttgtttataactttagtttgtggtaacttgtattcgtcttccatgtttctttgttacgttgttttgtgcggaatgtcattgagatgtatgcgtcaaagtagactttcggttattgaaatttggtctggttatttgatttataccggatccggtttactcccctcgtatgagagaccttcggaactatggagaaggttttgactctctcttcagtgatatgatccgtcgcaaatcggaatctgccggcgagatggttccagtcgtctttgttcccttattgatagaataatcaaaaatccgagtcggagacgacgaagacccgagttccagctattaactatgcagataccatcaagagagcatagtttcattctatttctcttcatatctggtaaaaatcctcgtcgcacgaatttgccctctctcgaatttttgagcttttgaaattttatcttttgggaaatgctgcagcttttgtaattggtgctgcgtctgtacctgtacctgattctaattgctacgctctcgacaattcaagtcgtcttgtcgattttgtatcctctttctattttattaaagcttaggatcaattcttagtaaaaaagtttgctttttgttgcattggtttgatttcgtgtcttgtaaagctgcttcctttaacttggtttgatcagagcagctggatcggtcatccatttgaatatgatggcaaggttgtgtatatgtttctcattttttagtgttgagagttagttttaaggactttggggttgagttggtatgtgttttttgatgcaggaatttgatttggtggttagattttgcaaggatgtggaaacaagagggcaggcggtaaaatatttctatatcatcaaattcaaaagctttttgtttctactctagattccactaatgtgcgttttcttgcgtgcagggatatgttgattttggacgatttgacccgttaagctactttgtttctagttctgaaaatttcgatttcgtgcaagtaagagctttcacttctttgctttgctctttgggatcaggcatcagaaccaattgttgcatttggtagactagtattatgatattatcctcggaacatggattcatttgttagtatatataaatatagggtttaccatg

SEQ ID NO: 22696 - DNA, 3000 bp, Unknown; identical to SEQ ID NO: 9888
  misc_feature (1)..( 3000): 2750-1469P.txt file - cDNA_ID_2109180; gDNA_ID_2096290; Annot_ID_195337

SEQ ID NO: 22697 - DNA, 1243 bp, Unknown
  misc_feature (1)..( 1243): 2750-1469P.txt file - cDNA_ID_2109180; gDNA_ID_2926169; Annot_ID_140057
gagggcacatcaacatggattctaaactatgaatctaagactcacatcgtcgatcacaaaaattcaggatccttctcaataagtatccaaggaattgagcggattcttatccggagtcctagcggtcgtgaaactttggctcaacaaaaatcgctaggaaagaagaatgcaacagtaagaatcgcatccgagatcccacctgttttcctcaccggagaagaaatatgcagtatatttgtggctaacgtgttgtccaagtcaaagatcaacaagtggattcagcaaagtattgttcctaaaatctgcgaagacctgattgatataagacgccaccttgaagaagaagaaaaagatggtttcttggttgaagttgaagttgttctagaaacgttgtatagtgattggttaagagtcaatgattatgactctcaaggttgtctaataccaatagaagaagagtgcataatatgtctagaagagttagcatcatcaggtagtgagaggaggatcatgaagttgctttgttctcacagttttcataaagattgtattctcccctggctacgctgcaagcgatcatgtcctacttgtcgtgacgacatccacaatcgtcgagcagaagaagaccaccatgaatgatattttgtaaaaagaaattaagaaacaaaaaaagaaaaaggaagaaagaaacaattcaagcgtttctcgtttctggattgataatatgcaagatgtttggtgctagattctgagttaagagttttgatttcctttgttgtgtgcttccttagtcgtcattgttttgacttgtttctcttgtagtgttgttatttgctctccatatttcttggcttagtttccgaggatatctttgtcatccttcgacttagtttccgggatcatgtattgatcgtcggctttttgtatttcacctaatatctcatcaatgaaaattaatcttccagtgaaaaaaaaaaaacgaaaaattttcttaattgaagaaaaaagtgtattttccttttagtttaataaattagattgttttcttaagagcatacaatttctttagttgaaggaaaaaacgaaaaggccgtgaaagaaatcttattgggccacaacgtgagcccatttagtaatgtaatatcagaaaccctagtgtacgcttataaaagacattttaggtttgttcagctgttttacggagtcgcttttgagatatcgatcttacgaagaagcaaatatg

SEQ ID NO: 22698 - DNA, 1243 bp, Unknown; identical to SEQ ID NO: 22697
  misc_feature (1)..( 1243): 2750-1469P.txt file - cDNA_ID_2109180; gDNA_ID_2926169; Annot_ID_199390

SEQ ID NO: 22699 - DNA, 3000 bp, Unknown; identical to SEQ ID NO: 9888
  misc_feature (1)..( 3000): 2750-1469P.txt file - cDNA_ID_2109180; gDNA_ID_2926170; Annot_ID_199408

SEQ ID NO: 22700 - DNA, 3000 bp, Unknown
  misc_feature (1)..( 3000): 2750-1469P.txt file - cDNA_ID_2109184; gDNA_ID_1620312; Annot_ID_153008
gaagactctgaaatcaaattttctcttattttaataccactactccttttactaaagccaataaagaagaaacattcagctacagacgtaaaaaaacaatatggctgctgactttaaattttggttataaaatcacaaccataacaaagctaggaagagagatagtcatcaaaatggattcccactttctggagaagataggatttatctcaaaccaaatctccagagataaacttaaaccaggagatcacatctattcatggcgtaacgcttatatctactctcatcacggttcagtctctatctctcaataacgtgactttttttttgtttcggattgcatcaaagataatcaaatatttgatgctcatcctcaggaatatatataggcgatgagaaagtcattcatttcacttgtggaggtggtctagaaactggaactgggaccttcttggacaagatcgtcgttagtgtcatccctaatcataaaggagacaatccttgttctaattgtgaagagcaattgaatctcgaaggtgtaatctcttcttgccttgactgctttctcgccggaggaaacatctatcttttcgagtacagtgtctctccagctgcatttatcgccaaacctcgacgcggcacatgcactatagcaccttcggatccctgcgatgaagtcatttcccgcgccaaatacctcttattgcggaatgggtttggtgattaccatgctttggaaaacaattgtgaagattttgcaatatattgtaaaacaagcttgctggtcggaaaagactatgtgttgggaaggggcggtcaagccagctcagtgagtgcagctgcgtggcttgcgcaacttagtcctttcggcagcaaagctattcagctatttgcagatattggtatgagaaaggatgctattaaggtgcccgtcgagagcctcgttcctcgcgcatatgctactggtacctctagaaatagaaggtgatgaggtttgaagacacgccaacgggcgggtaggcgaattcttcgaagaatctataatgtaggaaacatgatccaatattgtagaaaaattcactactattctatataaaccaaaaaaacaaagaatgagattcctcagacatagagttagaatgatttttttactttccatcaaggcaaatattctacaaagataacattttacattgaggagattaagatcttattgtcgagatgcagctagctactgagaataataaggcgggtggtattgaggcggcaacacatatccagtttgctgagcatagtaaagagattgaggagttgcacctgaaccaaagagcccagttaatgggttcacaacaacaccagaaaatgctgaggtcataagaccataagggttcaactgtaagccatgatgactatgctcaggcataagaagagcttctggtctagaaagtagctgctgactcggaactggaacttgtgacccatttttgcagtctctagtccgctttttccccttttgctgtggctcttgcttgggaggattagtcgtgttgcgtttcctcaatgccttatttttctccagctcttctacacgttcctcaactttctcctgagtaaactctgattcaaggttctgatctttgatgattttgatcaatggtttcaaggcactgacttctttatcagaggcttcgttctgcgacttgagagagtagttatcttccacgcaaactctaagagcagcttctctacagtccttaatgtaagatttcaaaacagggattggctcaaattcatcagtcatcccacactcatacatgaatttgactgctaaaattggtttaccagaatccaagagagtcttgatgagtttcccaactcttttcctatctacaccaatcttgttacaaaccaaagttgcttgcttatacttagcgatcatgaaaacgtaatcagaaagctcctctgtgtcaaattctgatcctaattcaaaagctgcgaccaaatgcagaaacactaacgcctcgaaaggcttgacaccaaccttagatttccaatggtaagccagtttcttagctctatttctcgtatcaacagtgatattcgcattgatctcaatcaaaacttccattaacaaaacgaaaactctccttacatcgaatgatcttcccgatgatgacggtgtgtagttcgaaccttcaatcgcgtcaagcaccatggacgccgtatccggagagtaacgaatcgctgcagaaacttcctgattgagaggagtttcatcatcccatatcctaatcaaatacttaatcaaaccaattccgtcaatcttctcacacaaggctctcaactccggctcaacaacgggttgctccgatacctcctccgaagacgacgatttccctgcatcagaagcgtcgattctatacgaatcatgttccaaaggagatgtagagtggaggaggcggaaacggctagcaagggaggattggagagaggaaaagtgagaatcgatctcagaccaggaaagtgagaaagacggtgaaaggagagagcgatgagcttgaagatcgtcgaaagctttctttagcttttccttcttctcatcaatctgatttatcgcggtggcgatagtctcactcgccgtcattgtttgatctctaagatttctttggctctctccggcaaggatatataagaacgttatcggttcggttcggttcgagtaagtttaataaaaccagaaccgaattgtttttcacttgatttggttcgatttatagaaattgaaatggtttggatgaattcaatttcgtttctactcggtttagagcgacctctattaagacaaaatcgagaccacaccagtctatagtctctctttcgagtctgcagctagcgtgaagacgatgaaatcgatgggaggagatagataagcgcgaatttgagagtgaaaattctaaattcagacccattttcaccggcgcgagtcatcgttgaaccatg

SEQ ID NO: 22701 - DNA, 3000 bp, Unknown; identical to SEQ ID NO: 1867
  misc_feature (1)..( 3000): 2750-1469P.txt file - cDNA_ID_2109192; gDNA_ID_1620460; Annot_ID_157747

SEQ ID NO: 22702 - DNA, 3000 bp, Unknown; identical to SEQ ID NO: 2709
  misc_feature (1)..( 3000): 2750-1469P.txt file - cDNA_ID_2109199; gDNA_ID_1620579; Annot_ID_161097

SEQ ID NO: 22703 - DNA, 3003 bp, Unknown
  misc_feature (1)..( 3003): 2750-1469P.txt file - cDNA_ID_2109211; gDNA_ID_1620808; Annot_ID_168945
gaactgaagagcgtatcttctccatgtaatctcctgcttctttctgcaacaaatacatatgaatttcatacgatgattaaaagctttatcatatagtcaattttacggtttggcattcgattttccggtttgattcgggttacttgagtttcacgttttggaaaaatgggttcgagcaagaaccgaaatacatatgttaatcaaaaacagaacccgaatcaaacctaaccgaacttcgaaccagaacaaatttcttttgtcaactcaattattaaccgggtctaacctggtttcctttgtatgcattggctatgttttcgtcgagaagtgccaacaaagatctgttgatttggtttttctccaccatatccaacaactgtatcaaaagaagaatcaacaaaatgtctcaagatcatctcatgaaatcatcataaaatgtttttgtgtttatgggtaaagtgtcacatactgtggtttttatatcggttgaggttaagagtttggttaagctatttgtagccgtcataagctcattttgcattttgtcataagcctctgcaaagcaacataacaagagaagttatcaaaacctgtaaaatcgttgagtccatgagtcacttaataaggaagcaagagatggcacaaacctattccttcttctaaagctttttgaagtgtttcaagctcaatcaatctatcttcaatatcctgcatgattttgccaccaaaaaagatagtttagtagtctgattttcggtgacagattaaatgttgttgcttcaagaaagttgtaccgcagtcttagtaacagcaaatcgaatctgtccgatttcaagtcgtatctgcgcaaagaattcgtcgtttaacctgtaaaatttacagtaatcatgagctcgtttgaagtttagtcatcatctcaaatccccaaatttattactctagtatctatatttcaacgaaaacggattcacttgagaaactaaagcaccaaaacatcttcacagggtcgattcatcgaacactgaacatctatattcaacaatttactctcccaaatgctattttgatcaaccaagtatcaatatttcaacaaaaacggattcacttaataaactaaagcaccaaaacatcttcacagaggcaattcatcgaacacgttgtgtgcaacatacaaaaattgacaaaccttcctctaagcctagcgatctcatactcaatctcctgagcttcagtatcaagaaagtactcaatcagctccgcagcagtatccggtacaactctagactaacaaaacccaaacaaccaaaatcaatcgatataattgcaaatcacaaatcagtatgatttcaagaaaaaataagagatttttaacttgtctaagagcttgacgacgctctttctcttcacgaagttgtttctgaaaagcttctcttgcctctgaatctctctctagccgacgcttaaactcaagccgagctatatgaccagtttgagccggacccaacacacctttcggatccttccttcgaatcaatcaaacaaagaatcaatttcatgaaactaatctcaaataaaacttccttgttttgatcaaattcttacccattcgcatgtgattttgctcctccgtgaattaaatctcggaatcgtacggacggtggttgcagcggcggcgattccaaacgaaagcgtagccatttttgttttttgttttctaagtgtgagctctgcttttttggttagctacgttatctctaaacttctcttatctagttatctgttttaatggcgggactattcgtgaccgttgaatttacaagtgctgagagacgtttgatcagatcgtaaccgtttaaacgttttgatctgacgatcacatgtttgtcacgtggcaatataaggaggtccttttaaacatgtgcagaggcccaattaatcaaaaccttgtaaggcctttctatagcccaattatagaactattcttatcgcgctggttatccatatggtttaatgctggtttggatccaaaatttatgaaatgatttagtcttgcaaattacttgaagatcaaagtatttcaggttgacctagtcctaccacaagaaaattcaacaaaatttatggaaatttggtagatgttttattactatattagcataggctataatttttatttttgacagctacaaattgaagtgtacaaagaacaaaagttggcaagaaaacaaaacgtgattaactcatcctagaatctagagatttacgtcaaatggcaattaatataaacatcattttcaataaaatttattaaattacctaaaaaatattcaatcttctagttgaagtatctgagaaataaaaacttatcatgaaaaagaagtctttaagaaagcggcactaaacgctattagaccatttcggtatttatagacgatgaaatatttttggtggattatgcggtcattaagcgaattaaacgactattagatggattgtgtagatttaaatgtgttataatatttgataaaaaatttgaatctttttaaaaatatatataattgtgttaaaaaaaactatactttttattattttattttatcttcctttaaaatgttaaatttaaatttattttcaaaaaatttgataattttaggctttttgataatgtttttcaactttttatataatatataagtacatattgttttattctaaaatcgtttagatcttaacgaatagttataggcgttagacggcctcaactaattgttataagtgttagacggaaagttaccgtccccttagcgtttattttaacattaaaagaaaagatacatactattaaactaatggagtattaacaagaaaaaaaagaaagagtaaaatacgaaaggttccttaagcaagtttataaatatttatagccaaaaacaaaagcaaaaccaaaaatcacaagtaaccccaaaagaaaaaaagcaaagagagaggaaaagaaaaaaaatg

SEQ ID NO: 22704 - DNA, 3000 bp, Unknown
  misc_feature (1)..( 3000): 2750-1469P.txt file - cDNA_ID_2109223; gDNA_ID_1621091; Annot_ID_170725
tcttctattccttgcacaccgtccggatgaatatcaaggtgtagcaagagatacggctgtacagtagccgaagctttagttcctgtaccataaatgacatatgagaaaattctatcatgaaagaaatttagaatgattacaaaaaatacaaataccttttgccttcactacgcttttaagctgcccgccaaatatctcactaagctcagacggaacaaaactttgtgttcttgtcacagctgatttgtttttgggtccaactgtttcccattcatcaccatcatcgttggcagaagaaataaccgatgacttagaagcggtgactttgggggactgttccttgagtttcaacaactcatcatgcatttggtccattataaaactcaaaaactcttgagcatcttcctgcctgccagtacatgcacacaaagttagaatagggacatacatatgaactatttaaaacagaggaaccatcaaaatttagactgtgtaagggagtcactaaccttggcctaccagacatgttgttgagtacatctggggtaaaatttctaaggactccttcgaacatggcaggtctaaaaggtctaccagcctcaacaacagtaacgttatttctgatgctggaactgcttggcacatccaattcggagatgaactcggaaaatgcagctaaggttggagagtcagcctgataaaaaagaaaatggaagaatatcgataagaaaacaaatattataggaaatagaaccaaaatcacaaaaggaacaatgtacgttaaaaacctttggaatatcttggagttgaattttctggaggagctgcacaaaaggagaacatgaaagcaacgcttgtagtgttgcattcaggaagcacaagtttccagcgtttattaatcctcttggtgtaaagtctttaacaggtggaacagattcagtaggaaccttcaggtttttctttctttgaatgcttccagacgaagagtcacttgagaaatcttcattgtccagcgcttgaaatttagagctcgaagctttatacacaggatcactttcaccatcagacatagacaagttatccaaaccaataggatctgttttcaccgccacaccattgttgagagatttgttgctttcagagatctcttttatgattccattttgtaccacatgctctggaactctcaaagagttctttcttgggagttttgcatcactatcattgttcttatccgagctggcaggtctagaagcatcaagtctctcttgagacccagcagatttaactgtcccatcagcctcacctttcttcaactcgccattagtatttactgaagaattttccgcagcaagattcaaggagccaaattgaatacttcccacacacttgtctttagaattctgaggatccttagtgggtttctgctcaaaaaatgacctagtttcatgttctgtaaaggatccaaacacaaatacctgccatgaataaaagtagaatagcaaatgtaagtttcaaaggagaatcatttacagaacaattaagaaaccaaatgataatgaaagttaagtctctcggatatacattgacctcagagaaaaactacaaaatgatcaaaacgaagctataaaaagatactatctccatgaaactaaaccacctaaaactagtctctattgcaattgggtgacctctgcatcgttctctagaccatgagaactaaaccttaagggaaacaaaataagtgaagaaactcaagaggcaaacaacaagtagtaggaaattaccttcttttcactcatatttggcacatagaacgcaacggagaagagattgaagagcagcacaacaacaacaagagcccaaaagacgtaatctgattcagagagagatccgaaacgaaagaagcatgagaaatctcaaaagcgaaatcaaaaactagggtttgatgcaccaacaaccctggatgagagtcgtagacttgagaagacatgaaaggggtagagagacggaggaagaagaaagagaggatttgttcttctctgcaaattcgtaatgggtaatcatccgaatttggaggagagctaagttagagagatagatagagagagagacggacctttcggggattttgagaaaaggaaattagggttaggtttctgcttctgtcttttgtcggatagttttgaggaggagaacggagcttagcttagcgccgtgtttggatcttcttcgtctcctttttcgtcaaaggcgtcgtcgtatctttacaaatataaatctcggttcggttttgtattcactttggtttaattcggttattcaacaaaactatctcaaacagttgttgttactcctgtttggtctgaacggttattaaaaactcacgtgtctgtaggggttccatgtctcgggttcgaagcttgtctgaaattaattttaaaccttaaaaaaatctagagagagaccaaaaagccgacgattagtccaccgtgactccaccggtccctccaccgtgacttcaccggtccctcctccgattagttactcttcttcttcttcttcccccgtttccgatttgatttgtttctgaagttgctgatttatacatgtatcaggaaatggctttaagagacttttggtgatcaaagggcatgactttcacagattttccagcaaaagtcgtcaaatgtccaagactcattttctccactgttgttgttgataagagtctgaaacaacaaggttcgtattggattcctcaataatataatataataaattatgttgattgattttctttcttcgaatcctgagctgttttttcacataaaaattgataagcttttgacttattattgaaaatcatgtaggtcacgacgacgatgagctgctgctgatgtgagagagacctttgtttttattcgtcttaccaaaccataaagaaagaagagagaaaactagaggaagaagaagaagaagaaaggagacaaaacaatg

SEQ ID NO: 22705 - DNA, 3003 bp, Unknown
  misc_feature (1)..( 3003): 2750-1469P.txt file - cDNA_ID_2109223; gDNA_ID_2926198; Annot_ID_201649
gcgtcttctattccttgcacaccgtccggatgaatatcaaggtgtagcaagagatacggctgtacagtagccgaagctttagttcctgtaccataaatgacatatgagaaaattctatcatgaaagaaatttagaatgattacaaaaaatacaaataccttttgccttcactacgcttttaagctgcccgccaaatatctcactaagctcagacggaacaaaactttgtgttcttgtcacagctgatttgtttttgggtccaactgtttcccattcatcaccatcatcgttggcagaagaaataaccgatgacttagaagcggtgactttgggggactgttccttgagtttcaacaactcatcatgcatttggtccattataaaactcaaaaactcttgagcatcttcctgcctgccagtacatgcacacaaagttagaatagggacatacatatgaactatttaaaacagaggaaccatcaaaatttagactgtgtaagggagtcactaaccttggcctaccagacatgttgttgagtacatctggggtaaaatttctaaggactccttcgaacatggcaggtctaaaaggtctaccagcctcaacaacagtaacgttatttctgatgctggaactgcttggcacatccaattcggagatgaactcggaaaatgcagctaaggttggagagtcagcctgataaaaaagaaaatggaagaatatcgataagaaaacaaatattataggaaatagaaccaaaatcacaaaaggaacaatgtacgttaaaaacctttggaatatcttggagttgaattttctggaggagctgcacaaaaggagaacatgaaagcaacgcttgtagtgttgcattcaggaagcacaagtttccagcgtttattaatcctcttggtgtaaagtctttaacaggtggaacagattcagtaggaaccttcaggtttttctttctttgaatgcttccagacgaagagtcacttgagaaatcttcattgtccagcgcttgaaatttagagctcgaagctttatacacaggatcactttcaccatcagacatagacaagttatccaaaccaataggatctgttttcaccgccacaccattgttgagagatttgttgctttcagagatctcttttatgattccattttgtaccacatgctctggaactctcaaagagttctttcttgggagttttgcatcactatcattgttcttatccgagctggcaggtctagaagcatcaagtctctcttgagacccagcagatttaactgtcccatcagcctcacctttcttcaactcgccattagtatttactgaagaattttccgcagcaagattcaaggagccaaattgaatacttcccacacacttgtctttagaattctgaggatccttagtgggtttctgctcaaaaaatgacctagtttcatgttctgtaaaggatccaaacacaaatacctgccatgaataaaagtagaatagcaaatgtaagtttcaaaggagaatcatttacagaacaattaagaaaccaaatgataatgaaagttaagtctctcggatatacattgacctcagagaaaaactacaaaatgatcaaaacgaagctataaaaagatactatctccatgaaactaaaccacctaaaactagtctctattgcaattgggtgacctctgcatcgttctctagaccatgagaactaaaccttaagggaaacaaaataagtgaagaaactcaagaggcaaacaacaagtagtaggaaattaccttcttttcactcatatttggcacatagaacgcaacggagaagagattgaagagcagcacaacaacaacaagagcccaaaagacgtaatctgattcagagagagatccgaaacgaaagaagcatgagaaatctcaaaagcgaaatcaaaaactagggtttgatgcaccaacaaccctggatgagagtcgtagacttgagaagacatgaaaggggtagagagacggaggaagaagaaagagaggatttgttcttctctgcaaattcgtaatgggtaatcatccgaatttggaggagagctaagttagagagatagatagagagagagacggacctttcggggattttgagaaaaggaaattagggttaggtttctgcttctgtcttttgtcggatagttttgaggaggagaacggagcttagcttagcgccgtgtttggatcttcttcgtctcctttttcgtcaaaggcgtcgtcgtatctttacaaatataaatctcggttcggttttgtattcactttggtttaattcggttattcaacaaaactatctcaaacagttgttgttactcctgtttggtctgaacggttattaaaaactcacgtgtctgtaggggttccatgtctcgggttcgaagcttgtctgaaattaattttaaaccttaaaaaaatctagagagagaccaaaaagccgacgattagtccaccgtgactccaccggtccctccaccgtgacttcaccggtccctcctccgattagttactcttcttcttcttcttcccccgtttccgatttgatttgtttctgaagttgctgatttatacatgtatcaggaaatggctttaagagacttttggtgatcaaagggcatgactttcacagattttccagcaaaagtcgtcaaatgtccaagactcattttctccactgttgttgttgataagagtctgaaacaacaaggttcgtattggattcctcaataatataatataataaattatgttgattgattttctttcttcgaatcctgagctgttttttcacataaaaattgataagcttttgacttattattgaaaatcatgtaggtcacgacgacgatgagctgctgctgatgtgagagagacctttgtttttattcgtcttaccaaaccataaagaaagaagagagaaaactagaggaagaagaagaagaagaaaggagacaaaacaatg

SEQ ID NO: 22706 - DNA, 3003 bp, Unknown
  misc_feature (1)..( 3003): 2750-1469P.txt file - cDNA_ID_2109256; gDNA_ID_1972123; Annot_ID_179081
ggtacaacatgtttgattctgcttcctccataatgatcttcaggctacttgatctctttttgtttcgattttatcgccttcttgggataggtacaacgggaagacccaagggtgtgacgataagccacttggctttcataacacagtctctagctaagattgctattgctggctacggtgaggatgatgtacgctttttacctccacttatctgtttgtcctcaatgaaatctatagagctgaatacttccgtaagtaaatagtctcttaaatttctctgcaggtgtatttgcacacgtctccattagttcatatcggcggtctgtcatcagctatggccatgctaatggttggagcttgccatgttctgctgcccaagtttgatgccaaaacagctcttcaagttatggaacaaaaccatataacttgcttcatcaccgtcccagctatgatggctgatcttattcgtgtcaacaggtaaaagtccttgcttgaagtaaatttcggtctgtaaaccgttggttggctgaaatacttttactcaaaggacaacgaaaaatggagctgaaaaccgcggtgtgagaaagatactaaacggaggtggatctttatcaagcgaactccttaaagaagctgtgaacatcttcccatgtgcgaggatactttcagcatatggtgagtcactctcatcaagcttctaaatcaaccgtttttgttaatgttttgactttgagatgttggttttaaagggatgacagaggcgtgctcttcgctgaccttcatgactctccatgatccaacacaagagtcttttaaggtgacttatcctttgcttaaccaaccaaagcaaggcacatgtgttggcaagcctgcccctcatatcgaactgatggttaaactcgacgaagattcatcgagggtcgggaaaattctaacgcgcggaccacacactatgcttagatattggggtcatcaagtagctcaagaaaatgttgaaacatcagaatccagaagcaatgaagcttggcttgacacaggtgatatcggggcctttgatgagtttggtaacttatggcttataggccggtccaatggccgaatcaagactggaggcgagaatgtttaccccgaagaggttaccttccaacacaagaaactgctcgatattaccctcaagtttttttatggattgaatttacgcaggtggaagctgttctagtagagcatccagggattgtttctgctgtggtgataggcgtcattgatactcgtcttggagagatggtcgttgcttgtgttcgtttacaggagaaatggatatggtctgatgttgaaaaccgtaaaggaagtttccaactgtcaagtgagacactcaaacatcattgcagaacacagaacctaaccgggtaaaatatctttgataatctagttacttaacgagtaaattgttgtatatatacttatcagtttgatgaaattcatgaaacttttgttggacaggtttaagataccgaagaggtttgtccgatgggagaagcagtttccgttgacaacaactgggaaagtgaaaagagatgaagttcgaagacaagttttgtctcatttccaaatcatgactagctctctctgatcattacaattttaaaccgttaaaacattctttatttgtttgatgatacaaatttttagttagttttagtttgatcattaaacccattattgccctttaatacagagacaactaaaccatacagatcaaaatcaacaatattttcgagccgatcatttttctctgtgatcaactaaaccaaacccattcttgtatcaagacttcaagccgatcattttcgaagctctctctcaaagaagtttccgattagtatctaactatctatggatttaatcttctatcatatcgttttcaagctttattttaactggatctctttggtaaaaaattgcgtgtttctcttggttgttgtaattgtaaattaattttaatataaatatggttgcacagaacaaaaaaagaacaataataaagtggattcaaacctaaatgtatattatttgatttttccaacgtgaaaagaatgcatgaccgtacaataatcaggaaccactaattttacctaccaaaactatatgtatatgttattactttactgatgggatgggatgggaccataaataattcatattacatttatgatcatcagcagagattgagactctcaaagcatcaccgtggtgataaatggaggtgtcttccctaattttttaatatttgattaaagacacacatgaagaaagataacaaaaatgtctataacaagacattaagggtttgaatggttacggcggacaaaacctccgatcataccactttttatttactattcatcaattataatccacagtggtctggaccaaaaaagataaaagaaaaccgcagcggcttatctgcggaccgcttttacatacaaataaacttggtccacaacggtttattgtctgcttcaaaaatgaagtagactaaaccgtagacaaattagaccgctttgtccgttacatccattcaaagagtaaagacatctttaaagacactcttgattgatcaagacttttgacctagaatctaaaaacgaagaagaagccaaataagatcgaaagagaggtaatttagacaccattaattgttcgcaatgtttataggaaacacttcattcttttatagagagagaaaattatagaaaaactaagcaagtacttgtaagtgtatatttaatctctaagtttaatctcttaattagatttgttttcaagcttagtttaatctctaagtttggtaagcgttcttcaagtggtacctaccactgtccagagcaattaaattcactggccatagctctttactacttacttgctctattccgtattcttatttaatgaccctctttgcttctgcttccttcttatcattcactcacgacactaaccatg

SEQ ID NO: 22707 - DNA, 3003 bp, Unknown
  misc_feature (1)..( 3003): 2750-1469P.txt file - cDNA_ID_2109274; gDNA_ID_1972137; Annot_ID_179164
tgtgttctcatgacgtacgaaggcaagaaaaaatgagccccttgatcatacctgtaaaatactgtcaagttacatagcaattctagaaacatacttgagcaaactgtagatatcacctgtatgacggctacacaagaaagaatatctatatagccagagtaaggaaggaacaatataagtcctaattattggtgaaaagatctcataccctgtccagttctggggaggtattagcattggcaagtagggaatgaccatatgtctagcctgtttaaaacaaaggaaaattgtgagaaaggagtagggagatctatagtggtaaaagattgttatgacccaaacattacaaaggtacaggataaaagatcagtaaaaacatagtccacgattctgcttactgatttgtcaaggccctttaggaccaaaggatcgcattcgatgcaaccatatctcctgctcgtttttctgaagaagaatacaatagaatgtaaataaacagcagatacaaggagagggagagacagagacagatacatgtgaatgagcataaacagaaattcaagactcttacgtattttctaatgtgacagttctgaaattttgcttaaaagcaggtcggatgtcaggtggaccatcatcaaactgttcagctggaggttgtatatatgcattttccatcagcagctgaatcaaacgtgcgccgacctagaagcacaagagtcaatattattaaatcacagagacgagaaaaaaaaagagaaggaaaataagaactattataaagctctgtgcattgacaagggtggaagtataaacaaaccttcacttgagcctcttgaccccatggcttgaatgagtcatgtttcctcactaatgcttttacttgcctcaacttatttttttccatcagtacagtaacttgtttcctcgccttttccgtttctttggccacaatttcttctgaaacattctcagcttctgtattgatcgtcttgtcagttgcattttttttattctttttctgcaaaaaactgttgatcctgacctgatccagtaacaaaatacacaaaccatcaaaccaatatacacttcataccccatggggacaaggcaatatgtatcaatgacacattcctagattcacacatcatgaaatagcatcaaaagcaacaagagaaattaaaacccacctcctgctcaacagcttccccgatctgagtagcagcattcactagcttaacaatgccaacgccttccgcattagtcatcaacaatcccatcatcttatgcatagtgataacagccatcttatcagccggtaactgctccataaaaggcgcatacggaatcttccctttcttgattttaaaagtatcaagatcatcttgaatagcattacgcacaggctcaaaccagcctagaaacaaagacttcatataaggtaaattcggtgcaagcttctgctcacacatatcagctagaatctctctacactctctcgctgctctttcccattcttcagtctccattttcacctgtctctgcttcagcatatagaacttctgtgctcccattcccgcaatgactctctttggcggtatagctgcaagcctagcttttttacggattctctcagtttctttctccatttccgttatcaattcattaacttcatcagacccagaagactcatcttcaggatcagtcgaatcaatagcttgcgcagctgtagcatacccttcaaacacataacattgaccatgacgaaacgagcttaatccacccatttcgttgactggatttatagataaaccatttctaacgccactgagattaacagaagacagaatcccacggactctattcactggataatgagtaccggaggagctagaatcagataaaaacttaacctttctcaatgaagctcttcccagaatgttcctccacattttttgaatcgtttttgtgatcgccacgaaatggtaatagtggctgcttcagatagtttactgcctccacgagcacaatctcgggctatgtagctacttgattttgtagagttattaatacaaacatagaaatcaaagagttcagattcgaagaacagattaaaaacaagacttgggtgaagagaagagagatctggagaaaagagaaggcgccgtgaagtacaaacacagccgccgaaataaacccttcataaaacctttggtttctgcttcacatttcatggatcttgtcaaacccgacccgcttatcagatccgttacgctcttatttgggctcaaagcccatattctggcacgagttatacattaccatgataaatatatacctaattaacattacaacaacaaatcagagtggcgcagcggaagcgtggtgggcccataacccacaggtcccaggatcgaaacctggctctgatagtattgttactcttttttttttttttgtaacttttgggcttagcccatgtctgataaattcgaataaggtatagtattgttttggaaacataggcatatgttacttctttttttcctttgtaaagtttgggtttggcccaagtctgataattccattcggccctttatagtattgttttggaaacatagccatatgtcaccgttcgattagaaacaaacatagtacgtgaaaattaacagatcagaaagagaccacgtgcatcacgtgaccaccttaaatctgataggttagaatctcgtcttatcacgtgaatcccacgtgtcatcacaagctacggttcatttagaggcctaaccgggtaatcacatcaagtcgtacacgtctccaaatcacgaaactgacggacaaaagctcaagtaaactcacgtagtctctcccacagctaactagaactcagccgagtcacgaggcacccaaaaaacaaaaaacaaataagcaacaaaaaagagctcgtcgacggcaaaagttgaaaataaaacaataaacagtcgaaattctccggcgaagatg

SEQ ID NO: 22708 - DNA, 3003 bp, Unknown
  misc_feature (1)..( 3003): 2750-1469P.txt file - cDNA_ID_2109309; gDNA_ID_1620368; Annot_ID_154919
cttgacgaaaaacccatgtcgcctcttccgttctcccagctttagccagaatggtgatagcggtttcccgaggaatattatccgggagctttaactcgtgaagcagacgtttagcatgacccattagaccaactctttcataagccacaatcatggtttgatacagaacttgatcgatttccacaccagagctcctcagcttctgaaacagtgtcgcagctcggtccaatttcccagcttttccccatattgatataatagttgagtaggtaatggcattaggttcaattcctcggctctgcatctcttgaacaagattcgtggccttttcgtgctccatagttttcccatagatcttaatcatcgtattgtaagtaacaacgttctgttcaatgtctttcctctgcatcaacctgaaaagatgaatcgcttcaccgaaaagctcagcctcaccgtaaacacgaaggatagtattgtagctaacaacattaggttcaatatccattttcctcaaactccaaaacaacctatcagcttctttaaccatgtcaagctgaccataaacatcaatcattatattacaagtcgtgagatccaacgcacaattcacctctttcatctctgcgaaaaccgataaagcttctaaaaacttgtgattctctacataaacactcaaaagagtagagtaactaactgtatttggtaagacaccagcttcattcatctcctttataagcaaccgcgcctctctaaacaatttggcctttccataaacattgatcatcgaattatacgcaacaagatcaggcgtaataccagacctcttcaacctcgagaaaatcgagatagccttagagtaatcacacagcctcctagaaagctcaatgaggttgctatacaaaacaaggtcaccagaaacacggtcttgttccatcttttgaagccaagacaaagcagaatcaaacataccctctttaccaaacgaggtaattagcgttgaataagtatacctatcaggggcaagagctctctgacgcatttcgtcgaacagtccgtgtgcaatatcaaactgcttagctctcaacacatttcgaagaacaacattgtaggcgaacacagaaggtgtgtatttggcttcctcatgaacccaatcgagcaatgccaatgatctctgccaatcattttctcgagaaagaagagagaccatgaaccgtatagataattgtctgtctttgtaagttgaaagcaaagaaaaaagctctttttcgttctgggtctggtgaattgaagctaaaagctcgtccatatcgacgttgtggtcgagaaaagcagatctttgatacctccgatgtttccttaaggcctgaaacgacgacgtagtgttcttctccggttgttttctccatacctttttgttttgtgtggattctgaagaagaagaagcagagactgtgaagatgagattgcgttgtctagcttcaggaatggtggagaagggtatcgaagtgtagatatgaggtctggttaagggtaataatggaagagaaagtgaagaagatgaagcaatttctatgtacatcttacacaaaggatttttttaaaaacaaaagtacgttaaattttagtttccagcctcatcgacagtctatttataagtaatatatcagagttgagagtcagcaaaatttaagctcatctctatctctcaaaagcaaagtaaagcttaaccaatggagataaggtattttcatatccgtagttacgtacaattcgtaaaatgtgttttcgtacctaaatatatttgtagagtaaactataacccaaaccaaaaaaatatttaaatttcatatctaaaatttgtgcaaaaacaagagtcaaattaattagtgttagccaacattgttacagtgctaagttaagcgaacacatatatgatgatatgtctttaaaagatatgtagactcgaacctgtaagttatagcttttaaataagtatctaataccgatttatccgacaaccttctccgggttatacacaataaaacaaatttataaatcttaaatatctggtatcaattatcagttcttatttacggaccaaatttcacgctaaaatgaaaatctactattgataaattcgtggaaaagatcaaatcagaagttaagaacaatgacaagactcatttagattcactgctttatgtattttgttagctatgtcttttgaaatcgaaatggaagaagagtctattgagaagatgtatcaaatgatggcggaaattttaattgttgttgatcctacatcaaaatcctagaatttgattattttttccaattcacaacgacattcttttgttaatctgaaaacacaacacacttaaggtatataaactaaaacgtttgggtaaatctcgatgaagattatgagataaaaatggttatgtacctcctttaaaagcaaagatctaaaaccaacatttactctaataaaaattcagataataattgtaaaagtaacagaatgtactttcctaacatgtatacaaccggatatccatcattgtctgaaatggacacacaccctcgaaagtctaaattagttatcactggttacttctctatttgtgtctaacgaataaagtccttggttgacttattatgtgttccaagtttatgggctttatagtggcccatcacatagattccagatttcattttatttcctacctactaagatctgatctggttttaatgctcttgaccagtagtaatctttctcttttcgttatttccttcttcttcagttcctccttcttcaatctctctattctcttactaacgttatttcttcaatctcattgatcaaaaaaaaccaaaaccctaatctgcaaaaatctcaatttcctccaaaagtttcagtttttaaaaatgggttttcttcttttgtaacgaaaaaatgtgtcaaactttgaattgaccatttttttttataaggattcgatg

SEQ ID NO: 22709 - DNA, 3000 bp, Unknown; identical to SEQ ID NO: 5418
  misc_feature (1)..( 3000): 2750-1469P.txt file - cDNA_ID_2109337; gDNA_ID_1620786; Annot_ID_168152

SEQ ID NO: 22710 - DNA, 3003 bp, Unknown
  misc_feature (1)..( 3003): 2750-1469P.txt file - cDNA_ID_2109345; gDNA_ID_1620712; Annot_ID_49040
gtctttatataaatgtttataaacttggctgaggcaggatcaaaggcacaagttttgaagtagtagtggaaaatgaagagctggtagaaatttccttctcaaggaaatgggattcttctctccaagacagtattgctcctattaatgttgacaagaggtatgtcattttaatacaacatgcatttatgtgtgagtgtgacagagagtttgatttggatattgtatcattcaggttcataatgcgtaaagatgtaactggattctactcatatgcgatatttgagcatctagcggaatggccagcttttaacttgcctcagacaaggattgtctacaagcttcgtaaagacaagtaactaaagttcaatatcaatctttcccttaaaaccaatattagtatatactcatgtggaaagaaaacttgcaggtttaaatatatggcgattgctgataacaggcagaggaaaatgccacttccagaggatagattggggaaaagaggaagacctttggcttatcctgaagctgttcttcttgttcatcctgttgaagacgagtttaaaggagaggttgatgacaagtatgagtattcaagtgagaacaaagatctgaaagtgcatggatggatctcacataacttggatttgggttgctggcaaatcattcctagcaatgagttcagatcaggtggcttgtccaaacagaaccttacttctcatgttggtcccatcagtcttgctgtatgtttcttttctctcttcctccttgaaacatgttctcttatctatgatgatgggttcttacttaatgattgtgtaaacacagatgtttttgagtgctcactacgcgggtgaggatatggtgatgaaggtgaaagcaggggactcatggaagaaagtgtttggtcctgtctttacttacctcaattgcttgcctgacaaaacctctgaccctctttcgctatggcaagacgctaaaaaccaggtttatccattaaccaaccttctaccttttgtgcatattataaaaaacttatctaacattgtaggaagtggtgtttgattagatgttaactgaagtccaaagctggccttacgatttccctgcttcagaagactttccagtgtccgataagcgcggttgcatcagcggtagattactagtatgcgacaagtaagcctcacattccaccatttgctctgcttttcttcgttttactatcattcactcaccgttgttttcttatgtttttttgttaaaattccttcagatttcttagtgatgattttttaccagcaaatggtgctttcgtagggttggctccaccaggagaggttggatcctggcaattagaatctaaggtcagccatgcaaattatactcttagaccatataagaatatacatgtaaacaatgaacttatgcttgcatgaatttaacttatatacatagggatatcaattctggacagaagcagattctgatggttatttcgcgataaatgatatccgagaaggcgagtataatctcaatggttatgtgacaggatggataggagactatcaatacgaacaattgattaacattactgcaggttatattttctttaacttacaatgtaatcaagatttatattaggctgtatcaagaagtgcaagttaacttaacattagctacactctgcacacaaaaaccaggctgcgacattgacgttggcaatatcgtgtatgaaccgccccgagatgggccaacagtgtgggaaatagggatacctgaccggtctgcagctgagttctttgttccagacccaaatcccaaatacatcaacaaactatatattggtcatcctgataggtatgtccatgatcaaagatatcacaacattaaggtttcagattgttaaaacagtagagagctaaagtatggttgtacgtaagcaggtttaggcaatacgggctatgggaaagatacacagaactatatcctaaggaagatttggtgttcaccattggcgtcagtgattacaaaaaagattggttctttgcacacgttaccaggtaacaaatatttcacattttctaagaagagtaaaacaaagaagcctcacatttattttaaatgatgataggaaaatgggagatgatacatatcagaaaacaacatggcaaatcaagttcaagctagagaatgtacagaaaagttgcacatacaaaatccggatcgcgctagcaactgcaaatgtagcagaattacaggtgaggatgaatgatgatgacacagaaaagactactcctatattcacaacgggtgtaatcgggcacgataacgcgattgcaagacatgggatacatggaatctataggctttataatgtggatgtaccaagtgagaagcttgtggaaggagacaacactttgttcttgacacaaaccatgaccaccactggagcctttaatggtctcatgtatgactatatccgcctcgaaggacctcctttagattcatactctcactaggacttttagtcacattattgtatacgcaattttgtattgcgggttactttactaataaaaaaaaagacattatatgggccttgtgttgggccttctttctaatctcagatttgactttattacaaacgaaagggtaagaatgtaatttttcgccgactcgatctatcgctgcctatatatacagttacctgcaaaatctagggtataaaagcccctaattttttctccgcccaagagacaaaaatccttcgcaatcgagcaacggaagctcctgcatccaccgtccaaatctcttctaacgtcgccggagatcggtaaaccggttcttcatcccgtattcatctcttattgaggtcttagattcatctagcaccttttttttggcgtcgaaactttcagattccctatttgtaattagttgcgaattttgattcgacgatttgttgctcgaatttgaatcaacagatcgttggggaagtagagaatg

SEQ ID NO: 22711 - DNA, 3003 bp, Unknown; identical to SEQ ID NO: 22710
  misc_feature (1)..( 3003): 2750-1469P.txt file - cDNA_ID_2109345; gDNA_ID_2926185; Annot_ID_140754

SEQ ID NO: 22712 - DNA, 3000 bp, Unknown; identical to SEQ ID NO: 9599
  misc_feature (1)..( 3000): 2750-1469P.txt file - cDNA_ID_2109463; gDNA_ID_1972159; Annot_ID_179550

SEQ ID NO: 22713 - DNA, 3003 bp, Unknown
  misc_feature (1)..( 3003): 2750-1469P.txt file - cDNA_ID_2109489; gDNA_ID_1620362; Annot_ID_154675
atgtaagagattgtctgatatgaacagaagactagtgacgatggaaggaacttagccttacaaagcttgctcatgtgtttctaaagtaaaaacttttatttattgacttatatagattattttcatattattctattgttacaagttacaatgtaaaaatggcctttcatatattaaattatataatcgtggttgattgggcgtatgcggatcgagaactttagaattcaagttaaagcaagtgtccattagaggcaggatgtatatagcttcaatttgctttatttagaaatatataaattagtggttcgtggttttcacgacaaataaaatcaataagtaattttcttttaatcaaaatcacgcctttgcgtctccttgcatctcgcctgaatcatctcagaccgtcccatgaggcaaagcgatggattccgtcatggtttgtcacgcatatgcagtttttattttagtttatatttttttggtaaaaagttaaatttatatcatttttgaaatttacatacagagaacataaaaaaaaaaaccaccaaaaactacaatacaacacaaacaagaaaaacataaacgaaaactcgattagcggagatccatgaaaaaacaccgattctgaaccgtaaagttcagccatttgcatggtttcctttggtcgaaagagttagaatcctcatctttattttctatttttgttatatgttgtcattataatttgaagtttttttaaaaaaaccgatatatatagaacactctgattaacatggtatcaataaaaaaataacatgaaagttagcattggtaagtgctaacctataataatgaattcaaatgatcaccacatgtaaaatcaaccatattccaaagatagttctctcacacctggtaacatattacaaatgcattactacattattagtacgagaggctgtctaaaattaatatgttttgattacgtatatcacacataatttatttttactcttatgttgtgaacgcgtaagcgaataagcatgtgcatgtacatgcacaaaattaattactgaaatgagaaggaaaaaagaacacctctccccaagaaaagatcgatcgcttgaaaccttacttaacctttttcaccacatttcacgcgtcaactcgtctcgatcacaactataaaccctaagtccaccctctcctcaattcttcacagctcaatctctctctctctctcccaaattctcttcctagctctctacattcacataatttaaacaagaagaagaagaagaaggagacaaagaaaggaagaagaacaatatatctcgctgtaactcactaacacattcatagatcaagagaaaatggcccatttcatgaagctactcgtgacaattgcattaacaaccgtggtcacaatcgccatcgtcaccaccaaaaccaccaccaagaccgcaacatttgctctcgaagaccctttcaaggaccttacaccaccaggaacgatcaagatcagaccaagtcggttcttggcagaaaaagtcgacaagggtaaagaaccaaaagcccgtaacccaaacgcagctgaccattgcaacaaggacaatgaaatctgtagcagcagcgattacagcacaggagcaaacgctacaatggcttgttgcaacaacaagtgtatggatttatcaaccgacgacaaaaactgcggtttatgtaagaacaaatgcaagttcgggcaaacgtgttgtcgtggtcagtgcgtttacgtggcctacgataaacgccattgcggtgagtgtaaccatcgttgcgatctcggcgagttctgcgtctacggtctctgtaactacgcgtgatgaatcaatcattcattcacgccaacgtaaaaaaaaaaaaaaaaaaaaaatttaactaaaattatacggatgatttatttacatggacgctgattaaaaaaggtcggtccaattaattatttacttaataattaattaaagtgttgtgtgtatttttggattcccataatgttttgaggggtatataaaggagattattttttctattttcaatgtctacgaataaaatggaacatcctcgttccaatatatactgctgttttattactaaggtttataattggagtgtataaaaacactccaaaataatatcatgaataatgtttttatacgtataatacataaaataaaatctctttcctcatagctggtcctctgattactatcaaacatatgattcaattgcaaatttgcaattattaatgcaagaagaatgagtggaacattaaagttagatcaaaaactcttcattacaaacataaataaattcattttggtgctttctaaattaatttattgatcattttttggtatgtagctaggggttaactcatcaggaagaacattacctagatgatgtcattgtcaaagtcaataggttgacttatccgatggatactaatccaacgggtcaaaaagtgccaaatcgggtcaaaatcaaaaacctcaaagatgacccgtgaacacttgtttttatcttcctcacaaaatccacacgtccaaatcacaacctcaaaatctcacacatcaaacacgtgaatttgctctctttctggttcactcacctaccattactataagtctgaaagagtgattgaaacccacctcgaaaaatctatccttttttttgttttccttctccggcgaatccccggggagattggtaatcggtaatcacggctatttacgggataaagccacggcctttgagctttcatgtccaacgaaagggttgtttaatcataactaatcctttgcctcacggaggacgtggagctctgccgtctgaaggcggcagtccctccgatctcctcttcctcgccggaggcggttccacaaatagccactaaccctaaccctttttctaattaggtttttagttcttagagtcctgtattaatctgttatttcgagattataatatttgtgagcaatg

SEQ ID NO: 22714 - DNA, 3003 bp, Unknown
  misc_feature (1)..( 3003): 2750-1469P.txt file - cDNA_ID_2109499; gDNA_ID_1971906; Annot_ID_176987
tggttaatatatgtttcatgtaaataaataaagaacaaaaaaagcattatttaaactaattagataaattcagataagattctacgattatgaaaatgcgaaaagcagatataaataattcgatgccaattttgaatttatagatcactacactcatgcattcttgttatgttaagttgcattactccaaaactaccaatatcttctggagtaaccaaatagaaggagggaattttaaaacaagctatattcacacagcctcggatgtggtgcctgaacatattggattggttttgataatatttcaattattttcaattcaaataataataataaaactgaaaataataaaatccagtttcattgaatatttgggtattcctagtactaaattagttaaatcaataaaaatatatttgaaaattttaaatccgaaaatttaaaaggtaaaaaaattattttatttacttaaaaaccttgcaaacgaaaatattttgtatataaaaaaaatagtttacataataaaaatatttgcaaaaaacaatataatttagtcttagtgttaaatttacttgagtgaaaaacagttaaactttatatacctcaattagataagctattaaatctatacctcaatttttttattttattttttggttcaacgctatatcctacctaattagattggctaaattgtataagctagtgcaaaaagttcatataagaacaaaaaactgtaaaaggaaagaaatctacaatttcatgtaaaaaatccaacttattaattaacaaattttgaaaaggaaataaagtaaataataatggttatggattcaccttatctaattataaatacatctttatatgctctatcctctatgagtgtactatagagagtagagagagtagaaaaaatgggttcctccatattattggttttgtttactctcatggttatgctgtccatttcttatgaaccactcaaatgtaattatcttgaattttttttgtttgcttttcttcttgtgctatggttttgaatattcataattgcgttgtagggatgggcataaacgcgagccatgtaccggaaacttgctaccatcattgtaaccagacgttcgagagtagtcgccaatgctttaaatggtgtcaagaattagctcgtaaagatggtaatcatactcatttatatactaattaatgggatggaataaagaagttttgatgggtttcttaattctcctccttcttcatcgtattacatgatgaaatatgtaaaattgcagagtacaagatttatgggtacccttactcaaccaacacaaggcgtgtcctcgccgttcttcatgagaaaggtctctcttacgatcccatcaccgtcaacttgatagccggtgaccagaagaagccgagttttctcgctatcaatgtacttttcacatctaaatatctaactctgcttcatgattaatggttaggtcttaactagggtttccattttattggtctcttcttattgatgcagccatttggtcaagtcccagttttcctagacgggggtcttaagttgactggtgagtttaaaactacattttcaactaattaatgatctaatgaattttgatataatttgttttcgtcagaatctcgagctatatctgaatacatagcgactgtccataaatcaagaggcacacaacttctgaattacaaaagctacaaaacaatgggaacacaaagaatgtggatggctatcgaatcttttgagtttgatccactcacatcaacactgacctgggaacaatccatcaagcctatgtacggtctaaagacggactataaggttgtgaatgaaaccgaggcgaagctagagaaggttctagatatatacgaagaacgactcaaaaattctagcttcttggctagtaacagcttcacaatggctgatctttatcaccttcctaatatacaataccttatggacacacatacaaagagaatgtttgtaaaccggccaagcgtgcgccggtgggtggctgagatcacagctagaccggcttggaagagggcatgtgatgtgaaggcttggtaccataagaagaagaattaatcttataatcttgtgatgtactttcggtgatttctttaagtttgatgttatgaataaaaggcaaagcttttgcaaaaatcactcttttttttgccataatgatttcaaaattccaaagaataatatatacttcaatatacatgtcacaagattaaatgtcaaagttgtttataatgagcatttttgtggatgtggaaaatgtgaaaattactctgttcctttgaatgtttctatacgaaattatagttaggatttagtaatgtatttctccataattatgctaaatttagttagttacttcaatatgattaaatactttattgaccccaaatttgtaattgtaccagattgtcaaaagtgtgaaaccaaattttcttttcttttgatattgttttgtttcttattatctctcgttctatcgaatgatctaactcgagcatccaacgatctaactcgagcatctaacgatccacgtggacccaacaacgtcggtcagagtttgactagtagatgaaggactattcttgtggtcgttgtcacgcggtggctgatattttctcttatttttattttattttaactattttttacgttatatttaagtcttgaaccaatagaaacgacgaatcatacattactcagcttgactttgaaataatcctataacaaaagagcattccaagaattttatccaaaaaacaaaataaaaaagagtattcaagcttggtggcgccgtttgtttttggtttattcactaaagttactctgttttagttgtataaatacacactcccatttgtgtatttcttttcatcaatcacaaagatctctctacttcaataaatctccaccttactttaagaacaagaaaaacacagtattaacaaatg

SEQ ID NO: 22715 - DNA, 3003 bp, Unknown
  misc_feature (1)..( 3003): 2750-1469P.txt file - cDNA_ID_2109534; gDNA_ID_1971984; Annot_ID_58739
attgaacgaagacacttaagctacaaacttacaaagtaactgaaattgttaagctctggatttattacacgattaaaagaaaacaaaactagaagcagcaacgtacacgatactacttttatattttctgtcacttgtcaatttccttacactcccattcgagtatttttttgtgtggataatatatttatttttgttaacgtgaaactaaaaatttaatactagatttataacaaattacacgatagctagctaatcaaaactcacaactagtaaaaaaaaataaaaataataataataataataataataataataataataataataatgagagttaaattgttcatttttcattttaaaaaagatacgcttatacgaaacagagtgtgcataaggctatatacatcggttgattgaataaatattgtatattttaattgaattcagataaagtattaaattttaatttaaaaaaataaaatcaaccatttctggaaaaacacatggtcagaaacgtctatcagagtttttgaaaatatggacgattctgacttttctctattctttttaattactttgtattattttaataataagtatcttactgatgaaggtgccctaaacacatcgaacagttctgaaaaccattatcggtcggctgccaacaaaaacgttaagtaatttatagattatagacctacgacataatgtttgtttagcttgtttttttaccgtgttcgtatatatgcgtatttctcttcttcttttaaatgtttttttcgatttttgtttgatgatgacaccacaactcgttgcgtggaccaaaataaacaagtgtacagagatatctacatcaaagtcatgcgatattagatcaatggtctagaaaatatcaattaaaaaagtttccaaacatcatagtactacttgacgtttaactatcaaacgaatccaaatctagatagctccgtaaaaaagaaagaaaaaaaacgttctctcgtttctttctattattcaaaatattttcaccaactaaaaaaagatacatcgaaacaaatctctctaatcatatctaagttataacttttctttataaacaataaacaatagctttgatttgaagcaagaggagcaacaatggagatcaccactatcatattcctcatcatatcctctctcaccttctccatcttccttaaactcatcttcttcttctcaactcacaaactcccaccgggaccacctcgttttccggtcatcggaaacatcatctggcttaagaaaaacaacttctccgatttccaaggcgttctccgtgacttagcctcccgtcacggaccaatcataacactccacgtaggctccaaaccttccatctgggtcacagacagatcactcgctcaccaagcccttgtccaaaacggtgccgttttctccgaccgttctctcgctctccctaccaccaaagtcatcaccagcaaccaacacgacatccactcctccgtctatggctctctctggagaaccctccgccgcaacctcacctccgaaatcctccagccctcgcgcgtgaaagcacacgcgccgtcgaggaaatggtctctcgagattctcgtggatctgttcgagacagagcagagagagaaaggacatatctccgacgctttagatcatttacgtcacgctatgttttatttgttggctctgatgtgtttcggagagaaactgagaaaagaagagatcagagagatcgaagaagctcagtaccaaatgctcataagctacaccaagttcagcgtcctcaacatcttcccaagcgtaaccaagttcttgctccggcgaaaatggaaagagtttttagaactaaggaaatctcaagagagcgttatacttcgatacgtgaacgcaagaagcaaagaaaccaccggagatgttctctgttacgtcgatacgctgctgaatcttgagatcccgacggaggagaaagaaggagggaagaagaggaaactgagtgactcggagatcgtgagtctgtgttcggagtttcttaacgcagctacggatccaacggcgacgtcgatgcagtggatcatggcgatcatggtgaagtatccagagatacagaggaaagtatacgaggaaatgaagactgtgttcgccggagaagaagaagaaagagaagagatcagagaagaggatttggggaagttgagttacctcaaagctgtgatcttggagtgtctaagaagacaccctcctggtcattacttgtcttaccataaggtcacacacgacaccgttttgggtggatttctcattccgcgccaaggtaaacattattcttttacatatatagcccatagtaaatttaccaaataatccgtaaccataaagttatagccccactaagtccaatcatttttgtatttgattatgtgtcggattaggtactataaactttatggtaggagaaatgggccgggacccaaaaatatgggaagatcctctaacgttcaagccagaaagatttctagagaacggagaagcatgtgattttgatatgacgggaactcgcgagattaaaatgatgccgtttggagcgggacgacggatgtgtcccggctacgcgctttcgttgcttcacctggaatattatgtggccaatttggtttggaaattcgagtggaaatgtgtggaaggtgaagaagttgatctatccgagaagcaacagttcatcacaatggtcatgaaaaaccctttcaaagcaaatatttatccaaggagaaagtgatatttgcttttgtcatattatcaaaaaggcccattgggcttatttgtcgtatgtatattaaaaactttgtctcatatgtattaaaacaatttgggcctttaatgggtttcaatataaagatgtcaacacttttagttttcctttccatctttcatggcggagaagtagaacaattgcaaacagaaagaaaccctaaaatttcgaaaatg

SEQ ID NO: 22716 - DNA, 3003 bp, Unknown; identical to SEQ ID NO: 22715
  misc_feature (1)..( 3003): 2750-1469P.txt file - cDNA_ID_2109534; gDNA_ID_1971984; Annot_ID_177684

SEQ ID NO: 22717 - DNA, 3000 bp, Unknown; identical to SEQ ID NO: 5951
  misc_feature (1)..( 3000): 2750-1469P.txt file - cDNA_ID_2109538; gDNA_ID_1620834; Annot_ID_57939

SEQ ID NO: 22718 - DNA, 3000 bp, Unknown; identical to SEQ ID NO: 5961
  misc_feature (1)..( 3000): 2750-1469P.txt file - cDNA_ID_2109538; gDNA_ID_1620834; Annot_ID_169802

SEQ ID NO: 22719 - DNA, 3000 bp, Unknown; identical to SEQ ID NO: 8927
  misc_feature (1)..( 3000): 2750-1469P.txt file - cDNA_ID_2109542; gDNA_ID_1971923; Annot_ID_58561

SEQ ID NO: 22720 - DNA, 3003 bp, Unknown
  misc_feature (1)..( 3003): 2750-1469P.txt file - cDNA_ID_2109585; gDNA_ID_1971868; Annot_ID_176525
tgatacattctctatccaggaccccaacagggtgtattctgggagcatcaatgctgcctgaaacgactgcaacatgagaaagttcatgcttgttcatgattgtttgggcagcgagaagatccatatcaggtgtaacagtccatggcactttacattttcctccactcctcgaacagatgtcattaacaaaaatatcctaagccaaagaaatgcttcaattaatgatcaaagaaatagttatttcagactattcaatttcgtaccttgggtctattatttccttcttttcttgctttgctgaattcctgaatgtctgaaagtgtaagtataccgagaaagatattgtcaggatcaacaatcaaggcgcaggattgtttctctatcagcatacgagttaatgcctcttccaaagaagtgctcatcataactgtcgcaaatcttgttcgcatggcttctgaaacaaaaatactcttcggcagctcctcagattggttgagagaatcatcaaggcaaagagaactttcaacttcacaaaggttattcgttgatgattcatcatcagatgacgtcagagactgtacagcttcttggctctttcttttcctagtttcttttgtttctctagtttcttgtctctttgattgtccagatgtaatccatgaagacatgcctacagctcccagtagaggtaacactatacgataatcctgtgtaagttcaaatagcagtagtactgctgtaagaggaacttgacaaacccccgcaagtgtagcagccattccaacctgttaaacaatgagacaaacaggatcattggcaatgaagctacaaaaaaactagcatccattctcagttaacccgaaaaaatattctgttcaaagtattgataggtaaccaatcaagaaagtctgaaattaagacaattttgaaacattgaccacataagaacagtaccagaccataagcttgtggagatgccacttccaagatagagagattgaaatcagggttctgagccaaagcaagtccaataaactttccataggccattcctgctgccccgccaataaagagagaaggagcatagtatccaccgacaagtccagaagcccgacaccatgcggttgcagctatcttgaccgctaccagctgaagcaaaagatcagctgaaagacccttcacaaatggacgtttctccaacaaaatatccacattctgaaaaccccagtataatacttcagggtataccaaagctatgataccaacacttaatccacccattacaggaaatacagcctttggtatcccagcatccttgttaagactgtcaacagcagatgtcatggatgatgtacatcgagataatgccaacgagaccaagccacacagagcgcccaataaaagatagagtggaagttctgaaaatcagtgaccagctctcataagtttggtttctggttcccttgcgtaaaaagcataagaatggcaatgcatattacctccaggagagcggaagtcatagtcaggaaccttaaacgcaggttcagagccgagaccgatttcggaaaccacagaagcagtaacagcactaagaataaccatagaagttgtgtttggaagtgaagttgatgaatcagttgatgaagaaggccacaaaacggattcaactgcaaagaagcatccagccacagctgcattgaaccctgtaacaacatataacaaagtcctcttaacgaatcaatcaagagttccatacgcaagagagaacaacattagcaaatatcagatgaacaaaccagaggaaatgccagcagctgagccagcggcaagaagtgagaagccagtctgaggacttttattgaacagagaattcacacctttagcgattgacgctccaatttcaacacttggaccttccggccccagcgaatttccagtcccaagcgtcacacatgcggcaacagtcttaaggaaaggacgcaacactgcctttacgcgatcgagactagaatgagaatctccagtagattttccagcagattctcgaagctgattgaggatgctcaccaccaaaccgccgatagtcggaacaaggataacacgcaaccaattggaaccgatcggtgcctctctaagccacgaagctccacgatcaggaatcccatcccaggaaaagtctcgaagcaagtgaacacagttgttgaatagaaccacactaactccagtgagaacaccaaccaaacaagccgacgctatcgcaagctcctgagacggctgctgatcaaatccaacctcatcctgatcagtctcctgcttcgccgccggtaaacgcgggaaaattctaccgccaatagcgacggaaccgaaaaacggtgaaaggacgacattgaactgaaaaggaacgtcggttttgtgaattggagcgaatctccgggaagagacgggagatcggagggcagcacagagtggaagcgtggctgccatgaacggctgcttccgtgaagtgacgcgtgtttatccattaacggataatttgatcttaaatcacaaatcttacgtggctgatcttattattcaaacgcatgggcttgggccttgaggtaaacaggtttatatgggccaataacaataaatttgattaaaaataaaaggcctcttagctttaggttcaaacttcaatggagaagcagtggctgttgtccctcgcagttgatcttcttctcaatccaaaatccagctgataaataaataatttttctcttgtcgtcatattaaaaaaaagaaagattatctgtatttcaagtttcatgagcgtttgccaccacaacattgtcttttcgggttaatttcttcttcttcttccttttcttactaaattctcttaggtagttgtcgattcgatttctttgtcttcctcttcgcttattttcgttgaatctcttgtttacaccttttcctgaaaacaaaattgtgttttttgtagggttttagtcatacttaatg

SEQ ID NO: 22721 - DNA, 3003 bp, Unknown; identical to SEQ ID NO: 22720
  misc_feature (1)..( 3003): 2750-1469P.txt file - cDNA_ID_2109585; gDNA_ID_2926209; Annot_ID_202476

SEQ ID NO: 22722 - DNA, 3000 bp, Unknown; identical to SEQ ID NO: 15439
  misc_feature (1)..( 3000): 2750-1469P.txt file - cDNA_ID_2110032; gDNA_ID_2926134; Annot_ID_197099

SEQ ID NO: 22723 - DNA, 3000 bp, Unknown; identical to SEQ ID NO: 15439
  misc_feature (1)..( 3000): 2750-1469P.txt file - cDNA_ID_2110032; gDNA_ID_2926134; Annot_ID_138847

SEQ ID NO: 22724 - DNA, 3003 bp, Unknown
  misc_feature (1)..( 3003): 2750-1469P.txt file - cDNA_ID_2110032; gDNA_ID_1972121; Annot_ID_178982
ttttagtatgatattgtcctctttgggtctacatgttcaagccctcaagaatttgttattgggttacttcccaaaatgcctcatactagttggagttggacttgacttatatattagaaactctttttcttaacttccgatgtgggacctttggtttatacccaacaatcaaaatacgaattagttacgaattataaagtataaaaacgtaattaaactcagatgaatgaaaatccccaaactcagctttcctcttacggaaataaacgaattttcatgtaactaccacattgctcgatgtttattttgatcgcgtacaagggaaaaaataaaaatttgaaaaatgggggatttgaagtatttttccaatcccttattttactcgtctaataaataagaaatgtttcgctttatcccttaaatgtttacataaatctattgatatttagtgatttgagtatcagcattcagcattattgataactaaagtgggaaaaatgctcataccaaattacaaatgtggtaaaataaagaatttgtgttcttgctctaccgaattaaagaaaataaaaattattattctttaaacaagagaattttgctgcataagaccaaggaaattgtgtccgcgtgtaagaattgttgatcttacgtggtttgtctccagtcgattttaaggttttgccttgatcctagtgtttcttgctctctccgattagttggtgaggtgtgttggtagttgtatttggtttttggtcgcgttggattcttgctttcctccctgtcggtttgctattggtttgtcgtcggtgtgaggtttctccggacttattggtgcttttggtatttacaggttctatagggatgctttgtgaaagtctctcatgcctttgttcaattctagtgcttagattgttttttctccattaattttgtatcttctttcgatttctgtctctatatttggttttaatcagttttgctatattttggagtttagtttccctcttttgggcaaatgtttcagggttattgtgagaaaaaacaaagaaacagtgattattttgacggagatcgagagagagttaggagaaatattaaaaacaatcggagaaagccgaaaagaacgacgagatattgttttctttttcctaaattattctttaagaaaaagggcgtgacggggacgatatcactgagcaatcaaaggggtgatttataaatctaagtgacggcgatttagttgtttgataagttctttgattgctgatttggaagattttcttttaaagttaatccacatggcaaaaatattattattagaagaagataaaatattcattaatttttatagattttctgatatttttagctaaaacaattctaaatttatataatatttacgagtttaaaaaaagcatttacatacataacttaattatcaaggaaaaatattaatagttagagatatcaatgttacaaagttatcagaacgcacaaaaatatacagaaagaaggtcaatatgataaatcaaattcagaaaacgtaataacaaaaaatatccaattaaaataactaaattaatatgaggttaggtagcaaacgtctaaattacaacacaagtaaatttttagccattatggattaatgactattgataaaaaaaaaagtaaaaaaaataagtagaatagaatgaaagtagtgcttggtacattattatgattttttatttagtgaatgttttcagaaaaatttatttaagagtaagattaatggagaatttaacacaacaatttttttttgacttttttttcaattagtttgctagttttttaatttaattaatgtagaatgacacatatcattatttttatgataatatgtcactcatatgagtgtttgacaattttcatatatataatttcaactaataataatttagattaaaaaaaaacaaggaattcaatgccaagaatatcatataaaatatataggaaaagtattaaatttggttgacttttcattttagtcacaaacttttattaatcaacccgatttagactcgtcataaaatattttgatgaaacgcattaacgaggttaactatgtgttacttattatcagttatctccataatcaatctgctgataaatcaacacaatttattttaaaaattttagtcaacaaaaatactgatttaaagtatctaaaggaaaagttaatgtcttttcaaccaaattatttgttaaaaaatacatattttctaaaataatatgttttgctaataaataaaaagcaatttaaaccgaccgaatgatatttacttttgtactaatttggtttctattttcatcataaaccaaattttaataaaaaaaaattttttaaaaaaaacctatgaaacaataacgccggattggaaatagtgtttttttttgggatttttttaaattaacaatttgctctaatttctttatttaaaaaacgcagaaaaaaataataagataaaaagaaaagtgagcacgtagttgtcatttgcagatattatcatttgccaattttcttgtaaattcacctctttccttcgtctatctatcctcccttccgcaacattgtaagaacaccaaatcccctctcatttccaattttttgtatatcttcttgtttcatatttagatcatccaatctctaagaatgttaaaggtcaaattttaaaatttttttgtcggtttttttttcctctccggtgtcggaatccgacaacgtaaggatgattcacataggtttttaatttttgatatgaaaagagattcttctcgtgattggcccatttgttttgttttcaacaatgttcacgttttgatcgcaaatttaatttgatttccatgataaaaattggaactttcttatgttgtgatcatttacaacaatttgtgcgtgatgggttgttctcaatgtaggattttgtttgatgatcgttgggttttgaaagaagagcaatg

SEQ ID NO: 22725 - DNA, 3000 bp, Unknown; identical to SEQ ID NO: 2574
  misc_feature (1)..( 3000): 2750-1469P.txt file - cDNA_ID_2113272; gDNA_ID_1620838; Annot_ID_169964

SEQ ID NO: 22726 - DNA, 3000 bp, Unknown; identical to SEQ ID NO: 2574
  misc_feature (1)..( 3000): 2750-1469P.txt file - cDNA_ID_2113272; gDNA_ID_1620559; Annot_ID_160544

SEQ ID NO: 22727 - DNA, 3003 bp, Unknown
  misc_feature (1)..( 3003): 2750-1469P.txt file - cDNA_ID_2113679; gDNA_ID_1620613; Annot_ID_161969
ctctccatgaagcagttcacattatctcagctaaattcctaactaaactacatatcatgtccaattataaggctacattccatgacacatgaaaatagagcagcaactatcatcaattaacatagtttcttactctttagttcttcttccatgagaagcttttgacactccagaaacttgtcgtccctgccagatctgtggatcaagattgttatagttacattagcaaggctccaacttctctaaataaaaaagaatgtctgggaaaatcaagacggtaaggtgaagtacatgcctgattgaaatgatttcattcctcaacttctcaaccatctccagagaactctgattttcacctctcaaatgttccatcaactcctctgaggctgcaaatagcaaaagagagaaaagacagacacactaagaacgtattcacagacttaaaaggtctcttgttataattctcgattccaagtgtttgtaattgcaatgtgaaatcaaacctaactagagatatctaaaattcaagtatggaacaaaggaactcaaactcaaagaacgaatctttcgaaattggtacctgaaacaaaggtaaggaatttctcttcttgttccttattaatctcatcgtattcggaatatttcttcttctgaaaaaaaaggagatcgaaatcaaaatcgaacccagaaaagcgaaattccggagaaaccctcagaaattgacaagaaaattaaacggaagatgttgcagaaaacctggagtttggtgtatttgtcgtagagcttggcgtagagagcttccattttctgctcactgtagaagagtgaagaatcaaatcaaattgattacccgacccggaaagaagcaaaatcgacgagcttacaaattcgattcaagagagcaaaacacactcgctttggtttccagatttgaaggagaatgacgaaactgatgaattcaaaagagaccaactttataaaattcccaaaccgacgacgcctatgacactgagaagtggattttaattctagggcaacggtttttttcttcttctcaaagcactatttttcttctatctttttatttaattttaagttcttaattataagaatatgaaaaccaagttatccattggattcacacatttttttttttgatgaaaagatctattttggtccacacttgtgaccataattgtacatgccatgaaggtcacgagagtttcgctgggaacttagtacaaatttcctctgttataaacaatcctgattgattattgactacggattcctcttgtttcatcaacctaccaaaaaaaacaatgatatcaccgttgacgctcaaaactccttcatcttcatcctcttatgtctcttctcacttctctgttgctatctcttcttcaagaaacctaaggatggctttatagcgaataagataatgagatttttggggaacacggagaagaggagccaaaggacatcaagatggagacatgatggacgtattgttaatgcttatgatgatagatcctgaatcttggtgatgtcctaatgagtttaagccagagaggtttttagcttcttttggatcagggcaagacgatgcacttcagtacattcttttcggaagcggaaggagatgctgtctgggagtaaatctgagttacatctttgtaggaactgcgattggaatgatgttgcaatgctttgactggaaaaccaaaggagacaaggttgacatggaagaggccattcgaggattgaacctgaccatggctcatccccttaagtgcattcctgttgctagaaacctaaaccctttggcttgctcgaaccttaaaccctgtaactttgaatttgcaaaaaagttgttggtgagaggaagctctgctccgctttgtatgttcccgtgtccaagtctcccggtttaagtggctaccttttggtttagtttggtttattgtgtgaaattgtaaataattgtgtagtgttcttcggtttaaggcatatatcggtttcattgttcactgacttcactgacttcattcacttcaaatcttgtgtttatgatcttaaaaatgcagcggtttttaaggttgattttgttttctccgattcgattctctgtataatgcgatcccactcatatgtgactaattgggtttttgcccatataaaggaagcaaaattcaggtgatgaaggaaaaagatgaagatgtcggctttgaagtgaagaaattggagatttaacaaattcagaagtttgagggaaatttacagcattggaatccctctagacactgctggttaggattgggaatggaggaattaacagctgcaagatcaagaaatcccctaagcagctgaatcgtgtgaccagaaaggggctgattgttgtgaattgtgatcgtctgcttttcttttacttgagattcttgaatctgatttctgatagcgttcgagcgagagagagattttcatgtctcggaagctgatttctacaagagtttatggtcaagacatggacttcccaacatcacttattttgcttggccggacacaagaaggtgggttgggatttagagttagaccactttgacatgtttacttctttgagattgagctaccctattttggtatgtcttgcaactcctccattattcttgtttgttccaatgttttggtctcttaatcctatcctaggaatttgctgtacttgctctggagtcaaccataaatccagtagggaatgattgaatcacatccagtaacatgtttttagtcaaaacatctatctgagattcttagtagatataagaagtttgacaaaaatgaaatgcttatttatagaagagtgatgaactatcttggtcccacactagtaaccacgatgaaaaatacattatttgtatctaatatatacagaggatggtcgattcttgattaacgaatctcatgtctcatcttcctctttcactttgagcaattatggcagcaatg

SEQ ID NO: 22728 - DNA, 3000 bp, Unknown; identical to SEQ ID NO: 14606
  misc_feature (1)..( 3000): 2750-1469P.txt file - cDNA_ID_2113870; gDNA_ID_2684204; Annot_ID_191342

SEQ ID NO: 22729 - DNA, 3000 bp, Unknown; identical to SEQ ID NO: 14606
  misc_feature (1)..( 3000): 2750-1469P.txt file - cDNA_ID_2113870; gDNA_ID_2684204; Annot_ID_137281

SEQ ID NO: 22730 - DNA, 3000 bp, Unknown; identical to SEQ ID NO: 9714
  misc_feature (1)..( 3000): 2750-1469P.txt file - cDNA_ID_2113881; gDNA_ID_1972174; Annot_ID_179951

SEQ ID NO: 22731 - DNA, 3003 bp, Unknown
  misc_feature (1)..( 3003): 2750-1469P.txt file - cDNA_ID_2113928; gDNA_ID_1620797; Annot_ID_168509
atggaaacaaaagaaaattaaaagagatcacaggttggcaattagctatataacagctgttaatgcgaataacaacacttcacagctgtcttacgaactcacttctctatcactttttcttaattttctttcctttttaatacatttcagcaaataaaggttacgtccatttttgaatctaataaataaaaaagtgttctatctctaaattattggccatcgagatatctaaacgacaaattttgttataggaaatgactacttgttatgatttaggattcatatcgtcgtctgttctcttaggttatgaattctgaatttctgatacttattctcgattgtattacatatatatatatatatatatatatatgaccctgattagtatataaactgacaaactgttaccataaaaattaaatgatattttttgataaagtttgattaaaactaatgttactattgataaagtaaactattaactatgtatatactgaaaataatgtaagttgggtgcaaatattgatttgacttaacataaagttcaatgaaacgactaccatgtccataagtatgatattatatgccagccatgataatggaagtgacattttcatgcataaagaaacatgcatgctcctcagtttttttagttttttgatttgttaaataaaaaggctatggtgtagacttcgtgaagaatgtgtgttaagtgtgcgtgcgggcgggatggggtttggagtcgataaggttggtgaaaaagccaaacactgaaaacagactatccgtgatattgacctctctctttcttcacctttccagtttttgtctattatttcgaaacgtcaatttgtataatttgtaacattttacatctactctactactgtctattatttcgaaacgtcgatttgtttctattgatattattgggtaaacattttttttctttttagagaatagttaaaaatgttataacataaccaagtgaacctaactttttatcgactcatatgaacctaagcatgatttcgactctaataataacaacgtccaaacatatcatagaaattagtttacatttgtatataactatatatatatatatatatatatatatatatatatatatatatcaattcaaagaaacaataatttcggtgttggagcccaatttgcttgttgcctagctaggggtaattagatagggacaatgcgtaaatttactctctcttttcttttgggttcagttcctattattgaaacaaaaattacatccaaaatggatataggagttgtgaccgtatgggttgtcgaatggttgtgttatatacttatatgttatttgctaaacaaagttcatctagaacctccaattcaaagccagaaatcagttaaaaatcaatatttgctaaaatgttgattcggatcattcattcatttttataaaaaggaaaaaaattaatcggttctggttaacggtccaaaaatattatgtagattaaatatatataacttttcggtactaaaaaaaaaagattaaacaaccaagagtggaaacgaaaagaaaaacaacaaagaaaagatcatggaccataagaaaaatactagtaatacttaaaaccaaacataaagattgatctagaaatcggtttaaaataaaaataaaaaagaggaaattagataaagacgaagagtgggtcataactcataagaagaagtgcaagctgtgaaatgaagcattcgcaaaaaggaccactcacgtctacttcctctcatccttcttgtctcaaccacatcaactctcttttttagctccatttttgtcattaattaattaaccatacttacaattttaatgtccttccattttctatttttgtttcttaatttcctcaaattattgtgatggattcccaagacaacggagatcaacacaaaataaaacttgaaattgagcattattgacatcatccatccataaccatatagttttggtctttcaaaattgtggtgttttccattttttcgcagatcacatacatcgtatgaagagcgttcatatttcaaaaccggaacaagaagtcattgtatacgtcaagatattagtttatgttataatataacaatctcataaaaaaaaactcactatggaagtcaaaagtcaatcgttcaacttacttattatatttacatatatcaatgaatcaggattttttggtagaaccaaaacttaccaaacccaagcgacccaaactaataatagagtttaggtctaagtacatcatagaagtcaatacaattgtacagtaatacattggcttttagtctacttctatctaaagcaagattcacataaacattgaatttcatacaatttaataagtaaaaattcgttggaaaaaaagttataccgaatccattgatcaaagttaaaacaagagaccacacataatacaaccttatttcccccaccaaaatattctcatctccgcatactcacaacttttatacgcaccaccaaccgacccattttgaaaaagagaaaataaaccacaaaaacacacataaataatatgctgataacaatgtcttaaaaatctatttaccatttctagtaatcaatatctattgcaaaaaatatttataagaatacaaatgaaaaatgataaaatacaaatgatttctcaattacctaaaaaatataaaaatgtcttactttattttcagccactgttggaaagtacttgcaatcatatcgtattttgaattataaaactcagaaacaattattttccctgaaaagttaaaacttttaataagatatttataaaataaaaagaatagtctagaccgaaaatggggtcggttgtccatccaaaggagtgctataaatagaaccctccaagttctcattaggacacaacaactaaaaccacatttatcattacagtctgatttgagctaagttctctcatcataaactctccttggagaatcatg

SEQ ID NO: 22732 - DNA, 3000 bp, Unknown; identical to SEQ ID NO: 11145
  misc_feature (1)..( 3000): 2750-1469P.txt file - cDNA_ID_2113979; gDNA_ID_2214480; Annot_ID_133237

SEQ ID NO: 22733 - DNA, 3000 bp, Unknown; identical to SEQ ID NO: 11145
  misc_feature (1)..( 3000): 2750-1469P.txt file - cDNA_ID_2113979; gDNA_ID_2214480; Annot_ID_183306

SEQ ID NO: 22734 - DNA, 3003 bp, Unknown
  misc_feature (1)..( 3003): 2750-1469P.txt file - cDNA_ID_2114009; gDNA_ID_2214462; Annot_ID_182803
cttcgtggttgctggtccaaagccagaagggttcggacaagattcgttgaagagtttcttcaagatcgagaaatctggagaggatgcttacaagtttgtgttctgtcctcggacttgcgactctggcaatccaaaatgcagcgatgtcgggatattcatagatgaacttggcgttcgtcgtttggctttaagcgataagccgttcttggttatgttcaaaaaagctaatgtgaccgaagtttcgtccaagactatgtgagaggacaactctcgatcttttactttgactactcataataaaacctctatgttttttttttgataaaacacccgctctctgttttcttgaaaactacaaattgaataaaagctagtgaagcacatgcctatttattaaatcttcatcttctctcaatcttaatgcccgatataaatcaaagggatagagtggacgtccatttaaataaaaccagctaacaatacaagcccctaattattgttgtgtatttaataagaaaaaggaagcttttaaacagtacccgttctctagagaattctgatgatggtagtgatatagaaaatgataaaaataattaatactctagtctctagattgactaataactaatgttttcatttagtctaatgactttagttcagtttctctttacataatctaattgatttttttatatatttaaattctcttattctttaatttgaattttatttttgtttatataatagcaaaagtgactgaatcaatttacaaaatgatatttaggtaatttaaaaaacttttgaaaaattgaatctatgaaaggttagtttgcaaaaattctgcgtagaaatttatagaaaaatattatttttgtcctcaatgcatggaatcagttaagggataattttatgcaaaacaaagaaaggcttatgaaaatgtgtggcgttgcaaaatttttactagaacaaaagcaaagttgtggaaaacattgcgaaacgtgaggaacacactaatgttcaggtacgaaccggaatctttcggtttacctaatatgttatcaaaacagctactcaaagatgggcctgttttgggccaacgagatttgtttcagtcgatatcaacacaaattagtaaattaaagttctacgttttatcggtgaaagtcaacggtttcacagatccctggacctaaacagtttttttaaaaggtataaatttttttgctgaccaatatcgtcttcttcccgatctctcagcttcttccatttacaattctaccctttgcctcttggaacctttgaacgaaaatggcggaaacgatcggctcaggtacatctttcttttacttcttcacctttctcaattgaatctttcgtatgtcaacatgcgaatgttctggaactaaaaatgtatggacgatatcgattgattttgtatagtgattgattttagatatcgtcaaaacctttagtctttaatttcgcagcgtttttataattgtgcagaggtttcgtccatgtctgacaaatctgccaaaatcttcgtcgcgggtcatcgtggtttggttggatctgccattgtccgcaagcttcaggaacaaggtttcaccaatctcgttcttaaaacacacgccgagcttgatctcactcgtcaagccgatgttgaatccttcttttctcaagagaagccagtttatgtaatcctagcagcagctaaagttggtggtattcacgctaacaacacctatcctgctgatttcattggtgtcaatctccagattcagaccaatgtgatccactctgcatatgagcacggtgtgaagaagcttctcttccttggatcatcctgcatttaccctaaatttgctcctcagccaattcctgagtctgctttgttaacagcatcgcttgaaccaactaatgagtggtatgctattgctaagatcgctgggattaagacttgtcaggcttataggattcagcacggatgggatgcaatctctggcatgcctactaatctctatggtcctaatgacaatttccacccggagaattctcatgtgcttcctgctcttatgaggaggttccacgaggcgaaagtgaatggagcggaggaagttgtggtgtggggtacaggtagtccgttgagggagttcttgcatgttgatgatttggctgatgcttgtgttttcttgctggatcgatacagcgggttggagcatgttaacattggaagtggtcaagaagtgactattagagagttggctgagttggtgaaagaggttgttggttttgaagggaagcttggatgggattgcactaagccagatggcacaccgaggaaacttatggacagctcaaagctcgcgtctttgggttggacacctaaggtttctcttagagatggtctgagccaaacttatgattggtatttgaagaatgtttgcaaccgataagttaatggtttctcttctcatatatacacaactattgagtctcaggtaaatcagcttatcaccacattgtgatttaaacctttctttgagattcgagaattgcttttttttttatcaaaattgattcatttagagataagacttgcttctttatacaacattgtctgaggaattttaattttggatctccgagtatggtctattattagctctcttctatacaaattatcaaaacagttgtaagaagtttcaagaaaaacatttgatatctcactaatttggctatccttgcaagttgcaacgctaaaatgacaaataatgaattctcggcccaatgggcttacacaagccttgttaaagatagcgtgaacaaaacgcggctcactagccctaacctgtctctctttcgcttaccttcttcttcgtcttcgttggctcagtcacttgacttcacggccccgctcaagctctgacacgaaactcatttcaaattaatttaataaaaccttaatcacaaaaggggcaaaagcaatcgccggcgattatg

SEQ ID NO: 22735 - DNA, 3000 bp, Unknown; identical to SEQ ID NO: 14431
  misc_feature (1)..( 3000): 2750-1469P.txt file - cDNA_ID_2114026; gDNA_ID_2684118; Annot_ID_190868

SEQ ID NO: 22736 - DNA, 3000 bp, Unknown; identical to SEQ ID NO: 14431
  misc_feature (1)..( 3000): 2750-1469P.txt file - cDNA_ID_2114026; gDNA_ID_2684118; Annot_ID_137167

SEQ ID NO: 22737 - DNA, 3003 bp, Unknown
  misc_feature (1)..( 3003): 2750-1469P.txt file - cDNA_ID_2114103; gDNA_ID_1972144; Annot_ID_179327
aagactcttctcttgtgtcaaagctctccatctgagaccaagttcttgttctttgaagaatcacttcctgagaaaagctcttttatcaaaccaaatcctattggataagcttcctccgacagatctcctccatagtcgtgattcacactgttaacagaatagttcagaggcaacaaggcaacacaagaagaaaagagaaattttattattgatttgatgaaacagaagaagacgatacaaatcaaatcaaatgatatattaaaaagaggtgaataaaggttcagacttgggaagtttgtcacagtctgaagaaatccatccaatcctctgcttctcattgtcatagatcaccattatcccttggaaagatatgtctatcacacacatagacacgagatattgttgtcaagttatgaacaaaagaaacctgagaaaaacttagtatatatatacgtacctccaatgatattgtagccctcgagaccgatttcagttccattcagaatacccaaacatactcttcctttttcctgagaaaacaaaccagaagaaacagacttctcagctatagatttttatggagatacaagtcatatctaggccagtatatgtgtgacttacggtgattatgagatacgactcaggtggaacctgaaatagctgaccattcttttgattcccaaatcgtaaagtaatcgtcttgaagtatttcttaacctcatcaagtgatttcaaaggttttttgcctttccagcagactggtaagcttttatcatcttttgtgtccgtcaaaggcttcccattcaagtcttttcttatctgtaggagaccaaattagtcataaaaaagtggaaaaacataaacggtgaagctaatcttttttttccagagaagaaattatcccatacaagatcgagaatagcttggtatgcttctgcattgaagtaagtgtacgagcttccactatcgaaaactacgttaatgcctttgacacctgtggtcttgtcgttaaagagaagctctgctggtccagccatgtagtttttactacagaaaaaattcacaccataatttcaacttgtcaattataaaagtgtgagtaaacaagtggcagttataaagaagataatgctcaaagattgctcacctaggtgaattagtagccaatgaagtccatgtaactccagaagaaggaacaagctcatctccaatagagagaaagcctttaccagtatgacttaagcaatgcacaatcacattcttcgttatccccaaggactttagctgagttgagaggcctactttccctcttccaaggccaagtattcccgctgttggaggaggaggatgtggaccaggattctgctgatcatacccacatctaaaagaaaatttgattcaaaaattaggaacttgtacaaccgcaaatttagtgtttttcttttctaatgtgtgaaaaaaggtagaataaaactaacccaaatgtcaaacgaagattcataatggagccatttgcgagttttagaggaacctcatcagttacaagtgcaccaatagatgatgcatgatcggagtatccgatttcatagtcacattgatcctcagggtcagcacaaggtctgtcctggggaaggtcaagaccagaacacaagatgtgtgaacaaggcaaagtgttgtgattgggcttgtactgcttagcacgaggctgcaaagaaagagaaagaaattctaagatagaacctttgcttattatgtcacacactaaaaagcatatcaacgcttacctttgtgcaaccgttgcaaggtgcatcacactgaacccaagtgaggtcactgccagtgtcaatgtccaagtcaaagagcttaggtgggttgccaatgttaagcaacacataatagtacctgcaaagatgaattcgttaattacttcaacaatcaaattgggcgttttcaatacaaggtgaaaatcagaatcaacattgcccaaaatcttcaattcgtgaaagtagcaagctttgaaatcatctcaaagatcaatagaatgaagatttcacatcttgtcaagcaatgaaatagattacaagtgaagaatccacacagatgcaagagaagccaacaaagtatccgcaccaattcaaaatccagacataagtcaacacaatcccgttaaggaaaatcaaagaaacaagatcaaacccacgaatgggtcactgaaaagtagcataaaacagagaaattgaaacaaaaagatgcgaaatttggcacttacccaagaggatacacattcccggagacaggaaacacgacggtggagctaagtcgacgattctgtaacttcacttgagccgacgagtctttagtagcttcagaggtttgaaagcgagcacagaggatgaagacatagaagacgaagacgaagaagaagtaaaggtttcttctttgctgcttattcggattcatcatctcctctttttggcccccaagaaagcgaaaccaaatcccaccaaaaaggtttcttttttgacacagggcaacaaaaaggaggctttttctttgtagaattgctgctcccttataggagtgagtatttgtttatatatctgatctctctcacactcaatttcgtgcaacttgcagcagaggtttctttgagttcccgtaagctaaattgagaaacttggcatttggctaaaagaaactcaacgcccaacgctcactacacttagcgtgtaaagcacgcgccaaccaggattgactcaaaggcctaacgatcttcaaatgtacagggcccaatatactcggcccataaactctaaaactattcaaatgttaggcgcgtgacgttcacctgtgaatcagctgatagaaatcattatccaatatccagttatgagtgggtgactccaaatagatccaactggcaacgcattattgacacgtgtcttttcatttctcttcttccggcgttttctctccgccgtttcgccaccgtacgtgacaatg

SEQ ID NO: 22738 - DNA, 3000 bp, Unknown; identical to SEQ ID NO: 9726
  misc_feature (1)..( 3000): 2750-1469P.txt file - cDNA_ID_2114138; gDNA_ID_2684236; Annot_ID_192429

SEQ ID NO: 22739 - DNA, 3000 bp, Unknown; identical to SEQ ID NO: 9726
  misc_feature (1)..( 3000): 2750-1469P.txt file - cDNA_ID_2114138; gDNA_ID_1972175; Annot_ID_179973

SEQ ID NO: 22740 - DNA, 3000 bp, Unknown; identical to SEQ ID NO: 12574
  misc_feature (1)..( 3000): 2750-1469P.txt file - cDNA_ID_2116844; gDNA_ID_2214559; Annot_ID_134854

SEQ ID NO: 22741 - DNA, 65 bp, Unknown; identical to SEQ ID NO: 680
  misc_feature (1)..( 65): 2750-1469P.txt file - cDNA_ID_2121696; gDNA_ID_1620307; Annot_ID_152840

SEQ ID NO: 22742 - DNA, 3000 bp, Unknown; identical to SEQ ID NO: 691
  misc_feature (1)..( 3000): 2750-1469P.txt file - cDNA_ID_2121711; gDNA_ID_1620307; Annot_ID_152844

SEQ ID NO: 22743 - DNA, 3000 bp, Unknown; identical to SEQ ID NO: 689
  misc_feature (1)..( 3000): 2750-1469P.txt file - cDNA_ID_2121736; gDNA_ID_1620307; Annot_ID_152853

SEQ ID NO: 22744 - DNA, 3003 bp, Unknown
  misc_feature (1)..( 3003): 2750-1469P.txt file - cDNA_ID_2121746; gDNA_ID_1620307; Annot_ID_152856
gtttaggcattaattaatctaactttgggcccaaaacccaatattatttccgtcttttttagtttagaaaagtctttgttttttttgttgctgatttcctaatatcaaatttgtttcgtatataagataaatggaatgagaccgaagttttggaatgagtcacatgatccgagccagaccaacaaaggaagcatatgagaagcatgagaaaaaaatcacttaagtatcttaattttgttcatgtttgttgtgaagggcttactaagatattaataaagagaaaagataaagtgtgagattagaaagttgtatataagaagtgaatggaaattaaaggtttggggtaatgttggatggatcagcgacaaacgtggaagcgaggagatccaaaaaggaagcttcccaagcttcgcgaggcgtaggagtctacattttaagcatgccacaatttcatgcccttgtttcccaattttgcgattttttcatgttttttttcttttacgtacaaataacatttattcaaagttcagatgttatgatttatgctttatgcttccatacttaaagatttttagttatgatttatgcttccatgcttttactttttttgccatggaaccatttctgtaagtatataatcatcgattataaacctaaattgttttcatttttatgaaatatttacattcttagcaaaaaaaaatagttcagatgttattaagtgagtgtttactgtttatcaacgaattaattagtgtgataaaaatttgcaatataaatgtattgattctctcaatttaccaatcgttttatcttgaatgcatttagagatgggagttcctgtttttttttttgcaattggaatcataaaacgagaacttacgcaatctgaacaaggtcatttaggatagacattttaaattatacaaaatgacagtaatttgatttttgacaacgcatgatgttaacttaattttcttataagatttttttttttttttttttttaaaaacttttgatgatcacatacacgacattgacctaggagttagagcaagaaaattaaaaaaccctttgccaagaactagtaaccaaaacttatgtcgcatgaagcttcatttcttatacgttatatacagtataacattaatagaaaaactagaaatatttctttaatggtgcatgtaacatcattgggaattgcatgtgagtgggatttacaaatttacaatgtgagaccaccttccactcaatatatatatgttccaaagtgaaattttcgttttaatataacatacttgaatatagaaccaaataatatgtatcatgtgtgacgggttcaacgttttcaaatgtcctaaaagaaacaaagaaacaaagtttttgatttattattttaaaatcacaaaaccatataaagtttaaaaatcttgttaaacttcataaaatccgtctttaaaatttttaatataaaagtttgattcatattattgttctttcttaaaccaacatttcgttgatgaaagatggtcaaatgaattttttgttgtcaagctagagaacacctaaattttttccaattgatattatgtatgttaacacaaaaagagttatctaatacgattagttaatttatggatgattccaagtagaaacgccaacataaactttgactttgaggccgaattgatctgcttcttttatttctcttacaaatttgaaattaaattagtcaagtgtgatgataaaatacataacgtttgtacgcattagtatgttgtgtagcggagagactcttgtttataaaaacaatgtttggtttattctaattgtcattttattctttggatctttagttctcgcttagcgtctcgtgcatatttttcctcaaaatcatcaccattaaatgactcacgtacacaataatcacaacaacatacatatatatcaccatgccaaaatacatctgaaaaaaataaattcctagtcgctacactgtcatattttgattgatatttagactatttagtcattcagataacattgttacgaggaagtatatatacatacgtagcgttgtactactgtaactggttttaaatttatagtattaattttgttgatgttccgattgaaaaagtcattttaggaaagaacgaaaaaatagtttgaaagtgatttttttttaaaaagatataatcctacactgtcatgttttgattgatatttagtcattttgtgtgttaattaacactttattatagacagggttagttattaatttaaatctaaatgttcttgtaaaggcttccacttaattttctaatcaccatctgccgaccaaactactttatcaagtcacagcttttgtggaaaaatttccgttaattcatgagcttttctatttgttcacacttcacacaatcattaaattaaattttgcggctaatgttagaattatcgtacgacaactgatcacacgctacatgttctctagcttaaatttgcaacatatataattgaaacatcactcaaccccacaggctacaacatcccacatttaatcaagaaatcaatcagttcacaattactgatgaaattacgcagcaagtaaccctagctaactaggataaaagaaaacgatcaattctcgggaaaattcagtctctcccgaatcccaaaaacaaaagcatgcatttcgtaataaacaacgcactgattctgtttgattttttctacctttatcctacacaacactagttaaacgacacaaaactcaaaacacgaacacagttacttaatctattccccttattctttctttttgattataatagcatatcggaaaaaaatctacaaacattcaaaaaaacatcatctactcatctatatattcaaaccttggtccattcacatcacgaagtccatcgcctataatcatataacatatccaaaaccctaaaacgcaaacactaagataactatttcttgaaattaataatg

SEQ ID NO: 22745 - DNA, 3000 bp, Unknown; identical to SEQ ID NO: 684
  misc_feature (1)..( 3000): 2750-1469P.txt file - cDNA_ID_2121756; gDNA_ID_1620307; Annot_ID_152859

SEQ ID NO: 22746 - DNA, 3000 bp, Unknown; identical to SEQ ID NO: 683
  misc_feature (1)..( 3000): 2750-1469P.txt file - cDNA_ID_2121760; gDNA_ID_1620307; Annot_ID_152860

SEQ ID NO: 22747 - DNA, 3003 bp, Unknown
  misc_feature (1)..( 3003): 2750-1469P.txt file - cDNA_ID_2121771; gDNA_ID_1620307; Annot_ID_152864
aaaattccttgaagcactgatttaagtgctctcgcagctgttgctgcaatgcacataaggaatccaaacaggtgaaagcttggctcaccctgacaacacccataaattaaagaatatcaagcatagaatcaaacacatcacacacacaaacagaacaaaatctccattactcgaacttttttagcataaagttcacatggttaagagaagatgagagaaacacaaaatctagcgaatacaagcacaaaacaataccaaattttctcatgtgaagcataattcaacaatgtctgagcttgtcacaaagataaaagctagcatcattggccaaacatgaaactgaatcaacgatatcacgttcattgctccagaaccatacctatgttcccaacatatctagttcattgctcctacatcacatctacatcaacctctctaacaactcatccaaaagcatacataagggattcaaatttaagaggtcaaaagaagtgaaaataccccactagcaataacaactccggtgacgacagggacgagagtgaagtaagtcaaccaagcctctttcttacgcgtcatcaggtaagcaaacacggcggtgaaaaacggcgtcgtagcaccaatggcttggttaaacgaaacaggaagaaagcggagagagatgttaccaaagaccaccgacacacaaaaaacgagacttagagctgcgatcttaaagaactgaactctggatcgaatcgtctgcatcggaaccatcttcaaccaagcaatggcgacgtagctgagtaacgaacaagccgtcatgtgacacatggtgagaaagatcgggtacttgaatccgtaattgctaagcaagtacttgttcagcaacaatacaccaatgttcgatgagtaccaagacgcgactagcccgattgtgaaaaaccggccattcgtcgccatcttcatcgcttttcttcttcctaatcctgggtcgactcgatctgatgagatgagattcaaactaaaaccctaacgaatttcacgaaattgggattggtgggaatcgaatctggacaggagatggagatctctcggtcctccgatacagaattttgacgcgtcgtgatgatgttattccatcaatgggtaagatttggattaggttacaacacgcgaaaatgctggagacgaagaaaccgggaaagagaagaaagttgggatttttggagaagaagaagaagaagctctgcaaaaaggagagatctttgggctaaagctgcaacaacacttctctttccttttttaactaatttattttttctttcagtttcatgatattataattggtgcgttatgtaatgtttctttgggctaaagttttttttgtttggttacttgaaaaatcaaagtgtgaagatgtgtaacaatgaaggaaaggagccattgactttgttattggttattaccgaatctgagttctaaatttaatgatttacgttcatatactaatccttgaaaattcctagctaacgaaacatttcagttctgagcatatttaattgactaagtaaatcgaccacgaatctaattgtaattaacaaagcgtttggttagttaggcaatcgattttacattaatttttctaaaaatacgaactattcagagaaaagcttatctaagtagcagaagtttggcagaattatgatgaagttgaataaatttagcaaacgtttttgacaaagtgggtgttaagtctagtggtagaagaccaataaaagctttattagtggtgtagcaaagggaaattatgtaatatacaatagtttagaatcgatgctcgattcttaagtcaaaacaatggtaggatcatctgcatttgggcttgatgttattagccgttacaacttgtgaagatgaattacaactcgtataaataacaatgaaatttgcatatgaatcatttagattcaaatttgattttataaccactcaatttcacattacattagccacttataaaacaaaggatttttcttaggaatctcgccatatccataaataccatcttcctttgcttcccaagtacaatttctacatctagaagaatctctaaccgctttataaatatcgaacacacctttttttacttgttcttggctaaatccacagaagtagagtgtcgaattcataaaattcacgtaaaacatccaaccatataatccacctttttgtagaatatggaagccatgatcatcatctcttgatttacaatgaactcctaaaagataatcattgtcattataaatcacaaccctagtaagaggacctttcattggaaatacttttccatcatgttgtagagtttcacagcctatcaaagatattaatactataaagatgattataaacattgagtagaaaattgttaggaaatttatgttagacgaattcatcatgaagattttcttaatcatgatattgcattttctagaacttataatttatttatatataatgagctaactttacaaaaaaaattataatttacattaatttatgttgaataacctaaaatagtcatgaaatcactagaagtttttgtgaagtaaataagaaagtaaaagttgctttttgttcccaaaaaaaaaaaagactaaaagttgcttaaataacccaaaatataatagaaatacatcaattaggttaggtattcatatccaaaaaattaaattgacagtaatgatccaaaaaatagtagatttattagaggtgggtctgtctaggtgtccaggtgaacaagtgagaggagagagttaatagttttgtctgagaatctgacgatcacttaactccaaaacccagtggcaatcatgtaattttactgtaaagtttcaaccagaaatctctttttttctctctctctctgcgctgcaaagcattgatcatcatcattcatcatcttcacaagtctcgttttcataatttatatgaggattcgtcatccgggtctatacgaatatg

SEQ ID NO: 22748 - DNA, 3003 bp, Unknown
  misc_feature (1)..( 3003): 2750-1469P.txt file - cDNA_ID_2121782; gDNA_ID_1620307; Annot_ID_152868
taaagagtagaagcaaataaaagagaaaaaaaaactatataccgaaacagagaagcagcggcaggaaaactcaagactgaagatcactttggaaactgatacttgagatatcgtcacgaaaatgtaaaatgaagctcaaagtcatttcatagctgctggtcaaggtaaggatctctaggcggattcgagccaagatactccgagacctcagtaacatacgttttcagcttcgaggtggttcgggtgagccaatcggtgtttgtctgatccatctcatccttcatattcgccatcttctcttcctcttccaacatgctgacccatctcttacccatatacattttaaccgcatccacaccttgtttcacgacttcatcaggcgggacaacaagcgggttttggtccaagttcagtttggtcaagttcacgagcgtgccaaaagcgtctggaagagaatggatctggttgttgctcaagtcgagttcttggaggcttatgagatctccgaatgaagcagggagatcttggagatcgctgaagttactgctcaggttaaggtactcgaggttcgtgagcagcccgaaagaatttgggagaccattgagttcgttgaagtgtgcatcgaggtagcgtaaggatctcatttcaccaatggaagttggtaatgatctgattttgttgagatggatcaagagcttctctagtttcactagctcgaatccgatgtttgttggtaagtaggtgagattgttgtagctcgcatccaagacaaccaacgatctttaaataaaaaaaaaaacagaagtaagaaaaaaacagaggaaacagagtcaacctttaaagataaaaaacacttacccacaatggcagatggaatctggtaaagttgtgagtttgttacaagagacattcaaaatcttcaactttgacaataaaccgatcgaatctggtaatgtctccaggaaattagtggaaacatcgagttcgagaaggttatgcaaaccagctatcgaatcaggaatagcctgttacatacataacctttgatcaaaaacaagcaacacacacttctaaatctatctcaatctagacactaccataagaaccgatccaagaatctacctctatgctaaaagactcaaaatccagagcaaagtttacatctttgacaagcaaacacacttttgaatctatcacaagtactgatccaaatgtcaaagaattcaccctaaagagtcaaaatccagagcaaagtttacatctttgacacataaacatatcagaattctaacagatttgatcaaaagattatgaatttgaccattagggacttagaaaaactgacctgaagctgattgttatagagattaagaacaaggagaccttgaatctttccaaatgcttcaggaagcaacttcaatttccgaccagacaaatcaactcggtccaatggattctccgcagcttgttgcagtatactcacaacctcttcattgacttcaacctccgcagcttcctcctccgccaccgcggcagcattcttctcggcagactcatagatcctcacgagcctctcctctgcttctttcaaaagcttctcataagattcatgaagctcgttaagcttaaggatcgatttataccaaatcttctcttgctccacagcttctctcctcttctgttccttctccgccacgtcaatatcgttaggagagagagcgatctcttcgaaagattccgacaaagacgcgtcgatctcacggagcctagcacgagctctgtcgacggtttcgtgatcgggtcttggtcctagggttcgaagaacagatcgggtctgagaaacgtcggcggttgcgttagtcatggaggcaagaacatcaggatgagccaagtgaggcatctgagtcactatctcgatagagtggtttgatgatgaagaaggatcggatttggatggtggtggctcgacatcggaagaggaagaggatttggcggtgaatgaagggagacgatccaagacataagagagaacagggaagttcttagggttaagctccgtcgccattgttgggagcttgatggaagagacgattgggagattgaggaagaagaagaagaagaagaagcgattattggttcgtgtctcatgtccttccgtactattagcatctctattgccaagtcaaagtcaaagatcgttaaattacacgtggttttgtattaatacaagacaagtgtcaatgttatcctacaaagaagaaaaaaatcattctaaaaacacttcttacacaaataataattttacacttagtagaaacaaattaattaaggttttagaatagataagataaccaagaagtttagagaaaactttaattaaggtttttgaaaaagtgaataatttttgttgttattttgtcttcattttaagattgtgaggcccaatattggtgacacaaatgttttatgggcttgagaatgatcttagggaaaactatattgttattcttttggaaatgaaaaaaaaaagctcatttttgagactatgcaatggagactctgttttcgatatgtatgataataataataagttaataacttttggaattttactgatttttctgtaatctcatgatgattcatgatgatgaagacgatgttatagttatacctaaacatttgcttattttcaacttaaaaatgtatttattttataaaattcaacttttaaagtaaaaaaaaataaaactcaatatctctgatagtgacgacacagggagtattaaaatcgaaaaacgtcaacaaaaccggtggaaagttgaatgggtcgaaaccaaacgcatatagccataaaagcattgtctccattatagattctccatatctgagaataaacaaacgattggataaaccgataaagtacatagaacttcgatctttttcacaataacccaaaaaaagagagaaagcaaaaaaaaaaactagagcgtttcaattacaatg

SEQ ID NO: 22749 - DNA, 3003 bp, Unknown
  misc_feature (1)..( 3003): 2750-1469P.txt file - cDNA_ID_2121801; gDNA_ID_1620308; Annot_ID_152880
taaaatcttcccaaaaccaaagagtagtttctaagattttaacagagacacaaagagaaaaaacaaatgggcgggttcatattgggccaaaattaacaatggcaacgatgtgtaaaataacttcgtcgttagtctctgtttttcgctatcctctgcagcaaccgcttaatgcgaaacagagagagatttccattgtatttttaatttaaaataaaatatataaaaacaagaccaatgtaacaaatgcattgcttagatatatataactctaaaaaatattcttacaagatagtaagtttggtctattgtcctataaattctagcatataactggtaacaacatgaaaaaaaaatgtaaaactatacatagattacaaaaatgtaaaaattaaaagataagattagcaaataacaaagatattccccttttaatcaaagatcagtaaaaaaaatcgaagttataattacatactaacaaaaccaaaaacaaaccacctcgcgcaacgcgcgggtctcctccctagtgactttaattagtgccatgaaatatgtttttaggaagttgcatggtccatgcatatttaatttgtaaattaattcataagatccggtctttcgcacgatcgacacaacactaaaaaaatatgatggaatcgcagagataattacacttcatttttttcatgttagagaaagaaagaaagaaaatgaggacctctccaagatgtatttttctcacttgaccctctccaagattaagggaataatctgtataaagacacgtgtcattccttgatggacgattgggtttgaacctttttggtattatcctctcttacgcccaattggatatgccatataatatgcatagttccttttggattttataagaaaacctttgtttaaaaaaaaaaaaaaaatttatatgtatttctttgtaaatgttggatcatatgcaaatgttggatatgatcatttcagttaaagtctccaaaaccacaccattgtctaggcagtaaaaaaaaaaaggggacacaattgtgaaagtttttgaacacttatttcagtcgaagcaagtttgagtttagatgtgggaccaataacataggtaaaagatcaacatctcgtctagaacactatgacctagccaaactatatcacgaaatttacatatgtccaaatttatatttctccttcccctttattatcatcgataacgtaaactatcaaaagcagaaaaatagagagacagagagaaaaaggaaagagctaccgagacgtgaagagaccatatgcgacggcgcgtgaacgaacgccgttgactatgtgcctcccgaccacctgaatgttcttcgatttggctgccattaactctatttctgtacacaatattgagggagagaagagtgagagagagttgtttaggatgagtattattaatggtgaattcagtagttgagagttgagtgtgagtttttataataataatattagtgtggaagagaagagatgggaggatacacaccaatacgattcgtgtgttgtggtgctccgttacacaacgatacacaacgggaataatttatattttaaagttagtatatataaaattttgtaaattatatttatttataaaatattttattttatagtttacaattgttattaagtaacgtcctgtcaaacccgtcccgccaaacccgtcccgtaaaaaaactattattttattaatattaatcttatttatgatatgtttatgaattattgtctaaatattttagttgatgtgggacgtacaactcacacattttcgtcaattggttaatatatgctcattttttaaatttcgagtcacaaaatatgacggaaagaattgagattttttaaactctatatattatataatgatgttaaaaaattatgatatattaaactttttataagtttaaatattaataatgttttataaagtttaaatatataaataataatatttaaaaagattatattttgagccttttaggtaatgacataataactctaaaagcaaggatttaaaagatttaaatatttaattaaatatttttattcctaaataaataatatcagtgtcatgacattgtaaataggttcaaatacatgatttatttatttaaacaaaaaacgtttagtaagaataatatttgttttaacaaaatactttgttttaaaatattgttaacaaatatgtttatgctaattttaagggattgatttgaagtttgtttggattaaatttgattgataatgtggttgacaatttaaatcaagaatttaaagtaaaattaattattttggagaaaagatttaatgctaatggcattgaattataaataagtccaaatccaagatttatttgttaaaatgactgcaaaaatgtatatttagattattccccaccaatgaaacgccaccgttttgcgtctgaaggctatgtattttgtacagtatggacatggacctgtaacgggctcttcagaaggaagcccatcttctaaaactaaaggatgtaaatttgtgtcattaatttcccactaataactcatttatctccgattatctaacgcacacatcacactacttctcttccactaacatttttttttttacgtaacatattaatgttcatgagaagattcatggaacaaaacataatttaatcaagaaatttgaaaaataataaattaggatatagaaatgatttgtgattgttatttgaggaagatgagaagagtgtggatagtgaagaaagaaaaaaaagagaagagtgtggacagagtggaccgtgcataacacacgaaaatgttacgattaccacgaaaaggttatctctttggagctttgacacgggcctcctcaaacaaaaacaaaaaaacctagcttctctcacaaaacgcatgcaacaacatcgaaattaagaatcaatcaaagcttcttcgttcgatcacactagaaagaaagatg

SEQ ID NO: 22750 - DNA, 3000 bp, Unknown
  misc_feature (1)..( 3000): 2750-1469P.txt file - cDNA_ID_2121817; gDNA_ID_1620308; Annot_ID_152886
ttttttgattaattaggttcaaccatgtctcatctttatgttattctcattctccatatataaatatattatccataagcttggccggctctccaaccgttctattaacaatagcactaagcaagaacttcaatatgaccactctcattttccaccttcgatcaagcaacaacacagctgagaaagtagccaagctaattatcactatctctaaacgcttgtgattctagattgtacacgttataagtaccaggatctatggaattaagttgagtaaaaacaaagagtgatagtcactgactcaaacaaaaacgtcttggtcagtatatataacttactaaaaaaacaattaaacttgttataccatttgaaatttactactcatcaatcatcatgtctgttaaattttcagtatattataaaaacgcatttccattaaatcaaagttaattatgccaattttcagtattctattgataactcgggctaatccacatcgaagctcgaccaagtcccatgcatatggtctaggtgatcctctagaactagggcggttgacataaatttcgtacgaaaacaatacttttatcattcagtactaaaccaaaaaaagcggtttctttacgagagaatgtatttgaaacaagatacggagaaaatacggaccagactaaaaataacaaaggataaaaccaaaatcaagaagaaacttaaaagacaaaaccttctgagcgcaagagagagggccaagttgcgaagacagtatgggacccaaataccgactaagcggaaatctaacttttaacttttcctaccaatgaaacattgacacgtggaaaagcaacgtcgcccactttaccctccgcactttgaaatctttgataagcttatcgctctcccattggccgtaggctccacgtggcatctctctgatctctcttctgctaatccttttttacccaaactggcatgaccccacccctaaacccctattgtcctttctaccaacaattacttaatgacttatataatattctaattatattttaattatgtaattaaataactattgatcccatctccatagtgacatgtctcactttttcttccacaacaaaatgcgtcactcttgattcatcatgttcgtagcaaaatccacgttattacaaaaaacgttatacattttgaaaggtaatccataaaatagtgagatggatcaagttttctacgcaaccctcgtagaattttagcaatgatccaaagctactgtatatatatagttacgtttcgtaacacaacatgtattttaccatgattatgcctcttttttttttctttccacaacatatatgtatttacatccttatttggtttaggctgagtttgttaacatagcatcaccaatagggacaatttttttttttattacaatctaaatatctaaaatataaattcacatgaaattaatgtttctaatagagttcttcaatcttcatgtacaattgcacatttttgtgaaattattattactttatcattttttctttaaaattaattcaccgagtaccgataaatgtttatattgaatacgatttagtaaacgacatatatgtttcgtcacatttttatcactatttgtaatatatctgttaaatttgatgatgtagtttctgtttttgaattgaaaacttacaaagtttagaaaaaagaatgtaaattagaaataaatacactttctgtatttttgaatactataataggctaaaatcacatcattttctaatgttgctttaaataatatatatcaaataaaggcttaaattacatttatataagaaatattgtaatacaaatatcaatttagagctattaatttacaattacaacctgttgcccaattgatgaataaatcaaacatgtaattaaccaaactttctaattgatcaggaatcaatttagctaaataataagacataaatttggccaagaaaaagaagagaaaacatgttaaataggtaatgggttttaatattgggatagttacctttatttgaaaactattaaggtttgatttaagacacgagtcactcgagagtcgcatctcgccagtcaaaaactaaattaaaaaactatatagacccaaaaaataaaaataacgacttttgtatttatactggcaagattctcattaaaacccagcaaaaaaaaaaaaaaaagacaaagaaggaagaaaatttgagtgggtgagaattttttacgatagaggaagagacagcatcatctacttgtgttgtctgtgtacatatattacagtaagcgttgcaatataacttcttgaggatcttctcacattaatgggtcaaaccttttgctcttccttttgattaatttagtgtttgacaatctcctcctccttctccttcttcttcaaagttttgtcgcagtatctattgttcttacagagagaaaggtaggcttttgtgtccatcactcattttcgctcgtttggttaagcttcatctgccatgtggttcactgttttgatacttttgggctcttatacctaatgttgatgtaacacaacgatacataatctaatttgttttcgagtggaaaatagttgaacccagttgagtatttagccaatacgattagaggatttacttgttttttctcttttcatgttcttcatttgcttttgaagatcttcctctttatgtttgtgtctcttcgctattttacttgcttgaagaaattgagtttctcatctcgcttaaatttggctttatatacagatttagagatctcgattcctaatctacttgtttttgtattcaatttgcaggaaagctttagtcttttaccagtttgatccaattctgggtttcactgaaaaaaagttgggagtttgattcttctaactgtagaagaaacagagtcaacagaagaaaactaaaaaagttgagatttttctctcacgcgctcaagaacttgagtatg

SEQ ID NO: 22751 - DNA, 3000 bp, Unknown; identical to SEQ ID NO: 701
  misc_feature (1)..( 3000): 2750-1469P.txt file - cDNA_ID_2121832; gDNA_ID_1620308; Annot_ID_152889

SEQ ID NO: 22752 - DNA, 3003 bp, Unknown
  misc_feature (1)..( 3003): 2750-1469P.txt file - cDNA_ID_2121839; gDNA_ID_1620308; Annot_ID_152891
acatggttgagtatattagtaaacaataacatttgaatacaaaatatcgattcaaattgagtttctctatatatggtttttatttgttttattctgtcccctgtaaaatatgttatctctcaagattaaaccctaaggtacaaagtgtagactatcataaaagtgtggtggtccatgagaggttaacgaaaagtatttgaggatttgaccagagggaatcctacaattgcgtatgctctaatcaatactactatagtattatggctatattgttatataatatattcagaaaaatcatatacttccaatccaagttgaattgacaaaaactaatccaaacgttgaattgattcattttaattgttaaaattttgatttcttgatatatacgaaaaagtcaaagctagtaccaaaaaaaaaacacatggtatcacaaaactctttgttatttaaagggatttctaaatattagttaaaatcctcatgattagtgaattctagaaatatttcaaaattttgcttcgattttcaaatcaatcaaaatatgcaaaccaatataaatgtatacatataattttggtaaaagtgttctatattatagttgtcctgttattgtgatatatattctttttcttttcttcactctatctttcgaacctatacgttcaaaacctattcagcgcttagaccataaaagggtctcattccaaatatatatatatactgatagattgatttatggttaactaaataattcttacctggcaagtcccatggttcgcacttgtagaggtctacttcagggataatctctagctcgatctcttggccgttgatctttctcttgagatagtaagtgattagttcttcgtccgttggatggaacctaaaacctggaggcaacgagaccggagccatgtatatactcttcaacaatattgaaacctctctatcaatttaatatcggattatataacaaaaaacttaacgaacggtcttgtttacgagataaactccaacaagaccgatcgtttttgtttatataaatagttttataagtatggttgggtagtagagagaaggagaatgatgatacgaaaacctcgagagaaagaaggaaacagagagaagacaaatgttttgtgttttcagggcttgaagggtatagggttataaataaagaagagaaagacagaatttcatataaaaatagtggcaggaaagtgaaagggatgatgccaccctcaaataatatatggaacttataatataaaagttataaaaagtatggctatacccaatttgtctctcgtaattttgtttcttccttacacatattctgattcttactgtcgttttcttcaagattcataggtaggttaatgcaaaaccgtgtttcttcatcaaagtggtcgcctcaaataatcacattcttctccaagtatggtcggtttggaatgtatccacgtggcggaacatcattggcttcatggggggaacgaatcttggtttaaccaatagaaactggtttcaaatctttgtctggcggcgcttctaactgaataaaactgtctcctttgtatcgtatccccacttgcgagaatcctttagttccttcgtgattgccgctgatcaatatgccatcatctcaattatttcttatatctaatctcttttctgaaataaaaatattatacttcattttgtatcatcttcattgtgtcgtcacaagtggctcgagtatgatcgtttgattggtcattagtgttagtttgttcatcttcccccatatatatctgatcttgtgttcataagttatgtctcgggagtatgttttaataccgcccaaaactatattataaccttttttcagtgtaaaaatatgaatcacttaaacgaggagtcgaggatgagagacaagctcgctcgttcacgagcatgtggctctagatggatatgaaacacatgatatagtgacgcaaacacaaacacaaacacgagcacaaacgcacacattaattagattcatatgcaagttcatacatagataaattaaaggcatagatatataaaaccaaaatttgtttaaaggtatagagatgaagaataaaggtccacatggtagatcatgtgggtccagcttgtaagcatgtgaagaaatccttggaggcatagatgggccaaccccagcatcacttctcagcttttctcatcatcatcatacacttttctgtcattatgcaaattccatattctagatctatatctaattaatcacacatataataagcattagcatatataacacatgtatataacaaattgtacatacccttctttacacttttccctcacatgaatccatctttttgttctttacttttatttatttctctttcacacacatctataagttaatgtactccaaatatctttaccaaataaatgtatcttaaattcccaagttgagaacatgaactatttgaatatagtttcaaagaaagtatttagaaaaaatatataatatgtaagacaaaaacccaaacttctgtctctttgtttatgctaagctaatttaaatttttaaagtgttattaacatttcagagtctagtgcatgtttattttctcctagaaaagatgagtgacaaaaataccaaaagagaaaggtacatctgtaaaattgataaagagttaagaaggaaaaaatgtttaaatcataaacttaatcgcatacacaacttagcttcaataaatttttgaaaattgtcaaaactcaaaaatggggagaagaggttaaacttggtttaaccggttcgttcattatacttccgggttagcattttgagcggttcttttccggtaaccaaaccggatagacattcgagttattgttcaaccggtttcaccgtcaaacgacgtcgttgtcacagtactgtccctcacaaaaacctcacaaaacctctctttcgttctcgtctcctccagaaccagtacaaccatg

SEQ ID NO: 22753 - DNA, 3000 bp, Unknown; identical to SEQ ID NO: 697
  misc_feature (1)..( 3000): 2750-1469P.txt file - cDNA_ID_2121851; gDNA_ID_1620308; Annot_ID_152894

SEQ ID NO: 22754 - DNA, 3003 bp, Unknown
  misc_feature (1)..( 3003): 2750-1469P.txt file - cDNA_ID_2121867; gDNA_ID_1620308; Annot_ID_152899
ttccttttctaattacttgataaactttaatctaaatttattgtggtgtcattttatcaacctcacaaactaaaagctaaactacatctctttgtaaaatagttcacatatgtcactattacattaattttacttttttatgaaaaacataattataagatcaaatcttatacctaatattcttatcacctctgtttgatcctaggtgaaacaaaaaaaaggtgaatcatctgatcatttatattgtaagaacaaaatttttttgcatatatgattcgagctagtttgtaacaaaaaaagcgctcaaatatgttgttggatgttgaagaggagaatccaatatatatgagaagtaatttttaaaagatcaagatatgtgttttcacatttcacaagctttcttaaaatattatagaccaaaataacagttgtttttttacattattacatgtttgcaatttcaaaaattaatctcacttacttatttgaaaatggaacaaaacctctataaattaatattctatctcataaattagtaacttctataattttaataaattctttctgttccaagttgggaccagtgtaaaaatgacataaatcgataaaataatattttttttcaaaatcatatataaacatatggtctctacaatataaataattaataattgtataaagttatcaataaatatattaagtgaaatataactctagtatttttatatattgtattaattcttggtagagtttatttctaatatttttactacattgaaaaggtttgcactatgttttaaacttaataattgtttttctacttgtaattgatttttgaaagatattaattataaaggaaataactgtgtttgagagagtatatatatattatatgataggattaagaaggatgttttatcttcattggtcaagatggaaaaaatagttaacatgatctctcatcttgaattatgtaataagtctatgcatttactgatccatttgaaatagcagaatatgaaatcaaattaattttattgagatggaagctaatgaactattaaatatgaagaatttgaaatcctttaccttttgcttatgtgatattaccaagctatgatgtgagtttgtatgtgatatcatgttttatatgtaatatttcgaaaacaaatatataaacaaataaagagaagcaaatgaaacaaaactttggcttttttatatatcatttgtcatttatcatttacaaacctaaaagtcaaagataaaccaaaggataccctgatttgttaatgttatgatatttgagcaaaactgtggagtataatatattataactcattgaatataaccacatagtcataacaaatcaaaataaaataaaagtttccaaaacgtagtcataacaaataacaaaattatttaaaggttttcaatttttacaagataaagtatattaaaaatgataaaatagaataatatgtaactttgttaacatcttggaaaaaatagaaaatttaatatgaagttgtgtctacgaattctatttatgttctagttattgtacatattcaaattaacgatgctaaatcattcttctgatattgagttgtgtcacatgttaagtatatttattttaattttcttagtatcataatgttttctttcttgtatgattaggtgcacatggaatatatgtcatactattttaaaattcatattttattaattcttttgtcatagctagccatcatatataggtagaccagtatataatagaaaaaaagaacacattcaaatgattttgatttcttctaacactagattaatcttaacttcacctttttttttgtcacagttaacatcttatataacttcatttcaaatgtctatattttttaatgtctacataaatatacatttcatcacacgatttacaatatgaatacatgtttataagcttttagatcatggaatataaaatagtgcactttttaattatgtcgatatagtctttgatttttaaaaaattaaagatgaaaaattagaaaattatgtgatgcattaggactcaataatagagactatacataataacaattgcagttagttcttagttggatataataggtcagtaaaatatattattacaaacatcaactctgcactacgcaagatgtagtaaattacgaaaatatatgataaacaaattcgcatactacattatgactacaatagccaccttccctatacattatgacttctaacattgaaaaaatttgcaaacatttggtgtaaattaacaaattaaaaacatttggtctaatgtatgaagaaaaaactagatattccgctaatttaaacaaacatttggccttataagaaattttaggtaagaaaaaattctgagaagtcttttttattcacatcacatagtcaatattcaattcaatgcatataaatttcatgtaaagcttcttttttcctcggatcccattcattattttacttaccattgaatactttcaccgtgtagtctttttttagaaatcgttgaatatcaaaaacaagaagaagaaaaagaaaccgtgttttcaatgtgctgtcatacgattcatgaccctttatgaatctaatacagagtttgaaacataaactaaacttggaagtttgccaaaaaaaaaaaaaaaaaaaaaacttggaaataacacttctcaaaaagatattgggtcaaagtctaaaactgaaaacgaaactagaggcattattctctaattcaaacaaagtttagggcttgggaagaaatattcacaaaaaggaagtttccgaaaattcttttatattattccccaagcaaaccattcaatatcattgattattgatataaaacccatataaaggtgtctctcatcatcctccattcccatacatcactttcctcgatctcactttctctctcttatcatcatctcctggtattctctctctctcatctccgtgatg

SEQ ID NO: 22755 - DNA, 3000 bp, Unknown; identical to SEQ ID NO: 704
  misc_feature (1)..( 3000): 2750-1469P.txt file - cDNA_ID_2121883; gDNA_ID_1620309; Annot_ID_152907

SEQ ID NO: 22756 - DNA, 3000 bp, Unknown; identical to SEQ ID NO: 709
  misc_feature (1)..( 3000): 2750-1469P.txt file - cDNA_ID_2121887; gDNA_ID_1620309; Annot_ID_152908

SEQ ID NO: 22757 - DNA, 3003 bp, Unknown
  misc_feature (1)..( 3003): 2750-1469P.txt file - cDNA_ID_2121918; gDNA_ID_1620309; Annot_ID_152918
atcaaaatctattaacatatttaacataaaatatattgtaaaatatacaaataatctaacgtagctgcataatgtgcttaattagctcaaatgacaattacaagtattaagctgattgattttatttttttaatcgatcaacttgagaaagagaaaagacacagttttaatgtggactggctagaggtttatcaaaaactgctttcatgtataaaatttattaaactcagggattattagtagttaacaaataagaataagataaaaacagcttatgagtttgtatgactgtcaaaatgtaatgtagaagtatagaattcaaagaagattaagaactcaaattataaagaataactctctttattagtttaggaagattctctcaaaacctaaactctcttaatctctcaaactcataagttgtatcacaccttgatacctccttatataataagcttttaaccttatcctaattattaaataactcctaatattataagataactcctaacaatatattctagattatctcctagaataataaagcttaatttccttttctctttagtaacttgctcttcaagttacttcttcttcttcaagcttattccaacaagaagaagttcagattgatgatattccaaaatagtgatatatattcgcatgagatgtaaatgaatttcgcaaagatgtgagaccaatacattcttatgttttgcggaagagataaaaatttactttgttaaattacaaatatttatgtatatactttttccaaaagaataataagctttgttacttgataccactttcttaaagaaaaaagaggggagaaattttatcatcgaaaagcaagaaaaattatacttttatccaccattcaataaagacaccaaattttcttctcaaatcgaaaaaaaaagtgttagcaaaaagaaaaaaatccaaaaaaaaaatattcataaaaccaaaatgttaaataataaataaataggtaggcgaatcagtttaagagttgtaggttctgaagagattgatttcagctagcttcatcgtaataataaaatttcaacatttgattttactgtcgaacgaactctcaagtctgaatgaatgtctaatttatcttaggtatttttgtcgtatgttgttggagtatacctaaagagcacgtgcatgggtacacgtgcatggcaggctttgttcgacttcgacaaacaagagatgtgaccataaccgttggatctgttttacctctttcacatattgtgaaaaattctgattcatgaataactaacaaaaatgactatgtccgtatatgatatctgatgggagtgaatagtgatcccgttaactgtgtatttaaactgaatacaactattgcaaagaaaaaggtgatagataaagttataattttcttattgatcactaatgtcaatcaatttttttaatacattgttttgttacttatactgcataccttcaaattaataagcattatagagattgtgcaattgataaatcagattaatgtttttatttgttggcaaagcaaatgtatcttattgtaactagatatacattacaatactttgtaaacataattcatttaagataaaatttacggatatataaaaacatatatatatatatatatacatataacaatttctttatgctatctgtatcaaagtactccttgaatccaaaaagattaactacactccactacagcctcatcattctttaggcagattgatcgatgcatttcgtattatatactctacaagcttgaaaaaatcacaaggcgtacacaattttgatctcccagtagtttgtttacatatgcgtaaagccctttctagtgcctaatattgttgtatctagatttttgtttatttttattttatttttggcaaatgaacctttgatgctacgaaaagatcttctaataaactgttccttttggtaaataacttcacattttatccccaaaaaaacatatagaaagaagtgtaaaaaataaaataaaaaacaaaaaaaatatagtaagattgtttttttgcactgagttaacatgagcatgtaggaacaaaaagtaagtaattattggacccaaaaaaccagaaaaaaaaatggagaggaaagggcaacacaaaaataacgagataatcattctcaatagaaaagatagaaatatcaactttctatgtgtcataacgcactactacaacaaaattacttcgaatatcttggtaatttaattacattttttaacagctcgcttcgaatttgcaaggctattaatcgatttttctaagatttaatataaatgaagcatttgatgctgtatgatgcataaatacatgattatcatttgtgaaaaaatgtaattaaaattactcttagcaaataccatgtctatacaaaactaaggatgtatgaacatgaaataaaatgaatcaaactaaaagaaaattgtttattatattgaaataattcatagtgaaactgcaaacatagggtgcctataaagtaatcaagggatgttaaattttttctatctctgcattttgaaattttattggctctgctgctatcactttcagcttatgattttccaccgccatccactttgctcttttaaaataatctcataaaggaaaagaaaaatacaattaaccacatattttaatcaaaatggctgcaacagtttaacatatcaaggtgctaatatacccacacacacacacttatatataggagctaatatagagtggtataggttaagacaaaagccatatataagtggagaacccaatatatctttgtctttgttgttttttccttctcgttcatagttaacttgcagatttcttagtatttctaatctttttcttatattaaccttttgtctccttctctctctctctctctctgaactatacaaaaacctacttttaatttctcttccaagaagtcaagaacccagaagaagacatg

SEQ ID NO: 22758 - DNA, 3003 bp, Unknown
  misc_feature (1)..( 3003): 2750-1469P.txt file - cDNA_ID_2121929; gDNA_ID_1620309; Annot_ID_152921
tgtctataaaatatttgtttgtctataaaatatttgtttttgtacgaaattgcatagattcgtttgagcatttcagcccaagctttagaggaagaaacattggttacataacgaactaccaagcccattcaaaagcccattagtgtataaaacgaaagccctaatttctccaatacgcaaagtgagtgtcgaagagagagagataatcgaagaagaagagaaatgaaattcacagattctccggtgatcgatctgacggtgaacggcacaaaactctcaatccaacaagacaatggctctatgcacgtcggaacttccgtctggccttgctcactaatcctatccaaattcgctgaacgctggtcaacactagactcatcatcatcaacaacatctccaaatccatacgccgaactcttcgatttccgtcgccgtcgaggaatcgagctaggaacaggatgcggagtcgccggtatggctttttacttactaggtctaacggagatcgtactcacagacatagcaccagtcatgcctgcgctaaaacacaatctgaaacggaacaaaacggcgttaggtaaatctctaaaaacctcgattgtttattggaacaatcgagatcagatctcggcgttgaaaccgccgtttgatttggttattgcggcggatgttgtgtatattgaggaatctgtagggcaattagtgacggcgatggagttgcttgtggcggatgatggtgcggtgttgttaggttatcagattaggtcaccggaagctgataagttgttttgggagttatgcgacatcgtttttaagattgagaaagttcctcatgagcatctgcattctgattatgcttatgaagaaactgatgtttatatctttaggaagaaggtgaagaagaatgaagctgaatcagtgtcatgaagctagttttggttctgtaatgttgttgttacattgatatgtaatttgtttcttgttatagaattcgaattatctcaactatttatattttcttagatattggctactaaaagatgacaaaggctgaaatcaaatttttgtaacgatttttttaagaagtatacaagttttgttgtgtgtttttgaaatatatacaaagtaagttctcttgcccaaagaaatatgtgaagtaaccaacattgtgtttctatattagactgataaatttgttcacaaatgtatttgtagaactctcaattgggtgattgtatttgcgagttttattccacatcgttgtggagcggctgcggttgaagaaccaaagttcggattagaaacagctcgaacaagccaatcccaaatcaaaccgcatacatacgtgatatggtatttctatagtgaaggaagtgtcagggtattactttcacctttcaatgttagctctctactcatatcataatctatggaaggaaaaacaaaattaaaaaatagaggaaaaaaaatgatctatatatcggacatgtaatttttagagcacacatattatcactagagaatcccatctaagcacatgttatgatgtttgtagtaagagttctcatatatatatgtatatggtgtaagacactgatgacagttctcatatatatatgtatatggtgtaagacactgatgacagtaaccaaatatgccgttttgagcagccacattcaacaatttatgaaatataatcaaaatctaaattgttcttgaaatcaaacttaaacacttccatctttctttgttctttgcataataaagctcttcatgagctattcaatttctatcttaatatttctcaagcttaatgggcatcagtctaatcttgtttattacaatttgaagttcatgatgattaaaagggggagctaaaccacattttctatatgctaaggtcgtagctaaagcatctagaatcattttcactaagaaatatattctctcttccaaactacacgtttactcttatgaagattggaaaatcagagtaaaaaaaaatgaatcgattggacgacaaaagaaattaataaacaggcttagttatgggctaatttggataatgggcctttatagaaccaaatcagtgaaaactactataaaaaaaagtaagcggttggatttattacatgaactgggcaacggtcaggtccaagatccaaacacaaagcgacaaaacacaagtccaaagaagaaaaaatatatttattttaaaattaaatttgataaatgcaaagcgagagaaacaaagagagagaaacgcgagccctgaatcaaactccctcgattttcacaaaaaccaacccaaagaaaaaaaagaaaagaatctgacaattcaccaaacaactctctcaaagtcttaaattaaaattttttgtcaatcaattcacaaactcaaatatctttttatttttcaatataaattttcgaaggaaaaaaagaaaagtagaaaaaaatcatgattatgaaagaaacgaatagtcagaggcaaaacactgttgttgttgttcgttcgttcgttcgattgttgttgctgttcttcttctcacgatttcatcttttatttcttttaatattaaaattgttctcggtttatattaatgatcttgtcgatattgcgagactaaaatgtttaatgtttttgattttatttgtgaaattcccaatcacattcttagtagtagagagagaaaggttttttctttttggtcttttggtggacagatttttattcttctttacttcttcttcctctttttcgtcaaaccataaacaataatccaaaccctttgttcttcagatatgttcttctcttgacacacacctaatctttctccaccaaaatttccgaccaagtctcatacttttgatctgtttttcaactttctcatcagcccaagtaagtatttttttcttacccatgactgaaatcaatttcattagtttttgtaatttctagggtttccaattttgtggatttggggattgttgcagaaaatg

SEQ ID NO: 22759 - DNA, 3003 bp, Unknown
  misc_feature (1)..( 3003): 2750-1469P.txt file - cDNA_ID_2121939; gDNA_ID_1620309; Annot_ID_152924
ggaagtcatgaataataatctgtattagcgattcctgaagaattaagatatgtcagctctctgttttcaaattagttaaacaaacaaattttaatatgaggtgaataatcttctcatgtctctcgttttccagggaaagtcgtataggatccatgcatcttcctacaacaaaatattaaaccccaagcctaatcacattcaaacgtttaaggccaaaacatctattacccgaagtaatatttatctaaacgatggaaaatacattttttcactcaaaagagatgggtttgttattaatatatgcctttaagcactttacataccaaaaatattcaattgaaataatctcatttatccggttttgtaatcttattattataatttatgatttttgtaccaccaaatattgtggcatacctatatatgatctcattcctctttattttgaagtgcctagaacactagtcttcttcttttcatggttacgaaaatgtttacagaaaatcatggatgattcaagaaaatagaccactttttgagatacttttccgtaaaccctaagtatatccataatatctctacattgaccaatgacaaatagtagtttagatattgatggacttatgggagctagtttttattattaactagattttaacccgcggtataccgcgggacgatttatttttaaaagtaatatatattaaaacttgcaaattttatttttacaaaatatttatattttacagtttataattgttattaagtaacgctataccacgaattcatgagacaattgttaaaaaaactgaagttttgacccctattaaaacagcatattaataatattttaaaattttataaatattgattcaaatacatccaccatataacccaattccaaaataaaacacgttctgtaatttctttacccgtcccatgattatttttttaagtagtaatttttaaaattttagaattatttttatatataaaagttttgcaaattgtatcattctctaatacatttatattttatagtttaaattaaattaattaaaatttagatatcaaatcttataagttgattttgattggctattatttttaaaaattaataatgtatttcgtttttaattaattaaattaattaaattagtatttgactttttaatccttaaagagataaattaatttactctttaaaattttatttctaatggcatacctatgtaattacttacaaaaattaaggttacatttaaaatgtacttcccaaataatatagtaggataaattgttttatctatgatttatgaatatccacatcagttctgtaaaaaataaaactaaaagaaaaaccaaggagaaaacaaatcgccttgtaaaaaaccgtttttgataaatgtaacatttaggttttgtgttagttaagatccgaaacaagacaaatcttatacacgccataatccagtatgtcgaaatctacaccgtattaattattgctactatgaacaaccattctatccgatcatagactttactcttatttgtcgttattatcataaaatgtcgtttaaataaattatttgtaggataccaattctttaattatattagttcaaacacgtataattttggtggtttttgaggatgaatatcatcaaagataaatgcattttggtgaaataaataatcaaataattattttaaattatctttatgcaccactatttttaataaattggactcttacaacgttttccttaaaaaaaatcatggatcttaaaacttatacccaaacaaatatgtagaaaattattattatatatataaatatatatatatatatataagctatacaaaatcttattatatagtagtagcgcttgattctaaaatagcataattagacgaaaaagcatgcattttgtaacattttatactttgtaagtaaaacacataaaaaataattttatgaataagaaatccacataaaaaaaaaaagaagtaacatactgtgaaaaattaggaaactttttgaggcaccaattttttatgccactttcaaaaaagcattaatgaaaatttgtttaaaatatcattttaaaatttgacgtacaaaagtacaaaacctcatacaatttcaaaactttacaaagactcaataacatgtgttatagagactttataaactttcttataacatactctataattttttatatccatatatttgtgatatttttgaaaatggataaaataaatttgatatttttataaatagaaaatattaatggtatttttgaatttttcccaaaataattattagtcttatactccaaaatgtaaaaaaaaatcactttttattaaaaaaatacttacgcatttgcttaattgctagtcgtcaaagttttgtcattttatgcaaatactaaaaaaatgtagaaagcatttcctctttatttttgggacaaccaagaaaggagcatttcaatagtgtatacatagacaaaaatatttctcatttcctatatttgactctttaaatctttaatagctcttgtaattttttccattcattgtaatacagccataatgtttaaaaggaaactgtcaattataaacttatactagaatataaaatatggtattgaattgaatattttcaaaaataaaatattaaatttacgaaaagaataaaaaaacttaaaaatctctctctcctatctctcaaccacaacttatttttcatgtcagtatccaccaacacatatatacggcatataaaagattttaataaaaccttggaactatctatatctattcagacacacacgtctatatatatatatacactcatatactactttcactgtatcattcttgttttctctaaatttttcaaaaaacctttagaattttcatttttttacgattccgatgttaactgtttctccggctccagtactcatcggaaacaactcaaaggatacttacatg

SEQ ID NO: 22760 - DNA, 3000 bp, Unknown; identical to SEQ ID NO: 707
  misc_feature (1)..( 3000): 2750-1469P.txt file - cDNA_ID_2121943; gDNA_ID_1620309; Annot_ID_152925

SEQ ID NO: 22761 - DNA, 987 bp, Unknown; identical to SEQ ID NO: 712
  misc_feature (1)..( 987): 2750-1469P.txt file - cDNA_ID_2121994; gDNA_ID_1620310; Annot_ID_152941

SEQ ID NO: 22762 - DNA, 3000 bp, Unknown; identical to SEQ ID NO: 718
  misc_feature (1)..( 3000): 2750-1469P.txt file - cDNA_ID_2122018; gDNA_ID_1620310; Annot_ID_152949

SEQ ID NO: 22763 - DNA, 3000 bp, Unknown; identical to SEQ ID NO: 718
  misc_feature (1)..( 3000): 2750-1469P.txt file - cDNA_ID_2122018; gDNA_ID_2926224; Annot_ID_203432

SEQ ID NO: 22764 - DNA, 3000 bp, Unknown
  misc_feature (1)..( 3000): 2750-1469P.txt file - cDNA_ID_2122026; gDNA_ID_1620310; Annot_ID_152951
atgaaacattattctgacatacattaaaaaattagtttaagaatatttttgcaaaacttatgcgatgtgataagctcactttttttaggtgacatgttcgatcataaggtgccaataattccctagaaatagattaatctctatgtaaaatatcgaatcgtctagtgacaagtacatggtatacctacctattcacttattatttctatttttgtcgtcctcatgcatcttatgttataatatcaaatgacggaaaatgagggatgaattctataagctaagaaaactaaaataagggggaaattgcaagaagaatgaaagcaacctttcaaatatccttatcttatccaatccttttcaggccattgacttattttctaattaacctaattatatatataagaaaaagctaaggcatcttatatttatatatacatatatcaattgattgctaataatgttttgattaactctgcatatggcatgttttccagcgatttaagttcacaaagaagattttcgtttttgtcatcactaaaaattatctagttctttctactttttcagcgtacaataatctttttttctatcaattggtacgttttttattttctcaattttaattttgttttctaggtacatttttaatcgaattgcaccaaaatatccaaacaaatcaataaaacaggcagaatgaggtattaccgtattagttaaacgagaagtggctactttcctcagcgtgattaaaatgcttatgggttcagtttcataattctcatatacggaactacgcatttgacctcatgctctctataaatattaagatctgatgttgagagcccattagaactaagtttacgaatgagcccatgatagtttaacttgggcctaattagtgtctaatctgcttctaacgttaccgagtcaaacgcggtctaaactaatttgtagagtagtgtatttgtccaaagcgtacccacacaattgctgagaaacttcaaaccctaagtgtgtgtctagtattttgcaatatacgacgcataaagaaatatcctaacattgacaacaacaaaaaaaaatcttagcggagatatagacgtgtgagacaagagctcacacgtgttgcacattcgagacttgttgataatgacgacaacaagaggttctagaatattcgtgttggtttcattattattagcaaataagaccaagtcaacaaactaacttaaacattgtggatcgtccacttgtccgactcttacgtcaaacccatcattgttccacatatctccacgcgtcaatctctctataaatacgaacaaatgaacacgtatcaattcaactcaaaaagtaacaatttgaattacttccgcaaatctaaaataatatctagtgaagcgaatatgtgtttctttgataatcggtgcgatcagaatctgacggtggtggtggatgtggcgtggtggatggaggctgttcctccacaaatcatttctccggcgaagccatcggtttctccgattcttgagacgattttagaaggcggagagaccgaagaagacaatcaagaacaagaaaacgaggacgtgtaaattgtaatgatcattttgttactcggtcttgggtttaagatagactcttgttgttgttgttgttttttctataactgtataagatgagattttgtattgtatcttttgtacaatcaaatctcagttctttgtgaaattttcattcaactttcacatcttgtacgctcggtgatctgttgttatatgctcacgagttggtaattaaagacaaatcttaatatactttctaaccgaaccgggacgataaccggtccacgacaaaaaatcagtatcttcaaatatcaaaccaaacttaaacctgaaaccagtctcaccgctatttctgtttggtgcgatcattttctcaaccaaaagaatctaatttacattaatttttaataaagacatgtatgatttatctgcaaactaaagcagtgtacgcatacttatgtttcaactttcgagcatcacctaaatatgaaacataaatatcacgtgcgataagtattaagctgcgtcctataaaaaagtatacaaatatataaagatcacttgatgattagttaattacactactactattcctctctatctctataaatatcagcaataacaataatttccacatagatcttctcaacacagtcgaaagctgccgaagtctaaatcgaagaaagagtatatttacaaatcatggctaggatgatcggaccattcgaaactgtaccggcgattcttgtttatccgatgagggtttcagcttcgccttcgctggggacaatttatgaggaacacgatgagtaaaattttaacaagacaagatcaaaactcgagtgtttaattattttttaatccattttaatgaaatattcattttgaaatatatcttgatagtgctttctatttcttggttgatttccactttaaactcttttttatcgacgttattatgatctcctatataatcagacataagagaagatgtttcttaatgacgatcagtgcaagatgtttcttaatgacgagcagtgcttcttgtaatcgccggtattaatggatgtgtttctttgttttccgatcaacctccaaaaccaatctcgtgtctccggttttgtcatttcgtttcttcttattttgtaaccgtgatattgttgtgaggccttgggcctattgcctgcctagtgctactgataatgatttctttgttttatgtgattaaaagtaataatcaatttcccatggtaattaatcaagtttaatactaatttataatatatacaaataaacgttttggtgtttcttcgtcgacgtcgctatctccaatctcattactcccctttctcaatgatcataaaacctacttcgattctactccttatcaactgaatcaccgaaaaacctcaccttttttctttttccgatcatg

SEQ ID NO: 22765 - DNA, 3000 bp, Unknown; identical to SEQ ID NO: 22764
  misc_feature (1)..( 3000): 2750-1469P.txt file - cDNA_ID_2122026; gDNA_ID_2926224; Annot_ID_142502

SEQ ID NO: 22766 - DNA, 3000 bp, Unknown; identical to SEQ ID NO: 22764
  misc_feature (1)..( 3000): 2750-1469P.txt file - cDNA_ID_2122026; gDNA_ID_2926224; Annot_ID_203434

SEQ ID NO: 22767 - DNA, 3000 bp, Unknown; identical to SEQ ID NO: 717
  misc_feature (1)..( 3000): 2750-1469P.txt file - cDNA_ID_2122045; gDNA_ID_1620310; Annot_ID_152958

SEQ ID NO: 22768 - DNA, 3000 bp, Unknown; identical to SEQ ID NO: 717
  misc_feature (1)..( 3000): 2750-1469P.txt file - cDNA_ID_2122045; gDNA_ID_2926224; Annot_ID_142508

SEQ ID NO: 22769 - DNA, 3000 bp, Unknown; identical to SEQ ID NO: 717
  misc_feature (1)..( 3000): 2750-1469P.txt file - cDNA_ID_2122045; gDNA_ID_2926224; Annot_ID_203440

SEQ ID NO: 22770 - DNA, 3003 bp, Unknown
  misc_feature (1)..( 3003): 2750-1469P.txt file - cDNA_ID_2122063; gDNA_ID_1620310; Annot_ID_152963
cgcagcttaagtggggaagggggaagtgggactggaagcctttcacggttgcaaggtttgggacgtgctgcccggagacacttatctgcgatccttgatgaattttggggacatttatatgattttcatgggcaattggttgctgaagccagggcaaagaaactagatcagctgtttggcactgatcaaaagtcagcctcttctatgaaagcagattcgtttggaaaagacattagcagtggatattgcatgtcaccaactgcgaagggaatggattcacagatgacttcaagtttatatgattcactgaagcagcagaggacaccgggaagtatcgattcgttgtatggattacaaagaggttcgtcaccgtcaccgttggtcaaccgtatgcagatgttgggtgcatatggtaacaccactaataataataatgcttacgaattgagtgagagaagatactctagcctgcgtgctccatcatcttcagagggttgggaacaccaacaaccagctacagttcacggataccagatgaagtcatatgtagacaatttggcaaaagaaaggcttgaagccttacaatcccgtggagagatcccgacatcgagatctatggcgcttggtacattgagctatacacagcaacttgctttagccttgaaacagaagtcccagaatggtctaacccctggaccagctcctgggtttgagaattttgctgggtctagaagcatatcgcgacaatctgaaagatcttattacggtgttccatcttctggcaatactgatactgttggcgcagcagtagccaatgagaaaaaatatagtagcatgccagatatctcaggattgtctatgtccgcaaggaacatgcatttaccaaacaacaagagtggatactgggatccgtcaagtggaggaggagggtatggtgcgtcttatggtcggttaagcaatgaatcatcgttatattctaatttggggtcacgggtgggagtaccctcgacttatgatgacatttctcaatcaagaggaggctacagagatgcctacagtttgccacagagtgcaacaacagggaccggatcgctttggtccagacagccctttgagcagtttggtgtagcggagaggaatggtgctgttggtgaggagctcaggaatagatcgaatccgatcaatatagacaacaacgcttcttctaatgttgatgcagaggctaagcttcttcagtcgttcaggcactgtattctaaagcttattaaacttgaaggatccgagtggttgtttggacaaagcgatggagttgatgaagaactgattgaccgggtagctgcacgagagaagtttatctatgaagctgaagctcgagaaataaaccaggtgggtcacatgggggagccactaatttcatcggttcctaactgtggagatggttgcgtttggagagctgatttgattgtgagctttggagtttggtgcattcaccgtgtccttgacttgtctctcatggagagtcggcctgagctttggggaaagtacacttacgttctcaaccgcctacaggtaacaaaaaccgcagtagttcattgaaaatcacagttttgcagtttgaaaatattgacatgtatggatttaaacagggagtgattgatccggcgttctcaaagctgcggacaccaatgacaccgtgcttttgccttcagattccagcgagccaccagagagcgagtccgacttcagctaacggaatgttacctccggctgcaaaaccggctaaaggcaaatgcacaaccgcagtcacacttcttgatctaatcaaagacgttgaaatggcaatctcttgtagaaaaggccgaaccggtacagctgcaggtgatgtggctttcccaaaggggaaagagaatttggcttcggttttgaagcggtataaacgtcggttatcgaataaaccagtaggtatgaatcaggatggacccggttcaagaaaaaacgtgactgcgtacggatcattgggttgaagaagaagaacattgtgagaaatctcatgatcaaagtgacgtcgagagggaagccgaagaatcaaaactctcgcttttgattgctcctctgcttcgttaattgtgtattaagaaaagaagaaaaaaaatggatttttgttgcttcagaatttttcgctctttttttcttaatttggttgtaatgttatgtttatatacatatatcatcatcataggaccatagctacaaaccgaatccggtttgtgtaattctatgcggaatcataaagaaatcgtcggtttgaaatgttaaatctcctaaaccggatctctgcacgtagctgacacatcgacgctagattactgacacgtgtccttatcaatatttcttctcgaaacgtcttactgtttcataaagtccttcaaatttctggggaactaagaaaatccagcagagtaactaatccaatgggttatgtaatctacatatcgttcccggcgattcttctccttctgatcgtcgctatcgccttttatctcatcggacgaaaaatcggccggagagaagggattcaatcaacgtcgcagttacactacggaccgccgttggctaattttccggcacctgcaccaccgcataaagctatggagaagccaccggagccggtttagtgtatgtatgatgacgtaataatacttacgtattacgtaaacgttctatatatgtagtttgtgtgttaaataagatgtaattgggccgatgctgaaaccaattttaaaacaactctttattgggcctggggtttaaggaaacacttcgtgccgtttaaattccgtactcacctaatgcaacctagaaactacgcagcgttttgacggaagaagaaatattcgcttcttcttttacaacttttgtcccacaacgcagaaaagtcctctctttctctctctcgaataataatttttcatttgctgcgtccttttggtgcttgaagcgatg

SEQ ID NO: 22771 - DNA, 3003 bp, Unknown
  misc_feature (1)..( 3003): 2750-1469P.txt file - cDNA_ID_2122063; gDNA_ID_2926221; Annot_ID_142407
ttaagtggggaagggggaagtgggactggaagcctttcacggttgcaaggtttgggacgtgctgcccggagacacttatctgcgatccttgatgaattttggggacatttatatgattttcatgggcaattggttgctgaagccagggcaaagaaactagatcagctgtttggcactgatcaaaagtcagcctcttctatgaaagcagattcgtttggaaaagacattagcagtggatattgcatgtcaccaactgcgaagggaatggattcacagatgacttcaagtttatatgattcactgaagcagcagaggacaccgggaagtatcgattcgttgtatggattacaaagaggttcgtcaccgtcaccgttggtcaaccgtatgcagatgttgggtgcatatggtaacaccactaataataataatgcttacgaattgagtgagagaagatactctagcctgcgtgctccatcatcttcagagggttgggaacaccaacaaccagctacagttcacggataccagatgaagtcatatgtagacaatttggcaaaagaaaggcttgaagccttacaatcccgtggagagatcccgacatcgagatctatggcgcttggtacattgagctatacacagcaacttgctttagccttgaaacagaagtcccagaatggtctaacccctggaccagctcctgggtttgagaattttgctgggtctagaagcatatcgcgacaatctgaaagatcttattacggtgttccatcttctggcaatactgatactgttggcgcagcagtagccaatgagaaaaaatatagtagcatgccagatatctcaggattgtctatgtccgcaaggaacatgcatttaccaaacaacaagagtggatactgggatccgtcaagtggaggaggagggtatggtgcgtcttatggtcggttaagcaatgaatcatcgttatattctaatttggggtcacgggtgggagtaccctcgacttatgatgacatttctcaatcaagaggaggctacagagatgcctacagtttgccacagagtgcaacaacagggaccggatcgctttggtccagacagccctttgagcagtttggtgtagcggagaggaatggtgctgttggtgaggagctcaggaatagatcgaatccgatcaatatagacaacaacgcttcttctaatgttgatgcagaggctaagcttcttcagtcgttcaggcactgtattctaaagcttattaaacttgaaggatccgagtggttgtttggacaaagcgatggagttgatgaagaactgattgaccgggtagctgcacgagagaagtttatctatgaagctgaagctcgagaaataaaccaggtgggtcacatgggggagccactaatttcatcggttcctaactgtggagatggttgcgtttggagagctgatttgattgtgagctttggagtttggtgcattcaccgtgtccttgacttgtctctcatggagagtcggcctgagctttggggaaagtacacttacgttctcaaccgcctacaggtaacaaaaaccgcagtagttcattgaaaatcacagttttgcagtttgaaaatattgacatgtatggatttaaacagggagtgattgatccggcgttctcaaagctgcggacaccaatgacaccgtgcttttgccttcagattccagcgagccaccagagagcgagtccgacttcagctaacggaatgttacctccggctgcaaaaccggctaaaggcaaatgcacaaccgcagtcacacttcttgatctaatcaaagacgttgaaatggcaatctcttgtagaaaaggccgaaccggtacagctgcaggtgatgtggctttcccaaaggggaaagagaatttggcttcggttttgaagcggtataaacgtcggttatcgaataaaccagtaggtatgaatcaggatggacccggttcaagaaaaaacgtgactgcgtacggatcattgggttgaagaagaagaacattgtgagaaatctcatgatcaaagtgacgtcgagagggaagccgaagaatcaaaactctcgcttttgattgctcctctgcttcgttaattgtgtattaagaaaagaagaaaaaaaatggatttttgttgcttcagaatttttcgctctttttttcttaatttggttgtaatgttatgtttatatacatatatcatcatcataggaccatagctacaaaccgaatccggtttgtgtaattctatgcggaatcataaagaaatcgtcggtttgaaatgttaaatctcctaaaccggatctctgcacgtagctgacacatcgacgctagattactgacacgtgtccttatcaatatttcttctcgaaacgtcttactgtttcataaagtccttcaaatttctggggaactaagaaaatccagcagagtaactaatccaatgggttatgtaatctacatatcgttcccggcgattcttctccttctgatcgtcgctatcgccttttatctcatcggacgaaaaatcggccggagagaagggattcaatcaacgtcgcagttacactacggaccgccgttggctaattttccggcacctgcaccaccgcataaagctatggagaagccaccggagccggtttagtgtatgtatgatgacgtaataatacttacgtattacgtaaacgttctatatatgtagtttgtgtgttaaataagatgtaattgggccgatgctgaaaccaattttaaaacaactctttattgggcctggggtttaaggaaacacttcgtgccgtttaaattccgtactcacctaatgcaacctagaaactacgcagcgttttgacggaagaagaaatattcgcttcttcttttacaacttttgtcccacaacgcagaaaagtcctctctttctctctctcgaataataatttttcatttgctgcgtccttttggtgcttgaagcgatgaccatg

SEQ ID NO: 22772 - DNA, 3003 bp, Unknown; identical to SEQ ID NO: 22770
  misc_feature (1)..( 3003): 2750-1469P.txt file - cDNA_ID_2122063; gDNA_ID_2926221; Annot_ID_203289

SEQ ID NO: 22773 - DNA, 3003 bp, Unknown; identical to SEQ ID NO: 22770
  misc_feature (1)..( 3003): 2750-1469P.txt file - cDNA_ID_2122063; gDNA_ID_2926224; Annot_ID_203444

SEQ ID NO: 22774 - DNA, 3003 bp, Unknown
  misc_feature (1)..( 3003): 2750-1469P.txt file - cDNA_ID_2122067; gDNA_ID_1620310; Annot_ID_152964
cgccttttatctcatcggacgaaaaatcggccggagagaagggattcaatcaacgtcgcagttacactacggaccgccgttggctaattttccggcacctgcaccaccgcataaagctatggagaagccaccggagccggtttagtgtatgtatgatgacgtaataatacttacgtattacgtaaacgttctatatatgtagtttgtgtgttaaataagatgtaattgggccgatgctgaaaccaattttaaaacaactctttattgggcctggggtttaaggaaacacttcgtgccgtttaaattccgtactcacctaatgcaacctagaaactacgcagcgttttgacggaagaagaaatattcgcttcttcttttacaacttttgtcccacaacgcagaaaagtcctctctttctctctctcgaataataatttttcatttgctgcgtccttttggtgcttgaagcgatgaccatggcagcaaatctagcgcgacggctgatcggaaaccgatcgactcagatccttggagccgtgaactctagctcaggtgcggctagttctgtcgctagggctttctgctcctccaccactccgatcaccgcaactctcttccctggcgatgggatcggtcccgagatcgccgaatctgtcaaaaaggtccctcatcctaatctcttttctgcgcagaatttcgagttctggaagtcatagttacgagataattgtttgattgaattttgtacgataatttgtgggaattcggcaattttgttgatagtttttgcgttttgtactgatccaggtgtttacaacagctggtgtaccaattgagtgggaagaacactatgttgggactgagatagatccgagaacacagagtttcttgacatgggaaagtctcgaatctgtgcgtagaaacaaagttggtttgaaaggtccaatggctactccaattgggaaaggtcaccgttctttgaacctgactcttaggaaagagcttaatctatatgccaatgttagaccttgttacagtcttcctggttacaaaactcgttacgatgatgttgatctcattaccatcagagaaaacacggaaggagaatacagtggccttgaacatcaggtttagtttgttttaagtctattgatcgaatatttcaggttagttcttctaataaatgattctaatgatggttttgttttctcctgacgcatataataggttgttagaggtgtggtggaaagtcttaaaatcattacccgtcaggcgagtttgagagttgcagagtatgcttttctctatgccaagactcatggaagagagagagtttctgctatccacaaagccaacattatgcagaaaactgacggtctctttctcaaggtctgcccgttttataactccaagcatttcttatacggagggatcaaagcaatgattgttatttctgctagtttttttttttttacattttgttctgagaccatttttattttgcttccgtttttcagtgttgtcgtgaggttgctgagaagtatcctgagatcacttacgaggaggtcgttattgacaactgctgtatgatggtaagctatgacaccgaatctactattttttcgttaattaagttagtggtcgggactcgggatcaccttgtagatttagaagtttggtttcttagcaacttgtatttgagttctgcttttccactgtttttacatgtggaatatgcgactgataatcttgagatacctgcagcttgtgaaaaacccagcactttttgatgtcttggtgatgccaaacctgtacggtgacattattagcgatctgtgtgccggattggttggaggactaggattgactccaaggtaaaaacacttgttccttcatcttgtgtaatagtgatctttagtatgattatgagctacatcatcttaaggccttattatctttgacgcagttgtaatattggagaagatggtgtagcccttgctgaagcagttcacggttctgcacctgatatcgctggaaaggttggtccttcaaacaatatatcattccaatttcatcatttacgggctaaagagtatcatttatgcatccaatgttgaaagattaatatgtgtgatttttaaatttgttgttgtctttctgttttgggtgatgtagaacttggcgaacccaaccgcgttgcttctgagtggagtgatgatgttgcgtcacctgaagttcaacgaacaagcagaacaaatccacagtgcaatcatcaacaccatagcagagggcaaatacagaaccgcggatcttggaggtagttcgaccaccacggaattcacaaaggcaatctgtgatcatctctgaacatcgtaaaatccaattctttatcgaatcttcttttgggagccttttttatagcctcgaattcttcttgttttcttgttttacgattagaataaaagaaaaagcaaaaaaacggctcttcatgagttttgaagttattgtttctgccttaaaatttctctgccgtaaggcaagaagattcataacactggaaaaagtgatgttctttctgaatcgatcagaagaattttgttttgttgcttgaattgtttacatactcttataacttcaatcagtttatcaatttcatacatacatccaaacctttttttttcttttcactcgtagaataaaatgagtaaattactatgattatgaatgaaatgacaaaatcatcaaatgaagaaaactcatacatttgtaaaccatttcaatacaaattagtcggtccacaaagaaaagagtactaatttagtttaaaaattatacttaaaaaaaatctaaaaagagaataataatgtgtcgttggtgcaccaacttcccctcgagctaagattataaaggcaagacgcttcactcagcagcagtaactaaacttgcctccaaaaaccaatcccagatctgaatctcaacctaaacctcagattcatcatcatg

SEQ ID NO: 22775 - DNA, 3003 bp, Unknown; identical to SEQ ID NO: 22774
  misc_feature (1)..( 3003): 2750-1469P.txt file - cDNA_ID_2122067; gDNA_ID_2926221; Annot_ID_142408

SEQ ID NO: 22776 - DNA, 3003 bp, Unknown; identical to SEQ ID NO: 22774
  misc_feature (1)..( 3003): 2750-1469P.txt file - cDNA_ID_2122067; gDNA_ID_2926221; Annot_ID_203290

SEQ ID NO: 22777 - DNA, 3003 bp, Unknown
  misc_feature (1)..( 3003): 2750-1469P.txt file - cDNA_ID_2122129; gDNA_ID_1620311; Annot_ID_152988
ggctcactggcaatgttgctcattactctctatccacggttgccttctggaccaaatgacaaccgttgtcacctccaggcaagtttaaatctcttatttattctttgcatcgctcttttttgtctaatatgtcaattctatagaagcaagagttgcttttctatagaaaatgctacccaacaccaatcactttgtcgattgtgatatcaaagacatgctaagcttggaagttggtttcaaacttttgttgtgctatttatgcttttgcaagaatacatctgacaaggtgaattttccttttttttaggcattcaggcatttatatgtccttgcaacagaggctcgctggctgcagaccattgatgttgattctggtctgcctgtctatgcccctctagaagtcacagtaaaagagacaaaactttattcagaaacaaaattttgcgagataacaccgtgcattctgccagagcgtgctattgtaagaaaagttcaacatcttgccttgcatattttttatgaacaaactacagaaggtttcttgatttgcatgtcacactgctttctacaagattatgaaaaaaaaatagttttctggtagaagcacatttgtggcaactgcaagttgaaacatcagaaaactaggccatataccagcttgtctcaatgctggtttaagttttttcatgaaatacttgctcagccattctacctgtttgtttcgtccacgtcacctaaaaatgtatttgtatcctgcagctaaagagaatttgtgtatgtggtccccgatactggccccaacaaattgagctagtccccgaaggtggttgatgcatttgcttatatattccttatttgtccttggtcatttcgtctacctggttttaagataatttatttttatccaatgaaatatagagaaaaattggtggagctttggggacaagagtgatcccttcagttctggtgttatatatgtcaaaaggaaagtaggagcttgttcgtatgttgatgatccagttgggtgtcagtcactgctttcgcgagcaatgcataaggttgtatacgccatcatatactcttgactcagatagattaatattcagtcatagaaaactggttctgatacacgtttgtatgctttctgtgatacaggtttttggtttaaggactctgggagaatctaatttgattgctaatagtcatagagaactggattctgatagtgttgatcacttggtcagcactttctcatcagatccaagcctaatagcgtttgcacagttgtgctgtgacaaatcttggaataacaggtaagtactgttttatccggttgattcacatttatttgtgcttttagttccataagtcataacagagttcggtagtttgcttggcaaactcagaagggcgaattctaacatattcattgatccagatctgattctgaattcaaggagttctgtctgcaagtgttgtttgactgtataagcaaggatagaccagctcttttgcaggtgattgctacttacagccacctaaccctactattcaatgtttaacggaacaattcttgatgcagtttatttggcaatgtgtattctaatattgagtatacgttacataattgttgtaggtttatttatctttgtacacaaccattggttcgatggctgatctgcttgtcaaaagcgatagtaacatgtgtgattcactttccatctcaagcctcaaggtactgttcctgcaaagatggaactgaaacaaagaacattgattcacattttgacttttgtaatcagctttgatttcctaattttggatctaatcttatggtctcaggttgctcttgcctacaatgaggcagtatcaactggaagattggcctcctcaggtggctttgtacagtcaatcttcttagcatcgctgagaaagcgatgtgaagaggttttgaattgctcaacggagctgaagattaatttgaggaattatttgacctcagaagcatggccttatgataagaactcaaagttgcagaaagatataattattctctcatggtatctaaaatggttcaacgtaccatctccatcgatcatcaaagcagcagtggaaaagatcaaatccaagtccaaaaactcaacttcggcaatacctttgttgcgattgttgttaccaaatacgcatattagtgtgattggtgaaattgatagggtctttttcccctcgaattaaacaattgtattgtgaaaacatgattttgtattctcttcgtttgggctaataagctgataaattttgtgagcaaagctatcatggtcaatttcaaactcaaatgtgcatgacaaaagcataatataaaataagctaaattttaaaagatatttagttgatgttttttaaagaatatttatgagatcaatttttttaaaaaagtattagaatagacatggagttaaatggaagtgttaagatcatacactgtaatagtgagatggtttaaatatggtttgacacttgtaaattcaattataaaattttataatttgtcctccatatttgcaattgcattacgacataacctgtttcaaattcttcttagtcgcaacatggacaaccttttaccgagcattgagatgtgtgactggaatgccaaggtgttcagaatcatcttccattgtgctgaccgcatctccttcactcatctcgagatttaccggagtggacaagtctacaagtttgtgcacgggactcctcactatcttgtggttaacgtgacgtgagagggtgttcagattcgaattcaggagaaatagagtggatatttagtttttctatgttttattttaaaattgtagtagatgtgtatgctttgacattagatgtttatatctatttttgacaaacgagatgtaaaagaaacgaaaatatatatccagacacaagattttgggaggttattttgtttattagattgttataatttagtcgttaaaatccatg

SEQ ID NO: 22778 - DNA, 3003 bp, Unknown
  misc_feature (1)..( 3003): 2750-1469P.txt file - cDNA_ID_2122135; gDNA_ID_1620311; Annot_ID_152989
caaaccatttcaaattttcatttcaaattacaggttgcagtgcttgacattggtgtgccgtcagtattatttgttacaaatagcttatctgactcaggttctccgatcaagtcactctatgtgaaatcctcttcagctccaacaggctcaaaaagtgatccaactgatcacaactccataaattctgaagatgatttactcttgtgtgcaatgaccaaagatggacagaccattcttttggatggcaatactgggaaaatacttgcctcttgcctgagacctctaaagaacccaactgcgatttgtatgcacattataggtattttatctgatactaacataaaagtgtgttttcttatgcatctagtattcataaaaataattctattttgcagagaactgctatgaaaactatgaaacgcccagtgaaaaaccagctgaaaatccatctgggaaggataaacatgagaacaaatctcatataatcaaagctagtgagagtcattcaccagacggtgaacagaatgctgtcacagaaacaaaacttattgatcagatatttgcgaattcattatttctcatgtgttctgaggatgcactgcgcttgtatactgtaaagtctctatctcaggtatatcacagtatttatcctttttatgatacctaaagtatcttgctggctctttctgataacaaggacttgctttcaatacctagggaagtcttgagagcattatggaggtaaatcttccaaggccgtgttgctggatgggaatcctaaaaaaagatggaagggaatgtgcagtactcctgttttaccgaacagggcatattgaaataaggtgactttcaaatatatgtcagataaaagttagttaccaaaatacaatcttgtaactatttagtctgaaggctactatagatggaccattgattgctcagaaagaatggtttcttaattgaacagatctttcccgaatcttgaagttgtgggagagagctctttgctgtcacttcttaggtggaacttcaagcctaacatggagaagacagtatgttcagatgatttcggccatgtcgtcctggtgagatttcttagaagagagcttttcaacatgtgatgtattaagtatgccaagttaaatcttgatgtataagttggcatgtagaataatatcataagagaatgtttttgttatctcagatgttaaggactaataaaaactaaatctacaggtaaatggttgtgaagttgccatcctttcgtttttggcccacgcaaacggcttcaggtactggcttactgtttgctgttccatagaactttcgtatgcttagctagcaaagtagcaattaagttaccaatacctaacttttcattcatctcaggctcccagagtctttacctttgcttcatgacaaagtccttgcagcagctgctgacgctacctttagccatatctctgttcataagaaaaatcatgtatgttctgctttcacatgtgaaccctttttttgtaagctccactgttttgctagaaaagtttctgtgaccacaggatggcgctcccaaattcctaagtaacattatcaaaggcttcagatcaagcactgaacagaagatggaccaagtacaagatttctcccacctggggaacatcttttctaatccaccatacttaaaaccttctgataccggtggcgacgacgaaaagattgttgagctaaacataggtttgtaatatctacactaagttactcctccccgggttcctgcctctgactaaaaattgttttctgtagatgacatcgagatagatgaacctgtgatcatcttgccgttgacagagaaagacaaaaaagaaaagaaaggtaaaagatctgtacgcctcaagttctagtatcattgtgaatgcatgagacgattcatgaggtttctttgcagataagagaacggataaggaaaagctgttcgacggtgcatccagcgatgcacaacccaaaacaagaacagtggatgaaattaagtccaaatacagaaaagctggggtgagtcatgaccaatttgatatacccaactagcttcttttttgtgcttccatctctaacatagttgggtaatttttccaggaaacctcagcaatagcttcacaagcgaaggacaaacttcatgagcggggagaaaaactcgaggtcatatattacgctgcagagatttcatcttcatttatgtttccaagctatgtatgctaactacaaaaacatctcctttctttgttttatctgccagagaatcagccaacgcacagctgagcttcaagacaatgctgagaactttgcatccatggcacatgaacttgctaagcaaatggagaagcgaaaatggtggaacatatgagagagttgcagccattgtgggctcttccgtatataaactaattatcttttgtgtttccacaggtgaaaatttctttttcatgtttatttatcaatcaaatctgtaaaatagattgaccaaagagagcaacccttctaacttgaaaagttgcttgtgagctgatttgaggctgctttgactgtctatcagaattttaaatttaaaaaaaaaaaaacacagtttgttttgtcctttacttgatcccacagctttacttgacgacacacttttgtttgttatgagttatgacacatttgactaatgcttaaaaccctaaatcccgctttattccttctccttttctttctagttacacaacacagaacagaacaccacacattcgtacttacatatctacttataattgaaagaggacctcatatagaaatagccttcgagctagaaaagcacatagaagactgattacgagagatagacgacgacgacaaggatcaaccaacacagaatccatctctctatctctctacgttatctcttcattcagagagtgcaaatagaacgacagagactttttcctcttttcttcttgggaagaggctccaatg

SEQ ID NO: 22779 - DNA, 3000 bp, Unknown; identical to SEQ ID NO: 741
  misc_feature (1)..( 3000): 2750-1469P.txt file - cDNA_ID_2122205; gDNA_ID_1620313; Annot_ID_153063

SEQ ID NO: 22780 - DNA, 3000 bp, Unknown; identical to SEQ ID NO: 743
  misc_feature (1)..( 3000): 2750-1469P.txt file - cDNA_ID_2122240; gDNA_ID_1620313; Annot_ID_153073

SEQ ID NO: 22781 - DNA, 3003 bp, Unknown
  misc_feature (1)..( 3003): 2750-1469P.txt file - cDNA_ID_2122249; gDNA_ID_1620313; Annot_ID_153076
tagagatgtggttcgtgattaactgattgttattagtgtcgttattgtgtcaccgttgttattaaaattagataaaacgagtgtatatgtataatgtatatttcaaaatgtttgatttgtaattttctatacatcaacacgaaagatccgaagtttggagtgttcaattgcccaaaaacaaatccatctagcctcgtccaaaaccagatggcagatacagaaccggaaaagaaaaggttccatggctacgctacgcaatgcaaatgatttgaatctgatgctaaggctatgtcgctgtataaagatttctagtttccttctgattcaaaatcatgacagtttcaaaaataaaataaaaaatcaagaatcgtatcataagttgtgaatcaaacgattgtgcaaatatataattagcttgaagtagtttttgcatgtaactaccaatcgtcagtgatcgatgctgcaccattgtcaaataaactacacatttttcaattaccaccaagtataagttaggctggcgaagtaacaaaattgaatctattattagaataaaatactaaatatcattccaattgaagtaacaaatatattacgccaaccttatccaataattccaattaatatattttgaacaaagtaatgaaaggaaaaaaaaaacgcatcaaccatagttggcaaaaatagtcgctcaacgttaaaatggataaatttatagtatactgtaattttcattcaattcaattgtcaatactatacatgcacgtaaatccatttttgtctctatgtatataaatatacatgtagctttttatgttcagatgggtaaatgtgtgaattgggttggttacaatattaaatgttgcatttactgtagtctatctaggtgacttaaaaatgcgaccaatcagtagctgaattcttattaaacaataaatacacccaaattttaacagatgccgttactaattaaccattttgtgattggtacaaccactctgatattctttatccatgttgttgtgacggtagatttcgtttcttagaacattcaaaattttgtgggggatatagtatgaaattatgtacggtgactttgaaaccgtgactgattaagtgattaagttttggaggatatgaggctaaatatttgtttgaaacgtatttataaactaagttttacaaagtttattattagattaataacaaaaacctaaacaaaagatattcgcctcaagagtcaagaacattcattttctctttaacctttcatctattatttgctccaaatcacagcagagaccataacaaaaagctgttgtattttagtatttatatgcttcttttacaacatacaaaaaaaaactttatttcgtcttcgttgtcttaccaagtgggcattacttatacctaaagatagaagatgtccagcttctatcatcttaggcaatgtccgtgctcataaccacttttctaagtcttacttataaccacttgtctacttgaattgattggtgtgatgattaattggccattgatagaagtataattaggacaaagtaaatatggttttaatgatatctaaccccttaaataatcatatactccttccctttcactatttaaatgtttaataacgttgcatgcatattaataagtcaaaatattattcttaaaaacgacaagattatgacaatactaaggagatactactatacttggagaacaaaataaatgtatacaaattgttagccaaccaaagaataagtatacgaagctcatgcatgtatgacacaacgacacattctgataacaaccaaacacttccgaatttaacaactaatgaataacattacaaaaacaatggattttaaagtctttttcgtgtgtgtatgtaaatgtgttgcactctttctccccacacacagagtcacagacccagtggccactggccagtgcccttgtaagctttttagataccttttgcatttttttccaagccccactctaaatatatttataatatataatattatagtggatttgttcgattacaattacatgttattattttccaaatttaaatccgaattttagatactaggttgaaaaaacggtattttaatactcgtttgggatgaagtacgatgtatttttggctgctcattttctaactgaaaaaaaaaattatcttatttttatgtagggactattaacaaaaaggctaaaaagagtttagaagaagaaataggctaatcttttgataagaaaaatatacagtttctgattcaaggtttagaatttatatttgttggattagcttttaggcttctgagtttagttttaagggtttggaatatataggactgataagcgtatggtgcaaattgcattgtatatcccatcgaattattaattaacttagtttcattaatttgtcaagtttcatttctttcattatgagaactttgtaatcagaagtgagttataaaaagtgtatttaaagtcacatctaacttgtcattattaaactacaaatgataaacgtaatccaaaaaagcaacaattagcttatcaagacacatttacataaaaagcacatgcccctcacgggatcaaaacatcccaacttaccaaaatccgcaaagtaatgatcacggagccaacaagggcattatagtcattccacgttatctgctacggttacgagaaacttgaccagcgatgaacccgagaccattgccgagctctattctgctccattgcccatcaccatgtgacgaccttctctctctaaattctctctgtactctgaaaaaaactctttttttttttgtgtgggtttcttaatgatttgttatgaccctgttggattcaaaccaaacccacacgagagaatgatgagaagtagatcaccggttttgtaattctttcaacgactctttctctacatttctcccaaatctctgtctcttgagtttgatttagctaaatcaagcaatg

SEQ ID NO: 22782 - DNA, 3003 bp, Unknown
  misc_feature (1)..( 3003): 2750-1469P.txt file - cDNA_ID_2122253; gDNA_ID_1620313; Annot_ID_153077
ctaaaatgccattttctcccggcgtgtaggggagtgagaacggcgattctaaagaaattcggaggaagaaggcggttttatctaaaccggcaccggtttgctggataccgatcagaaatcgtgagatcagtgttttgtctctgtcctttagggtgggcaccatggagtcctagactagtggaatccgccgtgttaggttgtgttcccgttgttatcgccgatgggattcaattaccgttctcggagacggtacaatggccggaaatctcactaacggtggcggagaaagacgtgaggaatctacgaaaggttttggaacacgtggcggctactaatttgtctgcaatacaaagaaacttacatgaaccggtgtttaagcgggccctcttgtacaatgtgccgatgaaagaaggagacgccacgtggcatattctcgagtcgttgtggaggaagctcgatgatcggtcgtacagaaggtcaagggttttaagccaacgagaagtcgacatgtaggattctgtgtctgaatggatgctaggctggaatttttcggactgtttcggaattggttaaccgggaatgtctcgagtggggtccacaacgtgaggggattaactcgggcacgtgagatgtttactgagctggcaattattgagtggaatattaacgtgccccagggaagtgaaagtgtaaagtattgctgacgtgtaattcttttgatgagtaggcatataaattcttttgaatatagttgatcgaaatgcaaagttatatcaaatgtcaacttcagtttaacatttaaaagtaacaactctatcaaattaattttcttatatgaatttactaactacaactacgcagctaaataatatttggtgtcaattagcaatataacaactaacaagtttagtataagaaattttgggtctagattgattttttttcaaatgacataaattatctaagtaaggtgtaatatccatacaagttactttagtataatgccgtttaatatccgaattgtagttttatgaaaaaataaaagaaataaacatttatcttcatccagagaacaattttaaatgaaaaatccaacataaaatttatttagttagaatacaaataaattaatttacaatcgtttagttcattctcggaattctgacatcggatgtaagtaaaatgaccaaaactcaacagtaatatgaccacatcaagaccacatcaaaactcaacactagacacttacgaaaccatccatggtcttgtctttgcaagaccacattatttccattggtttttttttccttctctaacaacatataagctagaaacaacattattcgttattgtgttctttctcataacaagtgtttttcattatattgttgtaccaacttttatcgaattaagtttcctatataaaattacttattaactactaccacatagctatatagtatttggtgtcaattagcaagaagtttgatacatgaattttgtgtaaagacagaatgacaaaaattgtttaactaagttgcaatatccatataattagctttagtatcatgcaactttatttcacagttgtagttttattccaaaaataaaagaaataaaccacaattatttgggtttaaattaaactcaaaagctcttgtttatcttcacacaactaatttttttataaaagaaataaatccagtataaatctacaatttgttttaaagaatacaaataggtaaatttacaatttgtttctaaattcttctataagttctgacatttgatctagctaactaaaatgatcaaaactcaacacattaaaaaaacgctctgatcggatctaaaaatttagttgaccatctttaaatatattttatggataaaataagtaagaattaggaagatataattgggaaagtaatgaataaagataaaataaaaaggatggtgtttgtatagggaaagatgaaagacagagcaatgtgagcaagagacagctagtgtgtcagaagaagatgcatatatcaataaatgtattgtctattaaattcttatttacacatattttttgaggcccacattactttcttatcttatgtcttgtagacatcacaaaacaataaaccaatcaatattattgtaatactataagttacacaattatctatgttttaaacctttaattccttctactatcgaatacacttaggttgatctatattcttttaattacaattagcggaaatacaaaatcattgcgacaacgagcacagtttggaatgattatcatataacttgttagagtgaaattgtactagtccaaaataccaacttcattctatatttcatacacaatatgttatttttttatgaaaagaaatgaaacgtaacaatctcgcttgacttgactgtatgagcattattttctttacaagttatttgatacatgtaatgtaaccccacagttagagaaagtaacaaatatgtgtcgtacagttgttttgttctaaaatcgcaacaaaaacaatgaccattaacataattttggttcgaacgaaagtgacacagtagctcatctataatgggtatggtcattgcctcattggtcaagtatcatccctggcactaaagattggttaattggggtctgctggatccatattggacctattatctaatatgaacgaaaattatataaaagggcctccaaaaatttactttactaaaaggcccaatattatgttggcccgactttgaccatacttctaggctcttttttttttgtttggacatcatttcagttcggtctgaccgtttacgggtttttttttcttccaaaccaacaattccttaagtaaaaaaaaaaacataagataaagtatcattcttattttaatagttttggtccgccagaggcataagcatacaaatattcttttctcctaaagttttaagaacagagcaaggttaaaaaaaaaaacacaagtcgcaacaatg

SEQ ID NO: 22783 - DNA, 3003 bp, Unknown
  misc_feature (1)..( 3003): 2750-1469P.txt file - cDNA_ID_2122292; gDNA_ID_1620312; Annot_ID_153012
accgagcatgaccgagcttcctctcatcacaatttctccgacagtttctccatttctctcaacgctcaaacccgattcaggatccaccacgtcgatttcagtaaacccgacggttctcactccttgccgtgccttcaatctcgctcgatcgcttgccggtaaatgattccattttggcttccacgcgcacgagacgattacaccggcggtttccgttaatccgtaaccgtgactgataacgaaaccaattgattcggctcggaggaggacggtagctggaggcggagaaccggcggttaagatgttgacgggatggttaagaggctgagattcctgagtcgcggataacatgttgagcaccaccggagctccacacatgtgtgtgacgccgtgatcacggatcagacggtagattaacggcgcgtcaaatttacgcaaacagacgttagttcctccgacggcggcgattccccatggattggtccaaccgttagagtgaaatatcggtagagtccataagtaaaccggatttttcggtacggcccaatcaattagtgaatcaactgacattacgaaaattcctctgtggcagtgtaccactcctttaggagctgaagtcgtaccggaagtgtaattaagcacaaccggatcccattcgctttcgggtcggatccatttaaaacccggatcacctctttcgataagatcatcgtaagtgtaactgaattttgaaagatcagccacgtcagcaactcctccttcctcttctttatcggcgatgacgacgagaatcggcggatcagtcgtcatcatcgagaccgcttcaacggcgagatcaacggagaagacgtcgacgaaaagaagcttagattcacagtgacggagaagaacagagacggtgcgtgcgtcgaggcgtgtgttgatgttgttgaggattgcgccggacatgggaacagcaaactggagctcgtacatagccggagtattgggagagagaacagagactacgtcagacctgccgattccgattgaagacagagaagacgccacgcggagacaacggaggtttgtttcacgccacgtgtaaacggtgttgctgccataaacgatggaggtacagtcaccgtaaacggtggcggctctctctaaaaaacctatcggcgtcaacggcggcgagtttgcggcgcatggcttcatttcctccatctcttcctcctagtggtaatcaaagactctactgtactgtactgttcttactgtttattatataatgacattttatttccaagtgaacaatccacgtgatgaaaaatttgtaaaacaatattttgggtttagaaattgagaacaaatctaaaccattagctggaaattaattatcttcagcttccaccacattataatcatagacatttgttacctaccctacacaaccactagcgtactaagtcttaaaccaatgttcgaaactactaaatataattagatgttgatttataatgtattgttattcgacaccacaactttctttgtttgctgatcgtcactcaaagtcacattaattgtaatcttactattacgccaatatagattgttaaacaaacaaacaaaaaagtttatagagaataaccttaaaatatcgcttaatctcgttgcaatattgtttggtggatctaaatgtcgtatgtggtaatttcaatgttaaaaacaaatataattggcatattatcttttatgttggtatggtatttttctacacttttataacatgaaatgatttttctttagataatattgttaaactttgtaaaagaaataatggttgtaatattgaaaatgatgttaatatttatgtactattctcttgttaaacattcattttaattaggctattcttaattaagtatagtatgtgatgttgttattaacatttttacgataccaagatatattaatttgtcattttttccgatataaatttgatcatttgtatagaatattttaaatctatatattgaacttaaattttaatggaaatatttcttggtttagtacgtacagtatatattatttagagaatttttctgatatccatcttttagtgactaactaatttacttcaaaggttttgaatgaattttaaaataatttacttagatatatatatatatatatatatatatatataatgactaaattaatctactttaaaccatcgttaactaacagttttggtcgaactattttgacgaaaaaaaactgaagtaaaaaagttccaaaattggttacaaacggataaatggaaaccataatttcaaccaaactctacagaataagaaaaaacaattatgaagtcagagataagaaaattgagagatattaaaaacaatttacattttatttttttgttaaatttcattttctttaaccaatataaatgtttcaaaactttagctccgaatagtaactgcgttttgcgctatgggagaaatgcggtgcggttcaaatagtaatgaaaatacatagatacatatgtatatgtagaaattttgatagggttacagcactgttgtgatacggttttgagtgcggttttagttacctttcacagccttaattggttcagggatcaaccgatcgtccgcgttcgcgtcgtgggtcatgtgatggtttagccatttcgaattccaaagcactcacatgttttatcccttttatttattacgggatatgctttgctacattttcctcacgacacattaatacattattaatgagattggactagtggcgggtgcaaaattatatgggaaggggaaagatttttttgttctttttttttcagccacattaaaattatgaacatacacaaccacttgagtactagctaattccaaaccaatgttcaaaaaaaacccaaaaaaaaaccattatagacaaacttaataaatagcgttggagagagagaataaacatgaacatctaaaaagggaaaggagaatg

SEQ ID NO: 22784 - DNA, 3000 bp, Unknown; identical to SEQ ID NO: 735
  misc_feature (1)..( 3000): 2750-1469P.txt file - cDNA_ID_2122300; gDNA_ID_1620312; Annot_ID_153015

SEQ ID NO: 22785 - DNA, 3000 bp, Unknown; identical to SEQ ID NO: 734
  misc_feature (1)..( 3000): 2750-1469P.txt file - cDNA_ID_2122307; gDNA_ID_1620312; Annot_ID_153018

SEQ ID NO: 22786 - DNA, 3000 bp, Unknown; identical to SEQ ID NO: 733
  misc_feature (1)..( 3000): 2750-1469P.txt file - cDNA_ID_2122339; gDNA_ID_1620312; Annot_ID_153027

SEQ ID NO: 22787 - DNA, 3000 bp, Unknown
  misc_feature (1)..( 3000): 2750-1469P.txt file - cDNA_ID_2122378; gDNA_ID_1620312; Annot_ID_153030
tatcaaagaaccatattatactacgagctagcgaaaaatctatcatcgtgaggattgaggaagccattcaagaactacaaaagtttacagaaaaatttgtacctcgtgctcttgtcctttcttgctagacaacaaatttattatttgccttctggactctaatataatcacaacaacacatattgctaggtgcaatatcatcatattagcactttttaattctatggtatatttttgttttgtaaccatatatattgtccattcacaaagtcttttctattacacatattcatgatgagaaaattgatttgatctaattactagagaatcatgcagaggcataaaatgatctggaaagcatttatttatcatttgatttgataataacattttatggaaacacctatctttaccaaagatttggaacaaatagaaaaacataagcaaacaaatatatatagtcggactaaaacaaaaacaaaaagggggatttgactgatggaacaaaagttaaaatcggtggattagaaatctgtgaaaacgtggaggatgcttattcactggtgaaattgagggatcatatataaatatgaataataatgctagtagaataagttctatttatcacttgatgattacaaatctataatatgctttcaaatttctctcctgatgtgttgatatatattacagtctttttaatatcaaaaaggtttttgtcttctctcattcattcattcatcgttaatacttttgtttttgtgtgacatattttcattattcttcttgaattatgtcagaaatagctagctagcacgattggaaagtttattcaaaatccatcttatttgttttgtacttttgacgtcatgaatattatgttgatgttttttcccaaaccacaaaaacaaaacaatcaaagtttttcagaccagaaaacactatatgttggggtttatactgttcttcctaaattagagttcgaattcaagagtagtgatcatataactttcgttttcctttcaatctttcataaacgaatccaagtaccaagttaaatgcatggttacgtattatatactatatataaatgtaatcatgttaatgttacaaatcaaatcagaagaaacaaagttatacataaaggagaggatgttttgattttggtcgaaaagaagttcaacgtcaatcattgaaagaatgaagtaaatagcagccaatagaaagggaaaccaaactacaaacatatcaatattacataattttttaaatataattaattatccatatccacacactaatctttcattcaaattccatattaaaaaaaaacacagaagaattattcttaaaggcaaatttgttctttagacttatgaaaagaggaaactcctccaagtgcaggtggaataaatcctctgtttgaaacgacttcactactgtattatttcttaatttattttgtggctcacaataatctgttccttcattgcttcgtcactcaatatatgctacagcacctacttgttgtactcttctgcttcacatctcgtgtttttattctggaaacattcgtttttccagagaagagaagacgcaagaacaagttttcaaccatggagaatggagaatgatttacttttagcataaagtcctcaaacgtattagccgcatcaacaacactctttgatgtgaacacaagtcttaagttacatgcaaagtgttacttattcattaattctagtatagttcttatactttagaacttgaagggtacaccataataatagctaaagagatcaagatcggtgattatagttatcaaatttccaagaatatgtgaacacttcatagattatgtaatgaactaatgattacaaaaaaaaaaaaagtacaaaggcaaagctagaaacgacttttgaatcaggaaaatctctctgcaggtttgtttggtccggcgggaaaatttgatatataaaccgaaccggataacatgaaccacccggtttttaaattttgctggttcttgaccacgacgaagtcacttgcttaacaggctggttctgcttcgtggtctggttctttaaagctggtccaaataataataaaataattaaaagatgaaattcctttcttgccccttttgttcttctcctttctccgtctctctctctctctctctctctctctctctctctctctctctctctctctcttcgacttcttcgtcttcgtttcttcatttcgaagctctctctgtgtgtgatggcgtgccctagaaactccataacatacaacgccacgcgctgcgcgtgcggtatcggtcagctactaaaccggagctccgggagctgcgagatcttcggttggccgtcaacaatctccacagacaaagatgtaaactacagcgtaatatcattcgccgagactttattcgctttcgataggatccgtaagttcacgcaatctcaagctattttcttagaagctacgctcgtgatgcttctctcctggttagtcttttgtttcttcctgagattcaccaaactcggcgatggtcgtaatgtctggtttaatctccgttggtggattactcgacttgacgtcttcttctccactagacattggctcgttagtgctttctctactctcattgcttttgtctccatgaattggtttcttttgagtaaaccaattaggttcctgaatcttgtaggatgatcaacaaattgtcaagaaacgtaaaacagaacttggtggaacattttctgttgcgagctggattgttttcattggtttattcgctgcgtgagtttgataacttcagaatttagtgcttcctttggtttttgttaacttagtcagtttcttcacaggctgctttatcaaatcataaccaagagaacaattgaagttcacaatgtgagagctactggttctccagatttgatctcattcgagaacgatttggagtttaacatcaccgctgtttcggatatg

SEQ ID NO: 22788 - DNA, 3003 bp, Unknown; identical to SEQ ID NO: 20525
  misc_feature (1)..( 3003): 2750-1469P.txt file - cDNA_ID_2122494; gDNA_ID_1620751; Annot_ID_166802

SEQ ID NO: 22789 - DNA, 3000 bp, Unknown; identical to SEQ ID NO: 20526
  misc_feature (1)..( 3000): 2750-1469P.txt file - cDNA_ID_2122494; gDNA_ID_2926183; Annot_ID_200433

SEQ ID NO: 22790 - DNA, 3000 bp, Unknown
  misc_feature (1)..( 3000): 2750-1469P.txt file - cDNA_ID_2122556; gDNA_ID_1620300; Annot_ID_152580
tgatgctggttcaacaggaaactttgctaggtttataaatcacagttgtgaaccaaacctatttgttcagtgcgtcctgagttctcaccaggatataaggcttgcccgtgtggttcttttcgcagctgacaacatttccccaatgcaggtactgagagaaactcatctgtgagggtgactcattcgaacattccctttataaaataaatcttactacattctctgtctcaattgtaggagctcacttacgactatggatatgcgcttgatagcgttcatggaccggatgggaaggtgaagcagctcgcttgctactgtggagcgctaaattgtaggaaacgcctttactaacaaaggctattggtgaacttattttttggtcactctattttggggagtacatagatagcaactatctcccaagtggaagaacccttcacattttatttaagggactttagcttcttctgcagcgtacgtgctgcctttttcggcattgttgtttcctgaattctattgttgccattggcatcttatctatcgggtcaacaatattaatcatctctttttcttatttgctgtgttaacctaaagatttgatgtgactggcttatgatagatattagatacagtagacgtagcatatcgtttgtcaaaacaaatttgatttcttaatcatcaaatacctatcaaataccacattcaagaaacataaagaaaacgtaacaaatcagcaagctaaggttgatgatcttcaacattcctctggatcttccttggctctggcacgatactgtcggccaggtctttttgtgacatgttgagctgtttctggttcatcttcttccatagcagaaatggtgcagtcttctatagtatcaacagctattgcaactcttcttccctcacaatccttgtctatattttctactttactctcagccattggttttctctttggtacgaaagccactgatcttggaagctccatcagagggtctacaagggactcgtctttgctcctaatcatgttgagaaagtccatgtatgctttcctgttggattcttcatcaacctcacctgactcgaatgtatatcgagtgtattttgatgggttccgcatataatctggaatcccagtcggatagactgcctctactttatcttcgttaggggaacttgcctccatcacagaatcgttgtcaccttcagtcaaggtcctatctttgacatcagaactaaacctaacacgctttggcgacttagaatcatcagcctggttttctctcctcttcaatatcggtttcagcccattctcatctgaagagccaacatgtgactccttgaaagcccccagcaagttatcttcagacaccacaaaaggtttctcgttttccgtcgacatggacagattatcctgaagttcctgcaacaagacaatcttctcttagcaaacacatttggtataaaaaaacacttctctaatgataatcaacatgctatcacaaattttacaaagtggaagagagtaaaagtacctcagagacatgtaaagaattcaacttgttaacagcttctgcgtcctctttaagcctaagctttgctgctatgagattagctcgagggtccttctctctttcattgaaagaagctggaagctccacccactcgtctgcttcagtctcatagtcgtcattcacatccttcatgcaacagtacactttttcacctaatgccactttgtcattatcatctagctcttcctgaaaatatagaaaaaccaaagcttagcctcggagatactaaaaatatcaatgagagcaattcaacaacacaaaaagactatagatataaatacctccatatcaagagtagagtccatcccaattgagtttttgatctcccactcttcgtcatcgtaatcactcggcttctgcaattcactagaccttcctttttcctcatctatgctcaaatcatctgattcatgctcctgctttccattatccgagaagctgttcaatgattcagaaagttccttttctccgctccgttggtttccatcgatctcgtcttccgcgagacaccagagagagctcacaggtgctgaagacgtagaagatgatgcaagagatccaaaaaccttgtctatcctcactctgaaactctcatccattgcaaaaacgaatttttgggacgacgatggcaaacgctggggaattttattcggtgttgggatatataagcctatgtggccaaacacaaaccgaccttttcacatcgtaccgtagtgtgaactaatgggccagattaaagtccagttatgttattgggcttattaaaaggcctaacccatttaacttgaaattcgtcgttaatctcaaccttctctcacctcagttccacgcgtaagcgtgtgcttgctgatacaggctgaagaatcatttcgatttcttcacacttttttttgtccgatttatgatccgtacgttggagcgtaacgtcagttctaagagcatctccatagattataatttttggagtttttcttcactgaaataatataaacaattcataaaggaggagagaataacataattaaggaaacgtttctgtgtaaagaaattttgtaagtttgcataggtggctgtttataattggacaattgaaaaaaagaaaaaaataatttaattacaaaattaaattataataaaatattaatttcttttgtttttgagaaactttgaaggtttctcatcatattcgactccaaacactaaccaaccttcttctagattctcaaagctggaaatggcctaaggttttgtgtgtggataagggtcacttattaaagtaagtaatggattattaaagaagaaaaaggacaacattttcggaaacaaagttgagagttttgagagttgaaaaagggcaaatctttcttctccttcgtcactctaattgagttgactaaacacagttcgagttcgagagacaatg

SEQ ID NO: 22791 - DNA, 3003 bp, Unknown
  misc_feature (1)..( 3003): 2750-1469P.txt file - cDNA_ID_2122584; gDNA_ID_1620300; Annot_ID_152586
ctgagacattaaaatttggagcaagttgcagggaagtggctggagaaatggctgagtctcagaagaggatgcaggaaactgcagataaactaggaaaagaagtagaagtgtttaagcaaaatgagtttgttggtctaaagagaagaagaacctgagcatttgcatattagtgcccttgcaagtgttggaaggtaattatcttttattttaactcggcaattccaacattttacacttcttcatcggataacgtgtatagactagttagattaatggattaattgataggtgactgcaaagctcgtgcccctaaattttctcccatgtcaccttcaggtttagatgagccaaaagcagacatactttgtttttaacttttgaatgtggttgagaattatgaatctacttagtgcgctcatcacatggtcgtttgattaaaagagtaattagatttaagtaagacaaaagatgtttgtgttaggcaataattagaaaaaggattaattatgttaagcgtccaagaaaatgcctttccacgttgggcgcacatgccttctcttctttcttccctttttttttctttctagtttctactaaactaacacaattagaggcccaaaccctcagataattgatcatcaaattatttgcatcaagaatagttcgagatgagttatagagaattgctagtttcgtcaatttgagactcggaccatagaacaaaacatccttccaatttccataaaactgatatagttaagaattgggatatgcatgtgttcacttgtcagcttgtgtatatctccagttgttcgaggacgttacatacaacgttcgagaatggtattgcaaatgccgaagtcacttaagagtagtgatggtagtgaaaaaggcggtgatctgactgggagggcttaattagggctcttgacctaaatcctaattaagtaggattcgtataaatattttgtccattgatacattttatatagttcttacatgtactaatattccaccgtagaccatgagaacgtagtactaattaagtaaagaaacctgtggtctgtggatatcggagaataataagaggcgatagagaatagaagcggaacgtaaatgtaaacaagattcaatgcatcaagattggactttagaatataaaattaaacgagaaaaatgagagttggtcaaaagtgagggaacataaattatagggcttgtttactccaatgaaattaagattaaagataaaatttcaaaagcataaaagattgctcacatgcaacccaaattcctttgttctcaataatgcatgtttgttttaaaatagtatatagcaaatgaatatgaatggagtattttggtcagaatatatataatttgagaaactgaatttaggaagagacgatatcatattcatagccaagaggacaaacacataaatgattaaattataaggaaatagatagatgccttgggattagaaagtgggagatgaaagaaaaagggtgtggcaatattcattgaagttgcagcctataaaattgggagcacatgcactacccctatattgtttttgactaatctctaattaattaacgctaacacacattgtgattattgtacatgtagacaaatgggacgtatatattataaaagattaagaaatgatacgatccactatcaccgtccataacgttggtcgtgtagccaaacataaacataaatggtctttggtcttcctctgacacaaaataagatcgtcttagaaaggctaccacttgcttccttagatactcatatcaaatatcataatctctctctaatgcatgagacttcaactcttttaattttgtgttggtcaaaagtcaaaaccctactctgacgtattagtaatacaagattaatacacatataatgatataatagctgcttaagtaatgactttcctcctcataatttagtcgactaccttccatcatgcggccatcattgcacccttctttaccaattattaactttaaccaaaacaccaaactcattgtttttttatgtgttgtatgattgataagacggaaagtgtttgcgttttcatatatgcaataatcagggtttgcttctctttttcatgttaaattcgcagttcatgcacattccatcattcaatatggaccatcacatgcagtagtatttggacgcgttataccaaatatattctctgaattgaatagtttatctattacgttatctctcgttaatttgttaatcaattcggacatgttattattattagactcgggacactggtatctaaggtaacatgctaatcatggctcttatcattcctaatccctttgtttcagcttattattgttgatgaatgatgattatgtgtatctatcgatatttatatataatatgctaacggattgtatttgtttaagttatttttgataatgatcctaatttctttgttattctttcactctcttctctaatatatacatcacctaacaaaaagaagctcttatgtattactattgtaattgattgagttgatatattagcacttgtatgattaaaggcagtcggaactcagcattatattttagcagaattaaccatgtataaaaatgaaatcactagtgtagaacaaccttgagaaatgcatgaaacatgctatcaagtggtaacttaatcataattatatacttttgattgactgataattgatatatcatgggccacaattaactcaacacagagccatttttaaatgttgtttcaattggaataaaaagatatataaaagaattatacacaatgaaaaaagagagagaaaaaggaaaggtatagctcttatataaaagggttgtggtaagggatacttttccaagaccaacacacattccctctcttccttcaactagaaaaaagatagatatatcggacatttattgatctgtgtatgcataaaggtatagtatcattattagaaagatg

SEQ ID NO: 22792 - DNA, 3003 bp, Unknown
  misc_feature (1)..( 3003): 2750-1469P.txt file - cDNA_ID_2122635; gDNA_ID_1620300; Annot_ID_152601
ccaccaacattcaattacgctcaaccaataaattggttctgagagcccttgatcatacttgagagttagcgaacaagaacgatggaggattatgtcggtagaaaacttctaaccaagttgtcataaaaagacgatcaagcgagtagaaccacccaattactgtcgtaatcaacaagatgcccataaacacacgaaatatttacaatcaaatatatagcataagaacacagttgtctttcacaacattgacacacaagagtcaaaatgcttactacccgtttcagacattttgattacacaattacatttagcccttagtagcaaacacatacataaactaaatccacgatcaccggcattcccattaccgttgatcgcaaaccttaaaaaacccaaagtgaaatgctgctgatccaaaagagattttcggatacttgtggcagcatcattcactgttctacacaacaatggaaacatcaaaagagaaataaatacctcttttttcttcttttttttaatggttttttcaggttcattgatgatatatctcaagaagagcaatcaggacaacgtatcaatccattctcattgcattcaggacatctcttgaccctatcttcatcctcatcaaacagtttcttgctgccactacaattggaacacggaacaaatcgaatgtccccacagcaatggcaaacaaaccctggttgtctcattggaaactctttaagaatcttagcaagctcaccaatctcaaacaaactcttgatcacatcagcaccaccaacatacttgcccataatgaaaacttgaggcaaagacacagacttctctcccattgcaatctgcaactctttcctataagcgatatccatggagacgtcgcgctcatcgatccaaacccgaaaccctctaaatatcattctgacagcatagcaatcctcatacgtccgtctaatccctctcaagctagtaaaatacaccacaatcctgtcctctgtcccgggaagacggatgaccgagttgtttaagctcgaaaaaggcgatatccgcgattcgggtaaaagggatttaccggatttctgcttctgaggaatctcagctaaggcaggtttaacgggtttggaagtctcgaataatctacaaaggtttttgactttgcctttaagagaagttcccatcgattctacgggggtgtagaatttggtaatggaggtggtacgattgagagaaggattgagattgtgggatttggggcccgaatccaccactgttcttccgtgaattgtaagcgacctgttgaagaacgacgtcgttgtagccgatttcgtcgtcttccctgagaaatcagcgtttttctctaatcccgccatcgaaattagatcaaagaagcacccctttcgacggctaatttggtgtaaaacctaaaatagtcaacaaaatcaaaaccctaggatcaaattcaagcaaattgacgaatacagaaagagaaattgaaaaacataaattgaataatcgtcgatcacctcccaaggaagaaatggaaattggaatgattggaaaagaatcagcttctctgatttgagtcgtaaaacgatcgggtgctgcgtttttgagctgatgaattctcacctaagattaaagaagacgagattgatgaaagaatgatctgatttttctggaaatttgggggtttgtttgtgttttggaagaagatgtggaggagagctccgaattagccttttgtctgtctgcctttgttgcaaagcaaagaatttttctgttttttttttaaagatataattattatgtctaagttattaaaggctctttaatgatatatttactcgatgctccttcgaggaaaaacgaatttgaaaaaataacaaaagtgggattaaattgcgaggaaaagtcgtttactggtaaaacgcggttgtcttattaagaaaggttatggttacagcgaaaccagtttctacggtcggtttattgctattgattctacgctcggtttagagatagttgtctgtattctaattgaagagtagtgtatttcgctttctagtcttcgaccattaggatttttagttcacacaagatcaattctctaacatttaaaatcaactagaaaactcaaataacaccgttaaaatagtgattaaaccattcaaaaattaaacgggttttatattgtttgatatgaaaactgcaggtttttcgattgttttttttgttttccgattgttacacaatggaaaagaagatcaaaaatcaattgtttttaaaaaaaatattattctgtcatatttttgcaacaaacatgtgtttttgcaatgttacatcggtgtcaaattagcaatgtcagatccaaaacaaaatgtcatattgtgaaaaaaataaccctacacttaataatacagtatgaattttggatcctttaagaaaaaataaaaactcgataaaaacgttgctgtcggtttgcaccgaacgattgaagttaaccaagccagcaagcaacccaattcttctatttcttcttcacctttagatttttcctcgcttaatttctcaataacgctctcagagagaccatttgatgaagcttctcgcttctggaatttgaaaaggtacaagttgcaactctctcttttctttcttttcttcctgggtttattatatagctggagttctttgtcgatgaatcgggtggtgttgttgttgtttggtttcaatttgatagaagattggcttgaccttgatttgctttgttttgattaggatttgataagacgagttcatagaagattaccgcaagttcatcaactttttgtatgtggtttcagcttttgaagcaaaattctgataactatacaaagattccagcttcatatgtgattttccttgttattcttagctttgctatgaagttgagatatatgagtggaaaattcgtattaaaggatatgccttttggttgttcatttgcaggaacttgttatg

SEQ ID NO: 22793 - DNA, 3003 bp, Unknown
  misc_feature (1)..( 3003): 2750-1469P.txt file - cDNA_ID_2122700; gDNA_ID_1620301; Annot_ID_152620
tgatgaattaaatacggactgattcgatttcagtcagatttgcatcatactacacaactatttatattttagatttggttaaccaacttataaaaactttaaatactacacaaccatttgttttttagatttggttaaccaacttataaaaacttaatttatataatcttgttggtttttgttaattttcacatagttgtccaattgttcccacacatctcagtattgatatccatcttcttatcttcgttaaccacctaccaaatgtcacgtggacgctccatttcggtttctatccggattcgcggtggattctcctcccaccccaatcatcggttcatttcagcatttggttatatccaaattattttaaccggtttataccgaaactactcgaaccagacaatctttgattggtagaaagagagccacgtaggattatctcttctaatggcaaattaaccaaaaacgtaactgaagatcaaaagagaaagagagaaaaaagacgatgagagctctaacatggacggcaatgtcgccgccggtgatgtcacggacggcgacttctacggttaacttacgacgtatcagcctacggagagatcgcgtctgtgttagagccacggcttcgtctagcgccacggtttccggcggaggagtagtagaggcggtagaattggcagagataggagaaagaagcaagaaatggaagtggaaaggagaatattctgttaactactttgtcaaagattcgccggaggaagttactccggcgagtcaaactgttcttttggttcatggctttggtgcttctattcctcactggcgaaggtattaatcattcatcattcatgttttaagagtaaatgtatgaatcttgttgagatagtgtttttttttagttaagtatcaataaattgttgtatgtggaagatttttatgtataggcattgcttttaacaagaacgaatgaaactacttttgcaggaacataaatgctttgtctaaaaaccatacagtgtatgcaattgatcttctcgggtttggtgcttcggataagccacctggttttagctataccatggagtcatgggctgaggtaaacaatctttgaaatactctggcatgtttttgttgtttaaagaagtgttttggtttggtttggtttgatttgatttattttggtgtagttgatactcaacttcttggaggaagtggttcagaaaccgactattttgattggaaactctgttggaagccttgcttgtgtcatcgctgcctcaggtctaaacccttttcactatttgagtttgtttctacgtctaatgatataaacttcgattacttgagctaaagatgtcacaagtatatgaatcttaggtactaagtttctcatatatttggaaaaaaaaacagaatcacgaggagatctggtcaaaggtcttgttctattgaattgtgctggtggtatgaacaacaaagctgtctttgatgactggagaatcaagctactgatgcctttactcttacttatcgacttcttactcaagcaaagaggaattgcttctgcactcttcaaccgtgttaaagacaggtatgtccttattcactttttccctgactttgaaacgatttattcgagagctctaacgcattgacgaatatacgaaacgcagggaaaatctgaagaacatcttgacaaatgtttacgggaacaaggacaatgtagatgacacccttgtagaggtattgtcattattactcactctcaatgacaaagaacaatgaaagttttattcactttttatgtgaaaatgttatgttagatcattgctggaccagcaaataccgaaggtgcactagatgcttttgtttcaatcttaacgggtcctcctggaccaaatccgattaagctgataccggaaataaccaaaccggttcttgtcttatggggagatcaagatggactaacccctcttgatggtccagtaggtaagtacttcacttcccttccggatcagttacctaacttcaacctctatgttctacaaggcgttggacattgcccgcaagatgatcgtccggatcttgtccatgagcgtctccttccatggctggctcaactttcttccacctagtttcgatttgtttagccgtgtacacttgtttataaatgtaaaacaaatctatctaattggaaaaagacagattcaaaatgatatttcttgacacattttgtggtgtctgaatgtaagttgtaaagaagtcatggtggtagtaacttggtaaaggagtttgtttttggaataaacgcaaattacatggtttgtaactgaataccaaatgtcaaagccaaaaatatactaaactaaaagataggcttatttagtcaaagctcaatgctattgacttggtagtcatttttggtaaaagaatcgttacaaatgtagaaagtgactagttaggttgatgaatgattgatggtcctatacaattgataatttgctacttttgttggtaggcaagtaaaagacacttaatgagctgctagaagctatttttggccacaaaatctacaaatttgtttggttgttgaatctttaaaaggacattcatgctgcaatatcatcaacatagtgaagatgataattttcaaacttgaaattcaaaagtgtatatatatgaatatgatgattgaatattgattatcagtgtgaatgaaaaaccattgttataaattttcagttttcatcaaaaaaatgatgccaaagaagaagagtaaacaaaacaagacaaaaagagttaaatggagtggtccaataaaaataaaaataaagaagacaaaacaaatttgtattaaaatggttagatgtcgttgggtgccgggaagtcttcgttggagtctattatttaaatgcttcaccgatctctcattactctctagtcaatatcccaaaatccctaattcatatctttgaaactgataaagataacaaagaaatg

SEQ ID NO: 22794 - DNA, 3003 bp, Unknown
  misc_feature (1)..( 3003): 2750-1469P.txt file - cDNA_ID_2122710; gDNA_ID_1620301; Annot_ID_152624
atcctactatcttagtatttttttaccgtgttttagttagatttataaattttaatcactttcttattattgttagactttatattttgttaaacatgatctgattatttttattattaataaaactcaaacatatcttttctcgcgatttcatgaagaaaaatattttaaatttgtttatacaatatttctcaaacaataaatcaaactcaaaatgatgaatattataaattgttgttgttattttagaaaaataaattttaatgaaaaaaccctcaagtttagacttatccattttaaaactctcaacttatttttaaatagaaaaacccagtggtcagtgttttcacactcggtccgaccggttgaaccgtgacccaaacatttttctgatttaggtttagtgctaaaacccgacaagttcaaaatcaaaaaaacccacaaaaactcactattaacctatgatccggtgaaccggtcgggtgtgggttttaaaatattctctttattttggaatataatatgagattttagactttattcaatcatttttagaaatcttttcagttcgtaaactcattttatggtttacattttgacgaagactttacaatgccgccttaaaaatgaaacgaatggtgagtgagacacccgatattagttgtgtaaattcacgatgttttactagtttatttccgtcattggtgatctactactatatttgttatggtattagacgtttagttggatttaaaaaatttaatcactttattattattgtttgattatatatatatatattatttattttttttattattattttttggtataaatgattttatattttattaaacataatctgattttatattttataaacatgattatttttattttttaatttataagaactctaaaatcttattaatattaaatttattaaataaattttaattaattgacttatggtccaacctggttaacccgatgacccaataatcgagaaggtagtcgggttcactgtccgggtcgggtttaatcttggaccatcaatcatctttaaaaaaacaattgtcagaagattgaatatttggtaaacaaagtatatagagttcagaagatataaacaattaaattgacacaaatatttgtaaaatatttaatttttagaaagaaataattgtgataaggaaaatacaaataaatatggagaaaagacactttgtaagaagacataactgcaaagatattttaattaaaaaaattaaaatatttaacgaatagtaacgatgaaaaatgcaattataaacgaggaaaacgatagggaaaactctctgattcacattagggcaaacatgcctcatatatatatatccatacatgagaccgtcacatgaaacccaacttaagcccatctatagatacgtaagcccatattctatatccaaactaagcatgtgcatttgcttgaagtctaatcttgaacactttaatcatctttgaaactcagtgtgtcctcccacactacttcaaaaccttaatagccatgatatgagccaatcacctcgtgtcaagtatatatgcaagtttaattcatccataaaacatagaatatatgctttgagataaaatcctatttagcaaggatctaggcacttagattctttccaaaacatatcaacatctctgctacaccaatttttttgtgagttaatctcagtgacctacgaatgagtgaaaactctacttcacaagatattcaatagcgataagatcgtacaagatacaaactcgaacattcacattacttaacatcaataggaaaagaaaaaaaatatgaccaaaaaaagaaaaccaattggaacctaagctaaaccgagtatctatggtcataagacactatcactaattacaggattccactaaattactcgtatgcgaactacgcatgtgcatttaatttgcttgcagcctaatcttgaacattttaatcttctttttaactcaagagtgttgttctcccacactactttaaaaccttaataaccgtgtacacgtcggtaattagtcaagtaaaacactccaatatccaataattaaaaagagcaaatttagggaacaaacatgcgcacaaactttcaaacatcaaccatgattagagtgcacatgtacaccatagacatttttccttgttaatttactaaattaccataaacacttttttctctcttttattattccttttccacccatacccactttttaactttccatttttaaatcattcctcgtgaaaatagtaaaactcctttatgcaataaagttttcttgaattttacaacgtacaaaaaaaaaaaaaccgcgtggcattttatgtggttatgatgtgagaataatttgtgaaaacgaaactcaagtcaatgaataaaaagacgaaacaatgctatgataagaaaagaaacaacactcgaaaaagttcttctttttcttccgcacatgtctgactctctcataagcgtaaatcgctctgtcaaatatctctgaccagagagacagagttgcctccacgtttcttcagacaagactcacgctcttccctttcaccacattcccttctccatttctcaatctcacttaccttctcgattcttgctccaatttcgaatcttccgagtgaaaaaagcttcaaagtttggaactttctagtgtttattaatctgggtctgctctgagtttcgtgtgtagctgcatatgagcttaaagctcgagtttttccatctgggtttggaattctagggctagtgattggagattttgggaatttaggttgattttagtaggtttgacttcaggttgcgtaatttaggttgattttgatccgatttgtggaattagggtttgtttgttcacaaagcttcaatttttggagtttaaatggatcgataacgactgtgttagaagaaagtttgctgcttcagattcgtattcgatatagaaatg

SEQ ID NO: 22795 - DNA, 3000 bp, Unknown
  misc_feature (1)..( 3000): 2750-1469P.txt file - cDNA_ID_2122743; gDNA_ID_1620301; Annot_ID_152633
ctgacgttgtcagattttgaaaaaagacaggtaagagttagattcatatactactaacaaatcagcttggcgcataagaaaatagcttaagtagcgttggttttatcaaatctagtttttaagaagtagcaaaacataaagctggaactaagcataaaaattttgttttgataggcgaaattcacttccttctttggaccaaacatcacggcagaagtcggtaagtagtgaatcaattctccattcatgtttatgaatttcttgttctcggttcttaaaaaattattattgttgttttgctttgaaggtaaaggagaaagtgagaatctctatgaagtaagactgatttccaacctctccaccaactctgtatcttctacctcttgaacatagacaatcatgtatacggcgacgttttcagtcaatgttattttggtcttgtaaatcaattctatataattatcctatgtataaaaagttcatactatttacagaaatgggaattggaactagccttgtcgaatggtaatacggtcggaaggggacaagctacgattgcaacgtgttctagagtaattttgatttgagtaaacaaaatacatatactgtatattattcatatcttggtgaacaatacaaaatatattagtttgttttaaattaccaaactaaagccttaaaaaaagtatcaaattaagcacataagttagaaaagaaaaatgtgttgtaagaaagaaaaaaggttaggaaagaaatatgcgacagaaaaaagagttttatgggcttacaaataagaaaagcccaaatgggccttgagtttgagctttacataaaattcattctactaaacttaagcaaaatcattccttcttctttctctgaaacttttgccttgcttgcttgcccagaaagtcgccgagaaagttaaaagtagaacggcggaggaaaaaaaaacgaagaggaagaggagagatggagtcgcagaagaagatagctcatgagatcggaggtatgaagaacgatgctcttcgctttggtcttcacggcgttaagagcgatatccttagatctcatcctctcgaaacggcttacgaatctgtaatcaatcacttcacaatctttttttttttttttattgatattgaggaattagaaaattaggctaattaaggaacttagggtgttgatgaataagcttcgtgttgattcagaaatttgagaattgggattttttgacggggtttctgaaattagtttttttttttcctttctataaacttgtttattgtgatttcaggggaagcaatcacaagaagaaatgaagaggagagtgatcacgcatacttatggagctgctcttcctttgaagatggatcttgatagacaaatcctttctcggtatggatctttaaatctgtagcatatgaaattctgaattacactgattattaggtatgagaatgtatgagaatcttccttaggctttatagaatactgttaagattgaaatatggtttcctaatgctagtaatctatcttgattaggtcaattgctgttctgaattttgaaatattgttagtacaaatgtgtatatgaatcatcataatgattatatcgaaaattcggaatcataatcgtgtagtgctacttagaattagatttgcagaaccataaacgcgtagtggatactcttaaattagtagcaatatgtagattgaattcagaaccataaacgcatagagcagcctcttcttcattgaatatttattggtgaattgaatatttattgtatatctttttatgtggagtattcaggtttcagagacctcctggaccaattccttcatcaatgcttggccttgaagtctacacaggagctctagataattttggttttgaggattacttgaatggtaattgttttacaccagttttcccatttggttgtgcattagagttttctattcctacaatctttgagcatttctcaaaacatgaccgtcacatactgcttgcattgtgtaaccaaatcatcctcatccttgcatagagtttaactctttgtttagcatataatagaaaagtgtctcaacttgtttatttcgtttcgcttactagtctctactttgtagattgttccactccaaaacaccaatagacagtgacaaacctttgttccagttagactgtcacaaatcatcgagcattgctcaaaaattgactgtcacatactacttacttacattgtgtaaccaaagttgaacttttggttcagtatataagagaaaaatgtttaaactttttaattctcttagtttcacaatttatattgttctgacgatgaatggtgtataatctacagatcctcgcgaatccgagacgctgaaaccagtagactttcaccacgggatggaagttcggcttggtctctccaaaggcccagcttccccaagtttcatgtagtcaccaccatcaaagtatttccttcgtcaggtctcatatgctttttaatctgagtaagatcatgttatgaatttccaccagccctaaaagaatctacttgttgtttgatctcttctctatactgtgtctcctttgctctgaacatgataaaacatatgaactgtgtttcagttcttatctctctcagttcacaatttgttggacttgcttagttatttaaataagattatgctcctatttcattattatgttactgacaccaaaaccttggatactagattctattagaataaataaattgcatatggattaatactctaaacaaaacaaaaacaaaagaacaaagtaagattgttttagtgactcggactggactgttaacatcggataaatctgaaaaagtaaataaataaaaataaaaaccctattctacgttttattcgtctgggaaaacaaaaattaaattcgatccccaaaattaataattccgtcttcaccgagaaaaaatccagagcttcttctcctccgacgcgatg

SEQ ID NO: 22796 - DNA, 3000 bp, Unknown
  misc_feature (1)..( 3000): 2750-1469P.txt file - cDNA_ID_2122747; gDNA_ID_1620301; Annot_ID_152635
tcatggttgcatgcatatacaccacacacattcatcaaatggtagcaacaagaacattttcgaaaacatatgttagagggactgtaagcacatgatcaaaccactcaacttttccccaaatttcacgttttttgcgcctttcaagcgtaatcactgcacaccagagcatcttattagacccactataagtcatattctccttccacaaaaccgccatctttccaccaaaattagctaatctaggacaagcaagaataataggtagttgttctaccaaaccctccaactttctccaccgtcctagctcagtgtcataccatctgaaaacagtgccacgccatgttttttcgacagagtacaaaacgttctctatctcacaataatcatatgaagacttataactacacatctctgattcaacaaggtcccatatacctttcttgggattgtaagaaaccacctttctcttagcccctacataccacttttcgtcaatacataagcttttggagtaaatgttgtgttttgtttcgttgtaagggataggtacatgatcccaaacttgtgtttttgtgtcgaacacctcgaaagtgttcttcaagttaagagaatctccatctttgcaacttccggctacatatatctttccgtcaaggacgccagcagaaacttcaactagctccactggcaagcttggagcctcgcgccacgtgtgagaccggcaatcaaaaatcgagacactagagtaaggtgatatggatctgccaatgttgtagatattagaaccaaccgccacgagactggaacgttgcacaagacgaggatgtggaattgatactgtagccaaaacatacccacttgacttcttcttattacttgtttcagaagatagggcttgatcaggtttcaagcagagagtaaaccagctagggctctcaaaaggatttaagtataagcatacatatagacaaccctcggtgcggttcaagagtgaccgttccttgtaaagctccggtgaagctaggagagatcgaaagctcttggagacaaaggagagaatcggataatacaatcttgagactcgtgcgatgcagcttattatcaaagcatcgggaagtgacggatttgagttcgattccggcgctggcgaaaacttttccggggacgacattggatgagtttaagagacgaaaatggctgttgaacttggagaaaacaaatttagggttggactttatatatagagggattaaaaccggttaatgcctttggttaaggggagaaccggttatttgttttgtatgttttgtttggttaagcattgagtagtgagttgttgatagcttcatttatgaacaaccaaaaaggctctatttgtatgctaataatgatcactcgaaatctctaggtatgaaacgatccttatagttgtgagatgtgagttagttttaagaatttatgtatgtattctatatttcttattatgatattgtatattcagtttttgtaatgtcggatttcttttatggtaaagaattatgcttatcaatcaataagtgacataaattaattagaagtgaaacaagggacaaaatcatagtttcaaggctcgtaacgcattcatcaaagagtagcagcaagaaccttgacgaattcatattgtctagggactgtaagcacatgagcaaaccattcaacttttccccatatttccaaacttccgcgtctttcaagcgcaatctccgcacaccaaatcatcttctttcggcgcccaggcaaatagtcgtcccacaaaactgccatcttcccaccataatcaaccattctaagacaagcatcaatagggaacttaggtaatcctaccatacccttcaagtctctccactctctttcctcactgtgataccaccatacggacgttgagatatctccttttacaatagtgtaccaaacattccctatattgcgataacaatcatataaatacttattatgttctatgcttggtgtaaccaggtcccatctaccttccttggaattgtaagcatccacacctttgtagctcaccaggtgcaattttccgtcaaaccttacgattttgtagtgaaagtcgtgttttgtctcgctgcaagggacagacaaaggatcccaagtttgtgtatttgtgtcaaacacttggaacgtcatggagtcgccatctttgcatcttcctgatacatatatcttttcatcaagaacgcaagcagtacatgacattagcttcacccgcaacctagggccctcgtgccacgtgttagacgtgcaatacagaatctagacgctagaggaaggcaattcatatccgccaatgttgtagatactagaacaaaccgacacaatgctcgaagaagatgactcaagaggagtatgtggaaatgggactgtagccaaaacatacccacttgactttagggttccagtatgtttacggaaaagagtaaaccacctcggtttctcatcttaaggatttaactttaagcacacatagagacaactctccgtgcggtccaagagtgatcgggtcttgtaaagctccggtgaagctatgagagatcgaaagctcttggagacgagggagagagccggataatacaatcttgagacccgtgcgacgcagctcaatatcaaatcatcgggaagtgacggattagggttcgtttgcgactgcatcgtgtaccgcttcttctccaactttgcagagaacttcaaggatcggtctttataaagaaatttccaaaaccggctcacgtctttgcttaaggaaaaaccggttcaactttccatagtcaatagaatccgaaccgccaattgattttgattgttgaccgggtttagtagaccgaatttagaataggtgaaccgtggccagaattttggcggccgatacacttctttacctcagcctcacattactactctcacaaaagatacacagagagagaagagaagaggaagaaaatg

SEQ ID NO: 22797 - DNA, 3003 bp, Unknown
  misc_feature (1)..( 3003): 2750-1469P.txt file - cDNA_ID_2122789; gDNA_ID_1620305; Annot_ID_152789
acaacaccttaaacaaacatttcagtttgtaaacttcatacgaatgattcattttctgtcggtccagtaccaaaattttaaaatagtttggaatctttgaaacttagattattttttcgcacttaattgtgataggatatttcctgttttaatcagttattaagtcagtaaattgacaaattaaagtctgtatttagttggcatgtcatgtgagaacacataccgagacaattatccaacataatagacaggatttaatttgttgatcttctagacaaacgtgagttaactattacatatacgagtatttcattaaactcatagcatatattaaaaaagataccaaattaccactcttcactatcattgtttgtttcaaactttcagtttcagattaccattctttaacagaaaataaaattttatatttttcattggctttgatttctttgaatgtgaaacaagtatgtatgatgacacatgagttacgtttgtacctatatattatcatggtaacttaaaccgtaataaaaaaaatgtgtgcagaggtataataatgaaaaaaagagagaataaactaataaataataaataattggagaaaataaaatagcactacatatgttgcatgcagccagcaaagtaacatgcagtaccatgcaagtaaacataatgtataaggaccaaataccacatgggttcttacagttggactttgcttatttcactcacatttgtcactattcttttcttgctttcgtcatttacaataattctgaatcggcaattttatgttcctttctttattaaaccgatcaatagatgaaatggaacaccctaaccaaaaatgaaaagaataaataatgacaggagtacccacggacaaaggcaactagtcgcaacatagactttttagttttaactctttatttactaatcggagcagtttagctttgaacgtacccaagtcataagtatgttataggcccctaccacaggaacaaagttttatttacaaatagaataattcattaccaaaaccaaaaagtttatgcaaatattagtctttcagaaaagagaaaaaatgggcatctttgttactttagctataaaaaatatgaaaacaaaattcaaagaatcaatcaagttttgtagaaaacataattcaggaactaactggtgggatccaatgtccatatacatatcatatataattgatatcctatctactttggcactgaaactcccctagacatttttttttaaggtgttatttcaatctttatttgtcggcatatatatacgcaaacacgtacatttgtgcgtatatattaaattacgtatctatcgaatttttaaaaatgcttttttagtctccctccccttttaaaagctgggaaggggttgttgaaacctctttaattaaatgtttaacaattatatactaagtatgatgttcgatcatctgatcatacaatattgtatatcttatagttctgaaacatttaggaaattttagtgtccatttttattcggcgtgatatacgtatatgttgtataaactataaattgaaattaacggttcattagaaccaaacttaataatttgtctaagcataattgttctacaaatgggtaaacattttataaagtcattaactcattatacagttagggatttaaaaataagaaatactcaacttcggatttggtaaaagtaatatatttaatcggctacgtagtgtgcaaagatacttgccgtccatattgaaatcatgaagaaaaaactattcaacatcaaaggatcaaatcaccataataacatgaaaaataagttcagttatatttttaatttgtgtaccaagttatactaagactacattatatatgagaatttcgagaagctatcattggatatggtctaccttctatgcgaaccaccgagttgatgtatacaatgtggctcgagtggcgaagtagacaccacaccttagtcttcaagaccaagtcttcatcactcttattctcacctacttcaatgtttcattactaattttgctttatatttatatatgtgtaatgggaaagttcctaggtcaagttttttttttttttttttctaattttaaaatatttcacttttagttggagtatcatatattaattacttttgccgcttttgacaaaactatagccatctttgacattatactataaattatttgttcttacgtcaattaatcaaatattttccaacaaacactggtcttcattatatttaaaaatatacataacctgaccagaattgcgttttaacaacggattttttttatggctctaagataaaataaaaagtcgttgcatagctagtcgttattatttcgtatttagaattgatatgtttagccacgtgaaggagaggaactaaaaacaaatataatattaacataaatatgttcattatattagagaatttctcttcaatatcaaaaatgtaactggactacaatttggaacttacaagttagtcgacgagataaatctgaaacgatagataaagctcaccggcaagcaaacatggcacgtgggaagctaaacttgttatcaaagttattcttcaacattttgcactgaagaattttcttaataaaatcagtgaaaaaaaggcaaaagggtaattctcatttcacatttgtttccacaaactacttttgaattattatagagttgtctcttttttcttaaaatagaaattaacagttcataatgtaacaaaatcctgcatttttaagaatcttaagatcattcccacacgtaatgaataataaatagtagttactttaatcgtcgttctactagttgggccatactttggtattattgggctcaaaaataattaatgggcttaaggcctcattagaaaacggcaacgccattgaaggagtctacggtgaaggaaagaagctaacgtcggcgccgtcgttagttgccggagacgcgatg

SEQ ID NO: 22798 - DNA, 3000 bp, Unknown; identical to SEQ ID NO: 674
  misc_feature (1)..( 3000): 2750-1469P.txt file - cDNA_ID_2122823; gDNA_ID_1620305; Annot_ID_152799

SEQ ID NO: 22799 - DNA, 3000 bp, Unknown; identical to SEQ ID NO: 674
  misc_feature (1)..( 3000): 2750-1469P.txt file - cDNA_ID_2122823; gDNA_ID_2926241; Annot_ID_142877

SEQ ID NO: 22800 - DNA, 3000 bp, Unknown; identical to SEQ ID NO: 674
  misc_feature (1)..( 3000): 2750-1469P.txt file - cDNA_ID_2122823; gDNA_ID_2926241; Annot_ID_204078

SEQ ID NO: 22801 - DNA, 3003 bp, Unknown
  misc_feature (1)..( 3003): 2750-1469P.txt file - cDNA_ID_2122929; gDNA_ID_1620306; Annot_ID_152830
ccaaaaaaatcagataaaagtcttacaacatctgcattaactatttttggtgggtgtctaaataaattaattataataaactttttaacgttatttaattatgaatatctttaaaatgtgcaaaagtgtctaaagacacttataaataaatttgtttatatcgacaaaaaaaaaaaaaaaatttgtttataaaaattctgaagacactcacctaacatattagtctaccaaaaagccgttttttttctttactaaatataaaatttattgatcaacaaaaataactatttacaaaagaaacaaaaagtggagaaagaagaatagaagtagatgctcatgggcaggttccaatttgtgtgaacgatgtgtatcagtcacagcgaggagatatggtttcttattgctttctcaataatgtgcgtaaggtgaagaagccaactatgttgatggtgtcgtgtgtcgcctaaaagcccaaccttataaggaaaagtagcggacaaaatctcttgaatgcatgcttttcagtatttcgctattataggctaattaatgaccgaaactttggtctttcatatgtgtcttattattattgaaaaataataaaatatgcattgaagagattttggatacaaaggagagatacttagaaattggattattattattattacttttagattaatatgtgaattcttattaaataaaaagggttgtagaagctacaatattcttaacacaaaagattgttcatttccaaaaaggataaaaacaagaaaaaaatctactaaaaggaaatatgagcatagatgaatatagtcatactttagccaaactcacataaggttttgaatcctgtgtgttttctctttgcaggaattgcatcatgaattttctgtctagaaccttgaataaggcatgagtatgtggaatgttgttgtggtaccgattgttctctccacccaaatcgcataaatgcatgggtgaggtagagtcttagatggctagccaaactgagaatgcgttagtgtggaaagtaaaaaatgattacagcccagtcttcttgttgttttagaccaaataccttcactaacttaatattgaagaacaatatgatctctagttacaaggagcaagccaattatgatctagtttcaaggaattggctaattatacttaaaacccctaaagtctaataggaaaatattagatcatgagggaagctaaacccttaaaactgtgagcgttagtccaaccaccatggccagtcttgagggaagctacttgaaatatttgtttgtggctcccattttgtttaacttttttattactacgaaactaaacttgaattaatattgccataactttttcataagaggataggaaaatctaatatgaactctatcaaattatatgtttcaagtaagaatacttaaaatgtttagctgagctccattatttttgaaaacagctaaaatattttttagattctattaattaaaattaatacataaatgatatgatacaattgagaaaatgaaaaacgcccccgaatataatacgtatgtggcttcataatcgtatagttgtaggatcgacccagcacaccacagccgtcactagtatttaatagattacaagcagaaaaagaaatttaggtctatttaattagtgaaaataaaaaaataaaaattaaataaggcaaataaagtttagatgtacaacttgaatctttaaacctttgacgtatctaagatgcaaacaaccaacttttctaccgaaagttataagataatgaggccaacattttatttatagtaattgaggtcgcaagcatgggattggcccgcttgtgctcatgaacggctatgcacctaatcacctacaaaatatcaaaacaggaaaatctatgtaaagtgatcatggagatcataaacttcctagatgcttactatgacattcagaaacccacttgaaatgctaggaaatgtattagtagacatcaagaaaatcagaattctatatttaatagtcatgtatggacacatactctattgtgaaaaccaaagatttattagtgaaagttagcatccaaataatcctgatttgcttaactttcttaaaaatccttaacagtcttcaaaatctactttacccaataggcatccaactaatctgaattatagtagatttatcttatagtcagtgtcgtgagtcgtgaccagagttatagaagcttaatgcagtcttaaaaattgtactcttttcaaaaaactattttcgtatttataaagttatcatcttggctatttgtgatggaccgaagggatacgattattgggttttcatattttggtgtttcggtcttttcctttttagtattggttttgagagttttctttttaattatgtttaagtcggtttgtatgaggatctatataagatcctcttataatcaataagaaatcaaacctccaacaattaacctaattctctaagagagacttggattaaaaggaaggttttgcttcaatatctatcttgttctacttcaaatcacggctccaattactagatctaagtcaaaggctttagctcataacacaatgctatttgatctcagcattcttatttctctaatttctaaaagaccaaaataacgcaaacggcacgcagtttagctctcaatacccgagacaacacttctcgtagtccgtacttaaacccgccacgtagttcactttattcaacttaaaaaagcatgacgttttggtacatctatcttcttcttcccccttcctctctcagcttctctcccaccactaaggaggaacgttccaaagatccctttctcagagaattcccagaaaaatcttcaacaattgaaaccctaatggagaatcattcggatccttgaatcctttggtttgtctctcacctccatttctgaaatttcattgctttgtgattcttctgcagattcgttttgaagagaagaaagaaatg

SEQ ID NO: 22802 - DNA, 3000 bp, Unknown
  misc_feature (1)..( 3000): 2750-1469P.txt file - cDNA_ID_2122935; gDNA_ID_1620740; Annot_ID_166400
gaactccgtctctatatcttatacctttggtagacgacattcactttgtttcactaggaaagtaaatgcttagttttacctcataggatggggtggcctgggaaccataaggcaatgtcattattattcaatcaaatccaaatagtaggaatatgattccaaagagcgttctattgggaacttaacttccacatgtgcttgcaacatggtacttgatgtatcatgaatctccatgaaagtaactgtcttaaatgcatttatgtgatatcttgtgtaatgcatatttttcttatatgtgatacttctagctgtccagtgtagtttgccgtccatagtgatcattttcttgcttttgttgccgcaacttatgctgacattttgtttttgtgtatatctaacagggaagagactagttctcttagaaaacaattggacactcagacaaaggagcttaaccagagaatgcgccaaatagaagaacttaaagaaaaggagaggatagcaaacgaaaacgtgagtgaatttttgctttgccaatgtgtgaaagctgattttctcgtgcatcatttgtctttatatgacaaagtatgtaacactctgttgcaagtgtttgtttaaagtttggttccttgggatggtaggttgaagggcttatgactgacattgctgctgctgaagaagaaataacaagatggaaagtagcagccgagcaggaggctgctgctggtggagctgttgaacaagacttcacgtcacaggtgcgttataagtccttgggttagtctagtgcaggaggccaggagcattgtaattaccctaggtggtttgtaatggcttatagctatgttgacaagctcagcaactagtgttgagtcagttagctaaagctaacaagctaagagacttttaggagaatgagttaggagtattaggttctgggattgggaattgcactgagggtagttctatatgatggttttttgttctccggtactggatcctatcaatgcgctctgttctgtttttatgtacacatttcctgggaactaaggaatgatagtcttaactcttattggctttgtttgttcagctgtatgtgctaaaagaagaacttgaagaggcaaagcaagcaataatagaatcagaaaagaaactaaagtttaaggaagagacggcagcagcagcaatgggtgcaagggatgcagcagagagatctctgagactcgcagacaatagggcgactaagttgagggaaagaatccaagaactaaaccgtaaagttgaagaattagaaacccatcgagatatgaatacttcaaacagagctagatatgcgtgttggccatggcaacttctcgggattgattttgtgggaagtcgaagaattgagtcgggacaagaaagtgcgaacgagatggaactcgctgaacctctactatgagaaaaaccggtactgtataccaaaaccatactctctgtatttgtttttgatttttatgtatataccacctgaaaaatgtttttaaaagctttaacacgttctcatgttgtaatgtttgagttaaagaagtttaatttggaggcttggcgaaaagtaagatgtttcccacacccaaacagtgatcaataaaatataaaacttcccattcttttttgctcgaaatctttagagtgcaacggctcactcaaatgatgaatctcttaaagttatacatgactaaagtatatcacaaatgatcctgattctagactggtcttgccatgacctgcttcagaatttattttagtatatactaaaatatatacttagcgaataacacctattttgaagatgaacccccaaaggttaaaaacctaaatagttatccaatctaaaatcatatatttatgtatctcagtttcttagctaaggttgacttcgttacttcttcagaagttattgttgttcaacttaaaacatacatattcaatttttgaaaatagagcactatatatagtataactatttttttatttaaaaagtttaagacagctaatattataggtttttatgcattaatagatatcagttaatatttactttttctctacactttttttctttcgaaatgaccaagtctagcatgggagagaatctatgttacagactggtagataagtttctagatacatttttaaaaaacatggtagtaaatataagcagaaaatactgatttcgattcaaaaagtaaatgtgatatatatagtttccaaaaatacggtgatatttatatttatagccattgactattgaacccttcaaccatgtaaatcaaaccctcgaggttataatgagtaaaaaaaattcttaatatttatcttcttggttggtgaggaggagtcataatgagtaaaaatttttgtccatatgagtaattaagtacccaaaaagccaattaattgaaaaaatctataaatgtataggaaaaaaatatgagcaacatccccgttttggtttcgattttccatgtgtgctaaatcactagtcatatcatagaaaaatcttataaaaatttctcaaaacaaaatcattttttattgaaaaaattgagcttacgaaacagctttcagttccacacgtctgctcttgaatactggagatcgccggaggaataaggatctccaaaaaacttatcactaatttgatcgaaaagcgtttctcgtctcaaatttttgtggtgttctacttgtaatgtcatttttacaaatccaagttttcttttcatcaccttcgtgttttgtcgtctagaaaatttatggttaatcacacgttgaatgtagcattgttgttaatctaggtgacaaagcaaattgagtcttttaatcagatcattcgtgctttgttttgatcgtatagctcaagaaattaattacagtttgttttatcgataaacaggagtgagatggtgttgatgacaattggagcttataatcaaaagttgtaataaaaacctaactatg

SEQ ID NO: 22803 - DNA, 3003 bp, Unknown; identical to SEQ ID NO: 21347
  misc_feature (1)..( 3003): 2750-1469P.txt file - cDNA_ID_2123031; gDNA_ID_1621093; Annot_ID_170779

SEQ ID NO: 22804 - DNA, 3003 bp, Unknown; identical to SEQ ID NO: 21347
  misc_feature (1)..( 3003): 2750-1469P.txt file - cDNA_ID_2123031; gDNA_ID_2926160; Annot_ID_198690

SEQ ID NO: 22805 - DNA, 3000 bp, Unknown; identical to SEQ ID NO: 6437
  misc_feature (1)..( 3000): 2750-1469P.txt file - cDNA_ID_2123035; gDNA_ID_1621093; Annot_ID_170780

SEQ ID NO: 22806 - DNA, 3000 bp, Unknown; identical to SEQ ID NO: 6437
  misc_feature (1)..( 3000): 2750-1469P.txt file - cDNA_ID_2123035; gDNA_ID_2926160; Annot_ID_198691

SEQ ID NO: 22807 - DNA, 3000 bp, Unknown; identical to SEQ ID NO: 6438
  misc_feature (1)..( 3000): 2750-1469P.txt file - cDNA_ID_2123046; gDNA_ID_1621093; Annot_ID_170785

SEQ ID NO: 22808 - DNA, 3000 bp, Unknown; identical to SEQ ID NO: 6438
  misc_feature (1)..( 3000): 2750-1469P.txt file - cDNA_ID_2123046; gDNA_ID_2926160; Annot_ID_198696

SEQ ID NO: 22809 - DNA, 3003 bp, Unknown; identical to SEQ ID NO: 17869
  misc_feature (1)..( 3003): 2750-1469P.txt file - cDNA_ID_2123057; gDNA_ID_1621093; Annot_ID_170788

SEQ ID NO: 22810 - DNA, 3003 bp, Unknown; identical to SEQ ID NO: 17869
  misc_feature (1)..( 3003): 2750-1469P.txt file - cDNA_ID_2123057; gDNA_ID_2926160; Annot_ID_198698

SEQ ID NO: 22811 - DNA, 3003 bp, Unknown; identical to SEQ ID NO: 17867
  misc_feature (1)..( 3003): 2750-1469P.txt file - cDNA_ID_2123063; gDNA_ID_2926160; Annot_ID_198701

SEQ ID NO: 22812 - DNA, 3000 bp, Unknown
  misc_feature (1)..( 3000): 2750-1469P.txt file - cDNA_ID_2123078; gDNA_ID_1621093; Annot_ID_170795
aaaagacggtttccgtcttggtttgatgagataaaccctacaagtagagttccttgttgaacaaccaagatctcggtggcacgtgggtgggtgtgaggtgggttctgaccgttgggtgcatagtctatacgaacaagtgagataccaagagtgtttagtcctccaaggttgttaacattgacggttgtcacgttggacccaaccgcgttatttgtatttccaggtctgttgaggctcgagaaaaagaaatcatccgcgaaaactatccttggatccttgcaaaactttccattcacaaacactagacaaggttttgataaaaatagagtattagtaatgcataaatcaacatacaaatatatttaataaattaaaaaatgatcatgtgcttaccgccatctgctggtgtgttgacaccaacacaaaagtcttgaagggggcttggatcggaagcaattactaatggaagtgtcaaagcaaagagagatagagccgcaagaaaagagagactttttatcgtcatatgtatgtatggagacgatttgtagaagacaaaaaggtttttgttagtttcttatttgtggtgtcaatgaagatgtgataaatttatgagacaaagagttcaatttatagatgattttcggtttgaacaagtccatatgtatgtatattccaatgtaattttcattgtctataagtttgaaacggtaaaatgctgttgaaaccgtgttccctcaggtcatattatattgagaattatttaaattattgtattgttaccattgttaagtgtagctttcattatctcgaagtttgaaatggtaaacctttaactaaaccgtgttgcatcaagtcgtattatgtaaggagttatttaaaacattatcttgttaccatgtttacgttagtagtatcttaattaaacacacaaaagatcttcaactgaaaaaggaggcacttgaaatttaaaatgttaagtgtcggcattgatagagttatataagttacttatactgcaagagggtttattcaataatatgattgtttctcaggttttcatgaactatacctgatgattttgagaatatttgattattttatttgcatgagttttagagttgacattgagagtctttgacaaatgtcaaatgtgaatttttggtggttttgggttgcttgattcgttaagcgataaaacatgaccatatcaatatatagatgttaatagactgatcattgaaagagagaggctgttactacttacttgtcacggaagaatatcctagttttgtagagagattaggaaacgcatataagaagatactgtgaaatttaaacgcatatatatatatatatatatatatatatatagttgtatagttatatagcgtaaagtagataatgtgaagtttcattgaaagattttggttttatattaagattacaaacaaaacattatatctttgttttgacagcttaaagaactcaacatcatgtctgatcatgtccctataagatgtgcaaaaacgactatcggattcatatcaaaacaaaatttggattatttcccctcaccactgactatctcatgtacacggacatacagtttgtatattatagctagctcatgtgtttatatttcaccaaagttttttagtttcgacattgtagctcttataactcacttaagttctacaaatatatgtttcgagtactaatgagttttctaatcaatttgtttttgttaattatttcattgaccgattgaaataagacaagtaaccaaagaggccacgacaaagatttcaagatacaaattacaaatacttcccaaatcccaaccaaatccgtaatactggggatccacacaaaacaaaaaaaaaaaacaatacaaatatatgaacggagaaatgtgggcttttatttccatcattatactgccaattgggcttttacattaataactttggccgacaaaaaaaaaaaaaacgaaacaatccaattcccgaatttaccaagacgcgaaactaagtggactgtgcaatctcttttatacatttttaatcgatcgtctaacaacatataaaaagcaaattcaattgcaattcaacaacgaaggagtaaaaagatcaacttccctcctgctacgtggtccactcttattagcacaaacatcactaattttcctgcgaaaaatagctgtgtctatatatttaaacctttttaattacatcaattcaataaaaacagaagaataaataaataattccgaaaatcccgatgatgactgaaagagatatgcccgatcttccacgccacagtagtggagctgtggagaaagaagacaaaactgtaataatgttcattattacaattttcactgacagtttttttccataaaaagaagctaccacaattactactagcagtaaaaataaaagaaatctgaaatataataataacaaccaaaaagtgaaaaaatcaaaccacaccgtcccactaagaggattaaacggtaatttgctctatcacgtaatataaatgacgtggcatcatcgtgtctagtcagcttcttctttaataacctcttcagcttcagctatcacactgcacctataaaatcaaccaatctcgttttaaccccaaaccagaagaagaaacaaaaatcgaaattctcatcaatagcaaaaaaaaaattactcttagattttcctcaaaaaccttaatcaatcgccgggaaaatgaatattccggtgactatttcctccattactgtttctaataacgctgtttccgacaatcgtcgtcatgtttcccgtgaaaatcgtcagcgttaagaaaaccgtcacttatatttttttttcttttcttcttcgtttttgtgaagatgatgatccactgatttgagagtagtagcttgagaggtttttagtagatttcgattttgcgattatttttgtttcctggagagatctcatttttttgccacttccgatgatg

SEQ ID NO: 22813 - DNA, 3000 bp, Unknown; identical to SEQ ID NO: 22812
  misc_feature (1)..( 3000): 2750-1469P.txt file - cDNA_ID_2123078; gDNA_ID_2926160; Annot_ID_198704

SEQ ID NO: 22814 - DNA, 3003 bp, Unknown; identical to SEQ ID NO: 17861
  misc_feature (1)..( 3003): 2750-1469P.txt file - cDNA_ID_2123100; gDNA_ID_1621093; Annot_ID_170806

SEQ ID NO: 22815 - DNA, 3003 bp, Unknown; identical to SEQ ID NO: 18089
  misc_feature (1)..( 3003): 2750-1469P.txt file - cDNA_ID_2123126; gDNA_ID_1621100; Annot_ID_171328

SEQ ID NO: 22816 - DNA, 3003 bp, Unknown; identical to SEQ ID NO: 18089
  misc_feature (1)..( 3003): 2750-1469P.txt file - cDNA_ID_2123126; gDNA_ID_2926167; Annot_ID_199233

SEQ ID NO: 22817 - DNA, 3000 bp, Unknown
  misc_feature (1)..( 3000): 2750-1469P.txt file - cDNA_ID_2123142; gDNA_ID_1621100; Annot_ID_171336
accgaagttgcttgctttattatgctctagctcctttttaggaccaaaaaagggtactgacaaagtgaacgaacacagtactcctgtccacccagaaatattataaaaattaatacaatgggctctccctttgcaatattcttcttagaaatttcaatattgtacatcagatttaagaacttctcatagatagagactagagaggagtgggcaactaatattcaagttttcctttgagggaacatatttacaaacatctgagatacaaatctgttttgtaaaaactgtttcatgtttgtaagaattttgtgtttgtacataaataaagaagatgccatctctacaaagggaaagacaattccatgcttttacatctcattctcttctttctttactcttttacttcttttgaaaacacaagaaagataaaaaaaaaaggaaaggttaataaagtatttgtttcactatttataattttatatagtctgtctcttctctggtaccaaaacacaaatcttttccatgcaagtcacagtttttgtatccattatctcatcaccttgtttcaatattctaactaaaaaaacaaataagttcaaagggacaaaagacatgtgtcagttagtcagaggatattgggaggtccacgaacgtccttaatctttggatttttccgacttacgagatattatgtgacgcaaacgcgtttctcctctttttttacgattatgccatcccaccaccgtacaaatcccctacgcgcctccacgcgtcgcttcctcactcccgtcttttccacacacgcgctagtcggaatatcttattggattaactctatgaattttcatatgaacaatatttataacatttttttatttggtattaacattatataaacatgatatttgggaaaagtctttcgtttgaaaaattcgtacgtgacaactaattttgtttttttttggatggtgaaagaattatcttggatttgaggcacacacttttgtttatggaatctaaaactagataggtgcacactatccatattgccatcattgttgtagatttgatctttgtgcaacttttacttgtgtatacatcttaatttccgcattcaaagattttcaaaaccactgcgatcagtttcatccaatcttatatcaacaaacatgcattggaaattttttacattaacaataagtcaaaccattttgaaacataaacctataaaacttgacaatatgggaaaaataaaggacaaaatattctaaaaattgaccaaattatagtcttaaacattaatttcaacgggactatttcgaaaccgtttttaaaagccgaagtcttattaaatacaaacgaaaaaattaactttgacattgggtatattataatgcttgtcgataaaataaagtgttttttacttaaatgttacatttattttagtatgctccataagtttgatatatcatgttatccttgttaattataaatgttaagcttgaatttgttgatgattccttcctaatttttttttttatgatgtaactgactaacaagtttttttttgtttcttaactaaccagggggttgatttaatttatgaagttaacataaaaaaaaaattacatgaccatggaagccacagtcaaaatattctattatggaagtaaattttttaaaaatgtattttctttagtaaataaaaaaaacgaaagcgacaagagtagaaaacacattacaagagtatattagtctaccctaagttaataagttttatgtccacacgctatttcggcaaaacttcacattatgattactctacttaagcatttcattaatggtaagcaattagacgttaacagagtaattaataaataaacagtggtagtgcagctactgccgtccaaaagtcaatggtcagagtggcattcaagtaaataatccacataaatgggggcattttattagctccaagagagtcatgacaatttgcacttttattatatctcaatctccttcttcttcctcaagctgattcttgagtatgcaaggaaaacttctcttttgtccccttgtcaacaaaaatctcccattcaacaaaatttcttcagcttctctccttcaaaaggttagctttcatggtgatctctgtagtcactttctcctttttattttcttgtcaaaacgattcaatttcatttgtttctaaattgaacaattgcttcttccttagctctgctctcatctggttttaagcttttggtcctaggggttaggaatctgagcttatatgtgccttttttgattgtttgtttttgaaaggatatgacttgtttgatttggttttggcgcaaaaagcgattattccctgtaacccaacatcgatttgtctacctgtccctttgtttgccttgtgttgattcaaaagtactaaactttatcctgatgattgtgtaaaaatcttgacttggagcctaggttttaaagctttgaaatcccttagtttaacctgattctggtaaaaaaccctgctttagggtatgactccaaccttcgaatagatgtaatttcttctgtagagagagatatatagagagtgtaaagcttccattttttggggttccttttatctggcaatagaaatctgaaggcagtagcaaaaaccgatatatgatttctgaaagatgtcagatctgttttctgataaccctatgatgacttgagtgattgattgtgagagcagactttgtcgcatatgtttgagtttgtttagagaaaaattcacaactagaccttttttttcttcttctatcacaaatcacagtgtctgtatttagttgctttactctgttgtagctcacttgttgtttttggatgttttcatggaggcaggtttttattctccttggtttgaacaagttacactgtagagagtgatttggctaaaagaagattgattcaggagctgtgtagtgtattgctggggtttttccaatg

SEQ ID NO: 22818 - DNA, 3000 bp, Unknown; identical to SEQ ID NO: 22817
  misc_feature (1)..( 3000): 2750-1469P.txt file - cDNA_ID_2123142; gDNA_ID_2926168; Annot_ID_199258

SEQ ID NO: 22819 - DNA, 3003 bp, Unknown
  misc_feature (1)..( 3003): 2750-1469P.txt file - cDNA_ID_2123162; gDNA_ID_1621100; Annot_ID_171344
ctttgtcggttgatctaactattaacacttgatgccaagtctaaagagtttattagtttttaaaacccagtttaccaataataagtttcctttgtcggttgatgcactagtcaaactatcaaagtcgtcaagtttgctttgttgacaaggcaaagctactcttccaaaacattgatccattcttctggaaatttgcaataacgtctcaagaccaatgcaagtaataatttaaccatgccatgttatcaacaaaagctgcttctctgatttctagagtattattttttaaccattattgaagtttgaagatttcttattattgctaaatggtaaaaccatcttgaggggaacaatttgataaaactgtgtgctgcttcctgtctccgaccaaaacatgtttaaaattagattcggaccaaacaagttgtcaatttttagtacaaatcaaaggttcaaatgtcaataaataatcattacattttaaaatttcgaaataaaaggacaaacatgtaaaaaccaaaaaagtgaagcactgatatttgtcatttctgcctataaaatgtacacttcccactcacacggtcacagaaaccaaattcgaagaagaaacagagaatcatcaaatcaaatccctaaaaattgatttttgaaatggagaagaacgcatcgacttcgtcgttgaaggacttgggtccgagtggtctagatctaaccagcgcctttttcaaaccgatccacaactccgatccttctctcccttcaaaccgacgtaccaaagtctccgtcgtcggagtcggaaacgtcggaatggccatagctcaaaccatcctcactcaagatctcgcagacgagatcgctctcgttgacgccaaacccgataagcttcgtggcgaaatgcttgatctccaacacgccgctgctttcctccctcgaactaagatcaccgcttctgttgattacgaagtcaccgctggatctgatctttgtatcgtcactgctggtgctagacagaatccaggcgagtctagactcaatttgcttcagaggaacgtcgctctcttccgtcatatcattcctccactcgctaaagcttctcctgattctatattgatcattgtttctaatcccgttgatgttttgacttacgttgcttggaaactctctggctttccggtgaatcgggtgcttggatctggtactaatctcgattcttctcggttccgattcttaatcgcagatcatctcgacgttaatgctcaggatgtacaggtcagttccaaccaaaattagggatttttgttataaagctgtgatttgttttggttaaacattgcgattaaggagtcattagctggatttaatggtttagtatgataaaaatctatgctttagtggttttatactgtattgttgagaagatcaattgaagagcaaaagtgtgtttggattggttgttgtaggcatttattgtgggagagcatggagacagctcagtggcattgtggtcaagcattagtgttggaggcattcctgtcttaagctttttggagaagaaccagatagcttacgagaaacaaactcttgaggatatccaccaagctgttgttggtagcgcctatgaagtgattggactcaagggttacacttcttgggccattggctactcagttgctaatctggctcgtactatcctccgtgaccagcgcaagatccacccggttactgttcttgctcgtggattttatggtgttgatggtggtgatgttttcctcagtcttccggctttgcttggaaggaatggtgtggttgctgtgaccaatgtgcatatgactgatgaagaggctgagaagctgcagaaatcggcaaagactatattggagatgcagagccaattgggactttgaatatccacatctatatatgcatcaatttcaattttataactagtatcccacgggtgatagtgtcgatgttgatcactatatgttatgtaaatgcttgttcatgcagagtaatcccaactttgagttctattttgaaatagggtatttgcttacaacacacttgagttaccacttaccagtaatgtgaaaatgcgtggttttggcatgaaattattgtgcatattgcaaggcaatcgacacaaacattagtatatcaaaaaatatgatgtgtagaaaaaaagaaaagaaataaatttcttttaaaaaatggaaatagattttgtaagttcttaacaatcttttttttttggttcaccaagttcctaacaatttaacttcatgattccgatatttttggcgcgaaaatacctttttcgtgttattgcgtttattgcaagacaatcaacacaaatattaatatatcaaaaacatgatgatagaaaaaaaattggaaagaggttttaaagttcctaacaatctaacatcatgaatactcacgacgattttggcacgaaaatactattttctcgtgttattgcgtcttttacaaggaaatccgcataaacactaatacgtcgagaaatagaaataaatagattttatttatataaaaaatccctaaaatcatcaaattccagattattgtaattagattatctctcttataattgttacttaacagcttgatgtggctgtgagcctgtgacatttactttggagtctatgagagcattgaacccaaccaactaaaacaaaaaatatgagatggcaggcaagaccaagactcatatagtaaaaatgttttgacaatcaaaaaccaaataagcaaagagatctctgactctctatctgaaatctcaaaacggagaacgcgagggaacaagagattaaagcatagtgagaccctaagagagagagctttaggtctagaggggatcttcacaattcacacaacaactacgagataggatcgtgcgcgtcaaaagaagctggtactgctgattccagccgaagattagtctccgcttctggttgttccggtggagactcgtcggaaatg

SEQ ID NO: 22820 - DNA, 3003 bp, Unknown; identical to SEQ ID NO: 22819
  misc_feature (1)..( 3003): 2750-1469P.txt file - cDNA_ID_2123162; gDNA_ID_2926168; Annot_ID_139980

SEQ ID NO: 22821 - DNA, 3003 bp, Unknown; identical to SEQ ID NO: 22819
  misc_feature (1)..( 3003): 2750-1469P.txt file - cDNA_ID_2123162; gDNA_ID_2926168; Annot_ID_199264

SEQ ID NO: 22822 - DNA, 3000 bp, Unknown
  misc_feature (1)..( 3000): 2750-1469P.txt file - cDNA_ID_2123166; gDNA_ID_1621100; Annot_ID_171345
ctccattaagttgcccagagacggttaagaatgctggtttcccaaaaaagtcctgaggagtgatacatccatgaaattcgttacagctgcaaggttatattctaccattcttaagctacaaaatatatggagctggaacacacctgagaccaatcgatcaaccctccctttgttttcggaatcgcatcaatggaagtatcggtgttctcatgggagctaggaatctaaaaattgaaagtatagtttaagtgtaatgttattctttcttccatgtggagttgagaacttttaatgggttattacagaatgttgagatgtagagagctaaggtccttacaagtgtagtgacacagaactgttctcctgctccttcacaatccgaagctgtgataattgggcttgccacccagacaaatccactttcttgaaagaacttgtgtgtagcatatgccagagtattcctaactcttgccacctaaacaagatattttgcatatttaagaaatatagaacttggtgattatcacaaggcagtaagttcaccgtcaagtttcactaaagtgaagcctgaaaggtgagcagtagaagcagtgttcacataaaatagacaaacaacagtttctaacaagagacacgtttctgcgtgagataatacataatatcaccaagaagctaacaagagtcgtatacagtatggaatttcaggaaggtataaaaggaaagttaccgccccaaaagtgttggttctaggacgtaaatgagccttggttctcaagaattcccggctgacccttttcttctggatcggataggaagagtcacactctccaacctatgataaaacgagactaataagtgacaaaaattcaaagaaacatactttcaaacttaaggaactaaagttcagcatccaaagtagaagaagaaaagacataccacaatgattttctccaccttaagttccactttttgcttcgttccctggctagctacaatagtaccttgtacagatactgatgctccagtcaagatcgaaccagattctacctattatccacccaaatggaatgtggcaaacaaaacatgtctaaggattatcataaggtttacaagaattcaaagctcctaagttctaattattgttctcaagtcacagaaattacctgatcatacccttctgcatccgaagtcatcacacattgcaaattcgataagcatgaaccatcatttatcttccaacaacaacaacaaaataaaaaccaaaactttgtcagcaaatcaatcaagagattgataaaaagatgaagaaaggttgagaatttacctcaatgaatgtgacactgctctgagatcgaagtgtacgaacccaacccataatgttaaggctctgcccgacccgactcagtccttcgtccgctcctcctttcacttcagctatcctcaactttttcctgaattctccaactttactcccaaatcgtttctcgtaactctcaactttatttccatcaccggagccgagagattccgaaacagctgtgcaaaagcatctccggcgagaattggccggaaaagcatcgaagggagggagaacacggcggcgtagaggacggaagagagaataagaagggttagaaatggtgaagaatgataagaagcggagagtagagttttgagttagacggagagatgtcgccggcagaaacgtggccgccattgtaatcgaatcgttcactgttttaggattgcgcgagtcttcttcttcatattggaacatccacccgacccaagttggttaacccgaccaagattggtattaacccgccctgtaaacttttagctaaataagcccatttagagtctagaggcccatcacctacaaatgttttcaactatgaatcggcctattgaaaagaaaaatcttttgccattagaaagatagaaattcagggtagcagcaacattattgttacatttaaaagttaagtcaccaccaagcagtgtgtcttttagtaattgtcttgtgtcaaactggagcataagtgtatggatacaaaaattagtattattgcaatatgattgttgggtcacatgatctggaaaagtaaaagcagctcattatagggtactatgtattgttaagaggctttgggttttagcactcatatgcgttgacgaatgtcaacaatctttagttgacacgtggaaagtaatagagacccacatccacatggaagcagttgagatattgacccaaaaaggtacacaactaaaactctaaaaacacaaccccaaccacttggcatcggatctctcacagaccggtgcggttgctcacctgcattcacttctcattgtcctttcgttttgttattgtacacatctatctaatctatctattgttccacatgttaatgtaagtaaaagacaacacaataaaaccaaacaaattaagctctaaatatcaattatttacttacttttaggttgaagatgctacccaatagtagttgtgatatactactcataatgagagagaatttggtatatacaaaggcaggcgagacaggtgtgaccggttgttgttgatcttaattaggttaccattataattaacccgattaattatatatcctctgtaaacaagtttggttctcattttttttacctgaataactgtgattaagtcaacgagcattattgttgcatttccttgtgtaataatgagccacattattgttgcatcacacacttatgctaataaagaaaacaggttctacacactagaacaaaaaaaataacagcaaaaagatattagcaaggtaagcataatttgatcatataacaaaagagaaacgttatgatctctattagacagcttaaccaacaaagctaaccccactttcctcttcatatttaatctctctttctctcctttcttcaacaaatatctcctgctcttacatctgagtctttttctttctaaccttctgattcatg

SEQ ID NO: 22823 - DNA, 3000 bp, Unknown; identical to SEQ ID NO: 22822
  misc_feature (1)..( 3000): 2750-1469P.txt file - cDNA_ID_2123166; gDNA_ID_2926168; Annot_ID_199265

SEQ ID NO: 22824 - DNA, 3003 bp, Unknown
  misc_feature (1)..( 3003): 2750-1469P.txt file - cDNA_ID_2123184; gDNA_ID_1621100; Annot_ID_55848
gtcgctgataacattttcatcattggaagtctctggaagtaaagtgctctgattattcaactcaccgctacaagtaataatagtctgtacattcccatcgctacaatcatcttccatccttgattctacattggctttctcttctgtttggtcaagaagattatccgtcgtctcagttcctattttaccaagatcagtagtatctatagcctctaccgtcgcggtattagaagtcaagatggaattcttttcctccacagatgcctcttctacagccgttggtgagtcatctttaaccagaacctgctcctgtccatcatctgtctttaccacagaggactctcctggagtatcatccacagaggggttgggttgtaagttcaccgtttcctctttggaaagacttctttcatgggatgtctgaccaggctctactgtttccattgtgcagcctagttcatgagaagtgtcagatttcttgatagtatcctctcttacaataacttcgtcctgtccaactgaattcaaaagcattgcaacagattccgacgaagtagcctcagaccaaacattattgtgcctagaaatggcacaggactccgttgcacctgaactaaacactataccactacttccacgagagaaatcctcaatccagttattatcttcgttaccctcaataccaagaaaagcttcagattcacctaaactatcaaacctcagatgcgtgttgagtgtatcatcaaaatcaaactttggaagagcataaggctgtaaaactggtggaaatttgttgttggcttcaccagctaaatggagattctggttttgaaagtcactgtcatcataatccatgagtttattcctgaaatcagagacatatataaacatcaaacaaccaaaagaaacaaaagcataacacaacaaccgtgaaacatatttaaagaagcgactctggtcattttcttgtcgagtggagtaaaacagtaggaaagcgaaaagtaccgacacaagagtgtatggagacgctacctccctccattcggtgacaagaaaacctggccgtcagacctcaactgttacctaatcgcacgttcatctactactgctccaccaacaacaaaaccatacgcgtcaattataaaatctcttccttctcaaaattcaagggcacacgaaaacctaaaagagtgaactttcttaaaatgataaattgaaacgctagcgaagaagttaaactcaccggaaaattcaaactgacggaggtgacctagggttccggcgaagaaacgaggtttggcgagtgaagcagattgggagagaaatgcccgataaattatattcgctttcctcggcaaatgaaatgagtctggtttaagtaaagcccaaaattaaataaatatttggagagaaaataaagatggatactgatgccgcttaatccatagtgacacgtgtcgaattttctggatcgtgtggctaatattgaacttaaacaaaaagacgcgaaaggttttttacttttaaattaacgtacgttaaaatttagtgtaatttactggctagagttccgttaaaagaaaattaaatgaccaagaggtaaaagaaaacaacttttgtttgacgtgactgtggtaaaagttagaagatttattgttgaaatgactattgactactgattagtgtaatgaagatgattggttggctaaacaaaatggaaagtgtcttaaggataaaattagagaagagacatgtcactcactaactaatagatagaggcttttgtgtgttaggcaattgacggattggacttttggaccatcagatcaaaaggaatccattgggatatttatatgggcttaggcccactttataatttttttctgttaggtttttttggtattttggtttatgaatgatagtatttgtaccatagatggtttggtacggtttcgtattggtattggttcgacttcaagttttaatcaaatgtttatttaacttgaaaacaaaattggatttaaaatcaggtttttctttctgtttgtttagtttggattcgaattcaatattttgaataggaaaaatgaattcataattttaaaaaaaatatagttcattttcagatcgattatttgagtttggacgtttggttcataatatcagtttactgggatggaataattttcaacttttaagcggtagtgggtggaaaaacatttgtcagggatcggtttaatctaggattgagcattccacttcgttgttctatactgcaaattaaattcatgataataaaaaactatccataaaccatatactaaaaatattacttttaaaattcatggggcggagaaagtattataaacaaccatcctctctgcaaatttttatttaatgtcaccactactttggatcacttttctaagatcttaagttttctgtttgttgcaattttattacatgtatatgccaatatctcttacacaccaactccaaacaaagcagcggtggtacatgaattaactcctaatccctattaatattttaggcgtttagcacctcccaaactaaaaaatacaaattgtaaccaaaaaaaatatatatagatataaaagaatacgaccatctatcataattggtgtgagacaacattagtttaaatgcaggatattaacatgacaacagaacactcttatcttcacatattatgaaataccttatccatcattttcatagcattataccaattggttgtctttaatcatcttcgatgtcactaaccctcaaaattcaaaagaaaatgaatagtctaaataattggcggtttgggcggcatccaattgtgacaggccacgtagagtgggaccaacaacttcattacctcgtttggctctttgctatatataaagtcaagcattagtatgcccaaaaccacacaaatagaaataacttgtaatcaaccaaagtcgaaaaacagagttattttgtcggatcaaaatg

SEQ ID NO: 22825 - DNA, 3003 bp, Unknown; identical to SEQ ID NO: 22824
  misc_feature (1)..( 3003): 2750-1469P.txt file - cDNA_ID_2123184; gDNA_ID_1621100; Annot_ID_171348

SEQ ID NO: 22826 - DNA, 3003 bp, Unknown; identical to SEQ ID NO: 22824
  misc_feature (1)..( 3003): 2750-1469P.txt file - cDNA_ID_2123184; gDNA_ID_2926168; Annot_ID_139987

SEQ ID NO: 22827 - DNA, 3003 bp, Unknown; identical to SEQ ID NO: 22824
  misc_feature (1)..( 3003): 2750-1469P.txt file - cDNA_ID_2123184; gDNA_ID_2926168; Annot_ID_199268

SEQ ID NO: 22828 - DNA, 3003 bp, Unknown
  misc_feature (1)..( 3003): 2750-1469P.txt file - cDNA_ID_2123194; gDNA_ID_1621100; Annot_ID_55855
gagtcttttggattcggttacgatagttctctattcctcttcaaaccctagagttcgtgtttctgcgatatccatcggtttctccttcatatatccatcaaacgccaaagattctctaattctctctcgagatcgtctgcaatttcaccgtgaatcatcagggataccgcggtggtttcgattctatttcctcgattcgaagcttggagagtttcagcttctgaattgaagccagtgattcaattgtttggagatatctgagcattgtccctgcgatgtattcgattcaatccaacacgggcgttctcgtttcgtttctgagctttgtgggaaattctcgttgatttgatttcgtcttgaagagcgcgtgagaggtttcttctgtcgaattttgttgaagtccaaccagagaagtaaagaatcatattttgtaattactttttgtttttgttttggaaatcaactttctggcctccatttttttggcctgggttaaggtttttttcaaagagagtagattctggtgtgttttaataaattagtaatacagattgtatttttattcattatcagattaattccaatggcaatatattacaagtttaagagtgcgagggattatgataccatctccatggatggtccttttataacagttggtttactcaaagaaaaaatttacgaaactaagcatttgggaagtggtaaagaccttgacattgtcatctctaatgcccaaactaatgaaggtttgtcttcctccttcttatcctattcacctagaagatattgtgcaatgtgttttgttgttatctaggttggattctggtctgattgtgatcagtattcacttatcaaaatatatggttattacttgctttgtcaaaatttccatggtttatggctttcttccgaagtaatcacatttagcactgttaatctggccatggattgttcagtatctaactgcttcagtaaaatggatgttatgtacctggtacttccttgttagttgaataaaaaaaataaaagtgaagttcttgcgtactgtattagcttatatgttaaatgtgattacttctgagactactgttcttgattggttgtggttgtgaatcattagaaagaaacccttaactacgattctctgttggtatagttgcaatatgtggtggccttcatacttatttttttttttgcaatttcagaatatctggatgaagcaatgttaataccaaaaaatacttctgtgctaattcgccgggtccctggacgccctcgcatcagaattattaccagagaagagtaatttctctataactttaatacctaatttctcaactgagttgttcaatctttgtgttctttcgctctaagctgcgcatttcattattagttgtgtgaaattataccagattcccatgtgtcatgatgtaaatgactacattttgcaggccgagagtcgaggataaagtggaaaacgttcaagctgatatgaacaatgttattactgctgatgcatctcccgtgagttggctttctcagtttttattggcatggaatccttctacacaaatattgatttacaacttaatctaccttataggttgaagatgaattcgatgagtttgggaatgatttgtattcaattcctgatgccccagcagtccattctaataacctatgtcatgattctgcaccagctgatgatgaagaaaccaagctaaaggcattaattgacactccagcactagactggcatcagtaagtaatcttcttgaactgatggacattagcatgctaaatgagatcttgacatacattttgcataacattcgtatttttctttcatgttacagacaaggtgcagatagttttggcccgggtagaggttatgggaggggtatggctggaaggatgggtggccgcggttttggtaattatattcctgtatatgattgacttatatgcttcagtctccccaagtatttagctttgagactcggatgttctgttaattattattgtccaaatattttgtttgctctttcattgaaatgtaagatatagagactgattgtatttgtttgagtaggaatggagaggacaacaccgccaccaggctatgtttgccatcggtgcaatgtttctggtatgactgacttagagaatctttatatatttttaatttggttaagtaatgtctcgagtgtgtacggttattaccgagaaatgaatgttctgaacatcattttctgtctcaggacattttattcaacactgctccacaaacggtaatcctaactttgatgttaagagagttaaaccacctactggtatccccaagtcgatgctgatggcaaccccaaatggctcttactccttgccaagtggcgcagtagcagttttaaaaccaaacgagtacgttgtcactaaattaacatggcgagttgtttgttagtaccttcacataaattattagtaatgttgatcacttatgtcaattgacaaatttagggatgcgtttgagaaggaaatggagggattgacatcaacaacacgatcagtcggggaatttcctcctgaattaaaatgcccattgtgtaaagaagtgatgagagatgctgcactggcaagcaaatgctgcctcaagagctactgtgacaagtgttagttctcttgtcaaattgccaatacttctgattccttttgctgttccacaaacgcctttttatgtaatcattatctacaattcaggtattagagatcacatcattgcaaagtcaatgtgtgtttgtggagcaactcatgtcctagctgatgatcttctacctaacaaaaccctaagggatactataaaccggatattggagtctggtaacagtagtgctgagaacgctggcagcatgtgtcaagtccaaggtatttcatactctcattcgcagtcttttatatttgtgtgtaccatcattggtaaactaatgagtattaaatctagatatg

SEQ ID NO: 22829 - DNA, 3003 bp, Unknown; identical to SEQ ID NO: 22828
  misc_feature (1)..( 3003): 2750-1469P.txt file - cDNA_ID_2123194; gDNA_ID_2926168; Annot_ID_139994

SEQ ID NO: 22830 - DNA, 3003 bp, Unknown
  misc_feature (1)..( 3003): 2750-1469P.txt file - cDNA_ID_2123194; gDNA_ID_2926168; Annot_ID_199274
ggagggctacttcttcctcagacgggttagcaatggcatggagctgctgcgagtatctcttatcactcaaagcgtaagcatttcacactgagtttttcccactgttgaaaggtactttataagtaactgcatatgtactttttgtggctttcaactttcaggtacacagtatttgcaacccatatggacagtctcgcagagttagcaaccatctacccaaatgtcaaggttcttcatttttatgtagacatcagagataaccgcttagacttcaaggttctgtctgtcttcctttcgtatgagttcgagactttaggtactgctgctgaatgttacattgttctgatcagtttcaactgcgagatggaaccctacatgttccacattatggccttctattagctgaagtggcgggtctgcctagtacagtgatcgatacagctaggatcataaccaaaaggatcacagacaaagtattacccaaaacttaataaatatgctagcatattaagctctattgttctcatttcatgatgttgaacaggaaaataaaagaatagagctaaattgtgggaagcaccacgaaatacatcggatctaccgagttgctcaaaggttgatatgcttgaaatactctagacagacagaagactcaattcgtcaagcactccaaaatctgaatgaaagcttcactgaagaaagactctaaatagtttataacagaggacactaggatacattcacgttttaattgcaatgtctataagggttctacattactagtcccaagtgagctttcgatttgttggctttcagaggctaaaggtaggagcaaatctacactcttgatattaagtagggaaaaattaatcatcaaaaataagtaataactaagaaacattgctttatggtcagaatcaaagaactcaaaacttgaaacaaactcttgaatgtgaaagtcttccatcccaatgtaattccagaattccgaaacacaatccacactgaagatataccagttcgagaaaaaacaaaacataaaactgatcaccggtaacgacggagagagatactgttgttcttcttccaggttgccctgcgggaaggtctgttcttgtggttgttgtgaccctttccacgaagaccacgattcttctttccttcggaggtgagacctctgagttctctgtgcttgtgcacagggttgcagatccagttgatccttggatcatttcggacggcattgtgtgcagggtctacaaggataatctcgtagtacttgtaggtagagtcctgagaaaaccagagaaccaaaccattactcacttgattccatactattaacacatttacaggatggcatagcaactagtaactaaaaacagtgtgatgcatacctcattgagccagtaggagttaacaaccctaaggcctcccagtttgcgaccagcacgttcctcagcaacagatctcttactacgctggaatttgagctgtgtcactccctggttggtgggtttaccgtacacgatacccttaggcactggcctcttgcgtccaccacgtctgactcgaacacggtagacaacaaacccctaatacagagaataaagagaagtcagcaacacagagagtgaataactcatcaaacaaaagtacaatttttttgatccagggcttaaaaaaaatgtatcaatcttagacaggaacagagtccacaaaagataaagagctgttcagtcagaagaatgaatctatgtagctgggttcaggaagtattctatcataaagcgcagacataaatgactacgcatcaagacaccgcttaaccagcaatcaatcgataaggcttgattcaacaacattacctaaacctattaaattgataaccaaaatgaagagaagaagaaaaagacctgcttggccttgtagccgagacgacgagccttgtcgggacgagtgggacgaacaagacgaacaatggaaggctgctggcgatactcccaacacctaaccctctgaagaaacctcatcacatccgactgcttcttcctccatagctccgacacgtatttgtacgcacctgtaatcaaaaatcacatttcatccttaattaacttctagaatctaatgaacaatacagaaacgacatctgagagagagataatagtgagaaacatacccattgcgattttccggcgtcgcagtcacttctttcttcgaattaggtttgtgctttaaatagatggctccatgggaattagggtttccatcagacaaagaaagcccttattgggcctttttccgttagctttatgtattgggccttcgctacaacataaaacatctctaattgaactgtatggcccattataaatttatgtaaaaggagccaaaacgcaagagaattaggtgaagagtcttttggattcggttacgatagttctctattcctcttcaaaccctagagttcgtgtttctgcgatatccatcggtttctccttcatatatccatcaaacgccaaagattctctaattctctctcgagatcgtctgcaatttcaccgtgaatcatcagggataccgcggtggtttcgattctatttcctcgattcgaagcttggagagtttcagcttctgaattgaagccagtgattcaattgtttggagatatctgagcattgtccctgcgatgtattcgattcaatccaacacgggcgttctcgtttcgtttctgagctttgtgggaaattctcgttgatttgatttcgtcttgaagagcgcgtgagaggtttcttctgtcgaattttgttgaagtccaaccagagaagtaaagaatcatattttgtaattactttttgtttttgttttggaaatcaactttctggcctccatttttttggcctgggttaaggtttttttcaaagagagtagattctggtgtgttttaataaattagtaatacagattgtatttttattcattatcagattaattccaatg

SEQ ID NO: 22831 - DNA, 3000 bp, Unknown
  misc_feature (1)..( 3000): 2750-1469P.txt file - cDNA_ID_2123204; gDNA_ID_1621100; Annot_ID_171357
aaattaagtactaaaatttacaagaaatcacattttcctaaaaaagaaagagaagtcgtaactggtggtattctagggccttttggatttgaaatcatgaatattagcccatttagcttattgtggtttaggtactccattctcacattaggacttcaagccttaagatgcaatcacatgaatatgaactgtgagccattttctttatgcaggttgttgttaagtgggtatgcagattttttaaaaaatacagtcatacagaggaaacaactgtgtgattaataaaccagcgtaaaagcaaaaactacactcttagtttcacatttttggaataattagaaacattaatgcagaactgtaactatttttagccgtcttctcaaagttatctgcaggtttttaatttgcttttattctcttagaaaccttattgtacttaaaaaaacttatatggatcttaatacactttctaactatgtgtgttaataagagttatatatggtttaataaatcattgtctgtgctaataagagttataaatggtttcaaaaaaccctttttaaacatagattatgttgttttcctctgccattaaacttagacgcatcttaattactaactcaaaaacaaacccctctcgctctctctctttatatatatctataattatatgaccttaccgatatttacttatagtttagttactactaagtttgatatgagacaagaacatgtctcttgagatatcttcttcctagcttctactgtgatgtatctggattctcgatcaccagcatacctatctaccctgcaacaaagcagaaacaaaatccaactacttaagcacaaacctcaacaagatcaagcaatgtaatatcataacaacgttaccatatatccatgaaaatgataagtttcaattagggagatgacttcacctttttccttcaccaaaagactcctttgcatcgatcatcactgcaaatggaatacaatcgctgttacgggttttgtatcattaaagcagcagtaccattaggttacgtaaagctaacatagaatgaaacttcataaaatctgtaatagcacctaaaggtctagactttcatccatttcatactatctacagatcaatgtagctaaagggcaggttgatccaagctttcatcgagcaagtaagtggactgatcaaagctaaccttagccggagaagtggctactctgaagcaatcagcattcatcccaacgagacccaatccagggaaaatgacctacaatggcagacattgaattgcctaagaaaatggagacactaaaaaaacgtagtcattgttttgaattctctgtgaggcaattcgtcgaacacctggtgacttacatcgagatgtttctgcatagcttttgccctcttccttggccggcgagatgacctgttcccactcatgctgaacaaatcttcttcgatctcgtctcgagctagagcaacccaaagcctatgattctcgtttgcaacctcaccaccgcctaatccgggtgattccgccgggattcctctctgcctgttcgatttcggctcaattcctgcgcctgatttctgattcttcacctccgaacctcctcctccgccgccaccgcaaacctccgccgtgaacacgccgtttcctttcttcgaaccaccataagccttcctcggacgaagattccacgtcctcttcgcttcctcctcctccgtttcttctctctccttcaccgacaccggcacttcctctctcgcgggagaaatctcatcggatttcagcttcttcaggttatcgtgctctgatgagggagcaaaggaggagaaagagagacgcggctgacgacttgaccgtgacgccacgacacggttagaaacagccaccgtctccgccgattgagaagcagacctctccgacttggaattcgcagacattggtatgagattataccaaaacgtattcacctgagagatgatcaaaaaccctagaaggtaaaaagcagagaggagagagagagatgtaggagatttacggaagctgatgcatgcgtaagtttctaattatgtttttattcatggggtgttattggtttatgatttcaaaagacttttagtgttttaaagtgttatttagaatttattgttattcgatcacgatttgttaaaagtatgttatattttgttggctaaaataaatcattagttaattattttatatcctgatatatcaacatcaattatcatccttctgatatggggattaatatatgttaacaataaatccagaaaattacgtttagatttagacatataaataaagagatcttaaagaaaagaagagaaaaaaaagaacccgtaaaaagcttaaaagactacaactgcttaagtctatcaatgatgatcaatatattcatgtaagtgctaaataggttaatttctctagtgaattcgattttggactaaaaatcaacaaatattagatcatctagtgaattcgatttctctaggccatcaaagaatattattagttaggtccaaagacctaaatttatttttgtgtataaatttaataaaatagaaatttacattttgatatttttaatattattttggtgacaaaatatttagaaattttttatatttttaaatattcttttattttcatatattttttattttattttacaaaaatttaaaaagaataaaaataaaaataagttcataaatattaattagcaagatatctaatctccattgcttgtttaaaatgttatgtggacgcgcaaatagcttcgtatagattatgttacaaaaagatttctaaaattaactatgtttaagttcgtattattttagttaaggcccatcagagaatattagttaggcccaaaacagtgacactcaccgttttggcatcttctacacatgagcaaaactagacgcaacgcaatgatggcgactaaaacctcagagcaaaaaacatg

SEQ ID NO: 22832 - DNA, 3000 bp, Unknown; identical to SEQ ID NO: 22831
  misc_feature (1)..( 3000): 2750-1469P.txt file - cDNA_ID_2123204; gDNA_ID_2926168; Annot_ID_199276

SEQ ID NO: 22833 - DNA, 3003 bp, Unknown
  misc_feature (1)..( 3003): 2750-1469P.txt file - cDNA_ID_2123239; gDNA_ID_1621100; Annot_ID_171372
gtaactagttgacttatggtttctcgtttaattagttaaaaagagaaagtctaagcatttcattcgaattctttctcattgcttgtacacttctgttgtagtcattgagcatcaatgagtttctgaaacctgcggatggaaagagttactacagaccaagaggtggttaccaaggtggaagggaaggacgtggaccaagagaaggaaaccagagggacggtggaagaaacctgagggaaggagggagaaaccagagggacggaggagctgcagcacaggcaccaacaccggccattggggacagtgcacagttccctactttgggtaagtaaggcaatctctccggtttggtccttcagcttctgtctggactcgtttctctgtaatatctcactcggtttggattttgttcttctgattctatttttattgttatactcttccctttagagagctgaaggttttttgttttgcgaacccaattttgggagttttaagttaaatgaggccaaaaaatcaaccattctccttttgttgtttaggtttcaattatatttaggtgggactttttactaaagaagtttattaataatccaagtaccattacaaagaatttaaaagcttttggacacaagtgaaaaattgaaaaaccaaatacaaaagatttaagaagcaacgttgtttagatttcttacatgcaaacgaatgacataatatggttaagtgttaccaaagcgaattaagaggagcagcagcctgattgctggttaacaggttgtcctcggatctggaccgttggtggcttagatcctcctgcaggttggctcgccattctgcaagacagaatccggttaaggctgctggtctacaaatggtctgcaaatgtaataaatatatgagctctgaatacaataatgattggtgagttacctggtcttgattgcagcagtcatggccatgaaagcttcttcgacattggtagcattcttagcacttgtttccaagaatgggatcccaagttcatcagcgaaagcctgtgtagacagaacaaccattacagtaaatccttgagacaagacacaagagtgtcaaagaacctttaactgtgacgaacttctgaagcatattaccttagctgtctcagtggatacaactttctgtgatgtgagatcacacttgttcccaaccagtagcttgttaacattctcacttgcatagcggtcgatttcatttagccattgcttgacgttgttgaagctttctagatctgttacatcataagtcacctgacaaaaatgaaagtttagtttcattaatggatgtcagaaaaagggagataatgtaagtgtgacaacgaacttacaataattccatgagctcctctgtagtaactgctagtaatcgttctgaaacgttcctggcctgccgtatcccactgcataattggtgatagtaataaggagagtgatcatatatatatatatatatatgcacatacaacaatttcaagtgattggcactagtcgagacaacttacaatctggagtttgatggtctttccatcttgttcgactgttcggattttctgcaaaaaacatcatcacaaaattcaaaattaaaacttttctgtttcatgcatgaccaatagataaagtgtaagaagcttacaaagtcgacaccaatggtgctgatgtagctatccaggtaggaatcatcctgcacatacaaacaaattgagacactacttgagaagatcaacaacgacacttaatagagttacttatttgtatgtagcctatttatgtatacaaatatcataagctaggtgattaagagagaaatgaagttacttacagcaaaccttagaagcaagcacgactttccaacaccagaatcaccaatgagcaaaagcttgaacaaatagtcactgcagatcaaaaaaattagaaagaagcataagacacatgtaagtaagagagtataaatcatttttgacatttctccagctatattaagagcttatgacatatttcaaagttgctaaacattgtgaagaagctcatagatttctaaacgccatattcaaaacacaatctcaagcaccataatcaaaatcgactatggattcacgtcacacccgtagaattttcaaactaagagaatcatctgtgtattgaagagaaacaacagatctcaaccaattttattctagatctaatcaaaattccgatcaacgaaacgagactccaatcacgaaattgatcagacagattaacaaagccagcatcaacataaggttaatttcatgaatctccttgtaaaaaaatgatacgaagaaaatctatagagaaactaaattacataacatgttataaatttcaaaatcgatctgaacgattagagaagaagaagaagaagaaggttcttactattcaggattcatgattgatctcggagctggatcgatctaccggaagaaaaataaaataagaagagagattccgccgattaaacagagaaaagagccgtgatcttcgtcggtgatgagagactgagagagagagagacgtaacacgatcggtttgttgtgtcgacgacgtggttaagaaatgagaaagggccacactacaactattgtttttaaatgcttcttttttttggttgcattgctgacgtgtcttcgccaacccagaagatgcgtggacgagaaagtttcaatacgatacaacaaaaagaaaaagaaaaaagaattgtatttacataatgggcctaatgaaaaaacttatcactaaggcccattaaacattttctcatcgaccagggaacagagaacgctgaatcatcttcttcttctctttcattttccgagtctctatctcttgctttatcaacagttcggtaactacgacaaagaaaaacaggcgggaaaccaaatcaatggaggattcttagctttttctctgtaactcccattatcgtatcttcagcttagtgagatagatg

SEQ ID NO: 22834 - DNA, 3003 bp, Unknown; identical to SEQ ID NO: 22833
  misc_feature (1)..( 3003): 2750-1469P.txt file - cDNA_ID_2123239; gDNA_ID_2926168; Annot_ID_199291

SEQ ID NO: 22835 - DNA, 3003 bp, Unknown
  misc_feature (1)..( 3003): 2750-1469P.txt file - cDNA_ID_2123300; gDNA_ID_1621100; Annot_ID_171386
caccctttcatgagactagagcttcttcaagctcaatcttgtcctgatgccatcactaatcatgttcaccttctacaaaatcctgcatcaccaccaccaccacctcagtaactttatgcttctttagtggagtcataaactgtaatacttagggttcaaaatcaaatttgaaatgaaggtttagattttggatttcttttgtaacattttattaaccaaaaacccaaacattgaaaaaggaaaaaaaattgtgattcaaagattttaaactgggtccaagcagaaagcgagtctaacatgggccgggtctgttttaaactgggtccaagccttctaatcttatcacgtgagcgtcacgtgctctctttttctctctctctctctctccctctggctgacgaatcaccggagaacccaatttgtttcattcctttcccgttttgcccttccctgttcttttattcttttcttatctacaaaaaaaacttcgagcaagaacaaaaaaaaaaaactgtccatgtaccacaccatgagattagttgtcagatagatattcgcgagacgagaagctccaattaaaaaccctagagctcatctctctctccaggtacggccttttcgtttttggctttcaccggcgtggatctccggtgacggggagattcggaatttcggagagattttagatcatgtatagggagagaggtatggttggatcgaagtcggaggtggtcgatcggaaacgaataaacgagattcacgataacaggccttcgcattcgatgtctcagcctgtcaatggaaaaggcaaggtaacatcgacctccgttttgatggggaagcagcaattgcatgataaggaatcttcacgttctggttctatctctaagactaacatttccgacggttagattcgattttcccctctatcgctatttctctatgtttatcgtattcgcagattgtttatttcgagttcttgtcctgtgttggtctcctgatttgggattcaactttcttaaaattgattagaaatttcttaatttgacctattgttcttgaagaaatgttattcattttgttgttaacaaaagctagaagcttgatcttagacgcagtctagttttggttgctgtgtattcattttgcttatatcgagcaaatcattgttgtttgcttaagaacaagttataagaatgatgctgatgaaatgttttgtgggcatttcttgtggtgataatagctgtggatatatcagacacagacagcgaagaatcagaggtcagtggttctgatggagaggacacctcgtggatatcttggttctgcaaccttcgtgggaacgagttcttctgtgaagttgatgatgattacatccaggatgactttaacttgtgtggactcagccatcaagttccttactacgactatgcccttgatttgattttggatgtggagtcttcgcatggtaagtcttacccatgaattattagtatgtaattgtgtgtttttcataatataatagccgaaaacttggttcgtctttcttttcgttttgtgtcttcaatgtttgatttggattgacgggttaacaggtgagatgtttacagaggaacagaatgaattgatcgagtcagcagcagagatgctatatggaatgattcatgctcgtttcatattgactagcaaagggctggcttctatggtaaagaacttttttagactcaagttagatacttaacatatcctatagaacatacactgattgttgttttctttacaatggttttgcagttagacaaatacaaaaactatgactttggaagatgcccaagagtttattgttgtggccaaccttgtttaccagttggtcaatccgatatccctagagcaagcaccgtaaagatatactgcccaaaatgtgaagatgtctattacccacgatcaaaataccaaggaagtatcctttttctaatctcagtggtaaatgcagttctgtgcggttacacacacttagctttactttgattgtcattagataattttatcatgctgttttcgttgctgctatctttggtttttgtcattctttaacacacaaaaaaacagacatagatggagcttactttgggacaacgtttccacatctgttcttgatgacgtacgggcatctgaagccacaaaaggcatcacaaagctacactcaaagagtgtttgggttcaagctacacaagccgtgaaggaaacaaggaagaagaaatgcacccttgggttttgagaaacaagaaatgtgtgtaaacaaaacaaaaagaaaaagaccatttgtatcacagaaggtgaaactagttccatctctctctctctctctctctttttctttgtttttggtattgtgtttaggtttagataaaacattagcagcatggactggtgaactgaaatcccatattattgtaatactttaccttattgttcctttttgctttcttcttcccactaccaaatagttatcacaatttccccaaattgcttgtaccaatgttgtgagcttattcttgtttatctctcttatgattttgatgtcagttccatccggatacaattgttccataaagcccattgggcccaacaatccacaaggccaaccaaattcgattatattaaaagtttcggccctttataaatcaacatgtagctttctttgaccagtgaacaagaaaaggtttctcctttttaatttaggtgtataggtgtgtgctcctgcttgcatatagattacgtaagagtctctctctctctctctctctggaagagggccttgtgattgttttcttcttcttcttcagcttctaatcgaattcgttatcgaattgaaagtttcgacctttcgtcgttgtccctcaatacgctctattcttttgattagcatccctaaaactaaaatcgcagagagaatttctccgtttggatctctaccaaattggggcgcttttgggaataatg

SEQ ID NO: 22836 - DNA, 3003 bp, Unknown; identical to SEQ ID NO: 22835
  misc_feature (1)..( 3003): 2750-1469P.txt file - cDNA_ID_2123300; gDNA_ID_2926168; Annot_ID_199305

SEQ ID NO: 22837 - DNA, 3000 bp, Unknown; identical to SEQ ID NO: 6407
  misc_feature (1)..( 3000): 2750-1469P.txt file - cDNA_ID_2123319; gDNA_ID_1621093; Annot_ID_55546

SEQ ID NO: 22838 - DNA, 3000 bp, Unknown; identical to SEQ ID NO: 6407
  misc_feature (1)..( 3000): 2750-1469P.txt file - cDNA_ID_2123319; gDNA_ID_1621093; Annot_ID_170755

SEQ ID NO: 22839 - DNA, 3000 bp, Unknown; identical to SEQ ID NO: 6407
  misc_feature (1)..( 3000): 2750-1469P.txt file - cDNA_ID_2123319; gDNA_ID_2926159; Annot_ID_139656

SEQ ID NO: 22840 - DNA, 3000 bp, Unknown; identical to SEQ ID NO: 6407
  misc_feature (1)..( 3000): 2750-1469P.txt file - cDNA_ID_2123319; gDNA_ID_2926159; Annot_ID_198656

SEQ ID NO: 22841 - DNA, 3003 bp, Unknown; identical to SEQ ID NO: 18132
  misc_feature (1)..( 3003): 2750-1469P.txt file - cDNA_ID_2123338; gDNA_ID_1621104; Annot_ID_171529

SEQ ID NO: 22842 - DNA, 3000 bp, Unknown; identical to SEQ ID NO: 6221
  misc_feature (1)..( 3000): 2750-1469P.txt file - cDNA_ID_2123338; gDNA_ID_1620864; Annot_ID_170411

SEQ ID NO: 22843 - DNA, 3003 bp, Unknown; identical to SEQ ID NO: 18132
  misc_feature (1)..( 3003): 2750-1469P.txt file - cDNA_ID_2123338; gDNA_ID_2926185; Annot_ID_200525

SEQ ID NO: 22844 - DNA, 3003 bp, Unknown
  misc_feature (1)..( 3003): 2750-1469P.txt file - cDNA_ID_2123342; gDNA_ID_1621104; Annot_ID_171526
tgctggttttgggttctcttttcaactcacacttcttcaaaagcgaatttgcttgtaacatgttaatataaaattattattaaatctataggattgtccttaatgggccggccttttacgatataaaatttggttcaaataaatgtcgaatacgtcttttcgttcagcccatgaattgactaaacaaaggggattagaatccaaacaatcaaatttcttctatagtttagtttagaacaagaccatgaccatgaccaatattatatatatcgattattcgtttttatatgttctatatgcttaaaccaaacttaaaatgtaaaagaaaaacactgtgaatcattttcagagttatgatgtattttgttaggaaaccaaacccctgttaaaaactaatactgaaagtctgaaactatgacgatattcactttcaattggattttttttttctatttgatttaaggaagtacttttgaacccgaaaactaactgaaacttaaccacacacaaaaaaaaaggatttgtatcttatattgaacactacagaatttcgacattagattttttatgattttggttttcataagagtttaaaaatgtgatcatctgttttggacactgcaaatagagattttaaaacaataaaccaagtagatataatagtccgtatagtttgtccttatatataacattataggtgtaaaacacggactacataaaagtggacacataaatgcaaaattgttactacgaaactttacactgcatgtgactgatattttacgctcattacatttggatcattcgtagtgataaattaattcagggtaacatggcaagtaagtgagaacgtggtcattaatttcccccaactagttactaaaataactaaggtaaccttcgaacaaaaacaaaactttggtaaaccaaaatacaaaaacttaggtaacatgacaatgaaagtaaagaatatatagtacttgttgataagaatatagtactcgttaataaaacgctgtcggtagaagcgggtttggacgcaatcgcaggaattagatggaaaacaaacaaaaaagaaaaagaaatagagttttagcaaagagtcaaaaagagtcattttcatatatagtttggggtcaatgtagggctataggaggataagttgtgactttaagagtgaatgagattctttctcaaatgaatggtgtcaaggactagtattcattttttcttctttcgtctccatccacctatcaatatccccaatcttttttacatttttgaaatgttttttgttttgttttgttttcctcaattttagataataagtagacgaatctaatccctactaggcctaatccctatataatacacgcattttatgtcatattagaaagcaacatgttagttgaaaagtttaaagtgttttggtttcagctttgtacccactattagattttaattactaatttttttttgtaactgatttatcgtttttagtattgatagatgttaggaactttatatcaaaaataaggtgagacctaatgtataaaagagaagcaatcaacacattaccaattcagtttaaatagaaaatttgctaaacttaaccccgcatgcccttgcgtaaagcattcaaagcacaagtgaaaataaacccacacttcagaagttatatgttagtcaattgtctaattttgattgctattttccttttctctttctttattttcttcatcgccgatgtggtgttccacaatctattattcacgtttacttaggttttgttaatatatattttcttcccctcctacgtgttttcaacatattttcattaattttctctattttcattctgggaattagatctttaacatcgtcactactcatcactgtcaccagtaatgagaaaaaatacaaaataaaaccacacactctcaaagctggatttcttgtcattgaactatcgctaattaatactgtggaactcgtagaataatcaagacgaagggattgcgtagaaagagaaacgaaaaaaaagaaagaagaaagtgcattgtccttgtcatgacatgtggaagtatcggtcttatatggtccattgagccacactcatttagaatctcactactttttcaccattttcacatctatacacgattatagcatctatatacatttactttttcaattattctgctattatgggttttggatattcatgtcctaatcattataattctcttaaacaaatatcgaatttcgaatattttttaaggttattggctatatgtactatatttctatagaatagtttttgttaatatcatcgatcgatcttcagtcttattttgaactatctaatatattcagtggcttttcatatggacataaaacctaggccagtgtcgaaagttcataaacttcgaagtcaaaactagctataatggttatctttgaaaagtaactcaaatataaggagagtagaaattctacacgtaatgctgtccgagacatttaattatggacgatgtgattgcagaaacaattttgttttcaaaccctctcttgatcaaaaaggacatttaaatcattgcatccacttcaaccacacacattcatttggctgtaataacatttcaaagattcttacaaaacaagtgaaatgtcattaaatgtccttttagaacaagatgctaacgacaatctacttggccacttgacttgtataccaaatttctcccaactttttgttcacagaatttgcgtttacaactttggcgtttgtgttttgacggattcgtctaagtgggacaatgcgcgtgtcggacatgcgcacttaagagggtagagacagtgagttctttagctttccttatattctctttcaaaccaaaaaagagactactattttttgtacacttagactaaggaaagcaaagtttcatattcctaaaaattctggttttataagtatcaaagacaaattcagtctccatg

SEQ ID NO: 22845 - DNA, 3000 bp, Unknown; identical to SEQ ID NO: 6210
  misc_feature (1)..( 3000): 2750-1469P.txt file - cDNA_ID_2123342; gDNA_ID_1620864; Annot_ID_170414

SEQ ID NO: 22846 - DNA, 3003 bp, Unknown; identical to SEQ ID NO: 22844
  misc_feature (1)..( 3003): 2750-1469P.txt file - cDNA_ID_2123342; gDNA_ID_2926184; Annot_ID_200508

SEQ ID NO: 22847 - DNA, 3000 bp, Unknown; identical to SEQ ID NO: 6211
  misc_feature (1)..( 3000): 2750-1469P.txt file - cDNA_ID_2123349; gDNA_ID_1620864; Annot_ID_170417

SEQ ID NO: 22848 - DNA, 3003 bp, Unknown; identical to SEQ ID NO: 18143
  misc_feature (1)..( 3003): 2750-1469P.txt file - cDNA_ID_2123353; gDNA_ID_1621104; Annot_ID_171522

SEQ ID NO: 22849 - DNA, 3000 bp, Unknown
  misc_feature (1)..( 3000): 2750-1469P.txt file - cDNA_ID_2123353; gDNA_ID_1620864; Annot_ID_170418
cggtaaagacaaactctcgatgtctctgaaagatacatgtctgcatcctcaggcgagtctcttcataagcaaaaaccagataattctcttttgtttcttcgtttttatgtttcgtatatgcatgagaatcttgagcgcttaggttagatataatgtaggggatcctctagagtcgacctgcatttggtactcatgaaaaaaaaaaaattggttgattatttttccaaacataaacgatatactagtaatcttgaatgcacaacacatcaatatatgaaaaaatcattaaaatctcaattaaataaagagctacattatgattaaacaaaaaaaaacttcatggcgaaataccgataaatatagcaggagcgatatgctattctatagaattaattttcataattagatagttcataatagaaaatagttaagaagcagtaggatgaacccgatcatgataaccaatacaaccccatagagcaaacgcgatgaggatgatgaccataaggatggtggcaacgattgttacgatgaacgaagtatccatattgtttcttcaccgcaccaaattttttatttttttctaacctttcctcgtgtcttcttcttcttgaaattacatttatattgtaagtaaattggaaatagtggaagtaatttacattttgtcatcaagaaacatactagcaaattttttgaaattttacatttagtctcttaaaaatattacctaggagtaaaaattttgtaagtaaatcgggaaaagtggaagcttttacatttgtcatcaagaaacatactagcaaaatctggaaaattttacatttagtcacttaaaaatattaactaggaatatatataatagaaattttacatcttttggtattttgttggtcgtcaaagtaaacatgactatgttgattcgcttgtgcggttgtacgaagacaatgtactgtagagacaaactcttgatgtcgacgctatctggagactgcagtcttagataaccttttcatcgagttggaaataattagagaaaccaaacaaaatgcaagaccaacttaattctcttctcttgtaattctggagcttaagttagagattgggtgttgtcatattaaatttgttaatcatactgattactttcactcacatttgttcttgttattgtttatgttaaatcgtcactcacattgtatgcacatgtcagattcagaccaatgttaaaagtgcattattttgtttggaagcgtgtgagaaaacaaaaagtttatgtacataacataaatccaaaagtactactcgaataaagtacaaactttatatcttttaaactccacgtaataactcatttttgtttgttttaatcaaaaattcaaacgtctaaaatttcgtcttaaataagaaatgatattaagaaaaatatctttggattaataacagatcaccgaaaattagaatatggttttaccaacccaattaaattctcaaattaattggaaagagaataatgttgacaacaacaaaaaggaaataaatcgcatgcaatgaaaggaatgaatcttcttcttcttcttctctattaacgcttcttcttcttctccttcttcatcaccctcctccacttctctcagtcacaatggcgaccaaaaaatctctgaaatcacgtctccaagatggagaaaagcttctcggccactttcttctctccttttctccggagcttgcagagatcgctgcaagagctggatttgacttcattgtcgtctaccttgagcacggtgccggcgggattcgtgaagcgcttcactgcattcgagcaatcgaagccgctggttgctccactgtcctccgtgtacccgacattagtcaggcttgagctaagaaagcgttagatctcggacccgacggcattatgttcccaatggtcgaaaccggaagatctgcatccgaggcggtctcgttttgcctgtatcgtcctgacggtgttcgcggctgtgcttactccgttgtgagagactccagcttcggatttaacgaagggtatttgggtaattacgctgataagctcttcattatgtgccaggttcgatcctcaaatcccctttgattttcaattttattggacgaaattgttaaattgaattctaaaatgcctacttgtgaaaaaaatggaagttagaatttttatgcaattgatatattttgtgcagattgaatcagaggaaggtatgaaaaatgtgaaggagatcatagccgttgatgggatggattgtgtgatgatggggccgagagatctgagtgcgagtttggggttacttaacgatccaggaaacccgaaggtgaagtcggtcatgagggtggctgagacggcggtgttggcctctgatccggcgaatggtggagcttacttggcagggatggccacggctcaggacaaaaccggtgatctcaaggcacgtgggtatcacgtggtgctcgggtcaaccgatgtgtcgctgtacaagaaggctgtggttgatgaggtcaacgcttttaaagcgtagtgtcggaattagattagagtctgaataaaacgggaattagagtgctttgtaataagtgatgagtttatgtaccccatgattatcttctactttgttagttatgtctactactttgttagttttgacttttgagcaagtcttgttaagattcgcattatccaaaagaaaatttaaagccgcattaacagtgtttagctctggtgttactaaagaaaaagtgattatgcgggtcaaacacttctcaaatagtttgctttgatttctttggagaactgaaatgcatgccgtttcgaaatattagaatgcatgtcgtttcgtggatttcagtaccagtaaaggctaatgctgatgcatcgttgcattttaaaaatcgtgtcgtttttcattccgttttagtggccactcttcgcaaccagataagaactcgaagattttctttttctttatcaaaatg

SEQ ID NO: 22850 - DNA, 3003 bp, Unknown; identical to SEQ ID NO: 18143
  misc_feature (1)..( 3003): 2750-1469P.txt file - cDNA_ID_2123353; gDNA_ID_2926184; Annot_ID_200505

SEQ ID NO: 22851 - DNA, 3000 bp, Unknown; identical to SEQ ID NO: 6203
  misc_feature (1)..( 3000): 2750-1469P.txt file - cDNA_ID_2123373; gDNA_ID_1620864; Annot_ID_170435

SEQ ID NO: 22852 - DNA, 3000 bp, Unknown; identical to SEQ ID NO: 8162
  misc_feature (1)..( 3000): 2750-1469P.txt file - cDNA_ID_2123402; gDNA_ID_1621198; Annot_ID_174762

SEQ ID NO: 22853 - DNA, 3003 bp, Unknown; identical to SEQ ID NO: 17668
  misc_feature (1)..( 3003): 2750-1469P.txt file - cDNA_ID_2123414; gDNA_ID_1621198; Annot_ID_174767

SEQ ID NO: 22854 - DNA, 3003 bp, Unknown; identical to SEQ ID NO: 17661
  misc_feature (1)..( 3003): 2750-1469P.txt file - cDNA_ID_2123471; gDNA_ID_2926139; Annot_ID_197369

SEQ ID NO: 22855 - DNA, 3000 bp, Unknown; identical to SEQ ID NO: 8168
  misc_feature (1)..( 3000): 2750-1469P.txt file - cDNA_ID_2123471; gDNA_ID_1621198; Annot_ID_174791

SEQ ID NO: 22856 - DNA, 3000 bp, Unknown
  misc_feature (1)..( 3000): 2750-1469P.txt file - cDNA_ID_2123497; gDNA_ID_2926139; Annot_ID_197363
caaggacaaagacagcttctgttttgtcttcatgtgaatttatattaacaaacagctgcacgtgcatttagagacagcatgggcgaccttacggttgaagcaaagtcaacccataagatctctattctcagatcacattgtcactttatttctttcttaattttgatttgattctgttttctctttatttatgcatgtagtagtcaaagtatgtgattaattaatgttataagtacgagtttctatttctcttaatatagtattcttacctcaggtcccacttcagtgtcggctagtattactgctgtgcaagaatcttcgccgacgcagtgtaagttgtttttaacactctgtttttcaccgcactcctcaacgttacttccccatgatgatggtaaaaactccgatgtaaaatccaagtcagaccaactgctgcaggatgtgccgctggtggtggaggatcctgtggttgttgtcgtgttcttggttgtgtactgatgaggttcaaaatgtgatatgtcctcatgcaggtccttagacgagtgccatcgcacgatgtctttgactcgaataacggtgatgcttgcttggttttctgctttgttcttggttgctaaccgccgagaaaggctccttggtaagatccccgatggagcggatttgatggtgttggaatggaggttcttgatggcgttaatcacagcctgcaatgcattggattgtttcctctttggtatcattgggaaagggttgagaggatgccgtctgggaatcgatttgaacccgtttgaggaacatgagttggaatcttccaagagacagtctttgagcattctcgaccttagctccatcctgaaacactctttggctcaggtacgaagctgaacttgaaaaacactgaactgacgataagaaagtgtcttaacaaaaagaaaatatcttgaaagacgggagtgggctagtgaaatgcttaggagtgttaagatgtatttatgtgtggctgatgtgagtttatggaaagagagaggcagcttcttgatgaagatctcaagatgatgacaggcttagagaaagaaaggaactgagttttttgcttaatatataattaagttagttggtagagaataagacaaaatatgtgggacctaggatgtttcgctctacgtgtagcaagatttggagcttctgcttatgtgcttgttagtttataattttataattgaaactcaaaaaggtttgttggagctatgctatactcagttcttgtgtctagtcacaagatccagagacctggcgatgctattaaagtcggtactgctaataaatggtttttacttttttcaaaaattatctcaattggtaaaaaatgaggtctcgttttctttgtttttgttgataaacctaaaaagcttttgtgttacgtattgagcagatgaccgaaagttgtctgtgtagccttttgtcttaccttcttatttacactgcatgttgactgttgagtaattctgatttttggttgtgttctcagctaaacggtgaaagccatgtgaatgttcctatcacttctgacagtatacctcctctatggggctaattgtgtgatcaaggctacgttgctgtttgtctgcaagttcccatcaccgaaacccaaaaggttcatccagatgcttgtgtttatgcgattttctatttgactgcaattgtttctccgtaacaactttatatcgtgaaagacatccataaatgtgctgagatgcttcgtgcagactacaggacatgggcataggattttgtggtaatcatggtcagccagcagaatcatgtgtagaacaagatgggctgattgaagagaatgaatcttaggttcatgatcatgatgactatgttgacagcttgtgaatgagatgaatgcataggacttagtctgccttttgaggtgaagctgagcaatcactgtgcaaaggtaatgatttttagtccttctttttgccttttggccctgtctgtaactctacttttgcctctttgtttattgtttttgctatagatgtgctataagtgtgaacataaatccttaaacagcatcaacatgtatacactcatatccagcccatttccgcaaagacatatcttcagcataactattcactgggaacacacactgcgctgcaaaatctttgatgtgtcaaaatagctagctttcagaatgaactcacgacactgatgacatgagcccattctgaaagctaataatgcttgactcatcgccatagttatgctctctgcgtattgctactgtcagcaaatgcgagaactaaaaagaaaaaatgtcgcaagcttgaaattgtgttgcacgatctcttcatctttgcattcaatttctggtttcttaagagttctttgcacaatttatactcggagttgtcttcatagctttgtttactaataaatttctgctattttttggttaaacgaactgtgagtgtgaagtgtctcgtttgattaaagttcttactaagcatacataagcaagatatatttgtttgactgatagattttcagtctgtccaatcctgcatgaactgaatatcatatacattggtatattgcatctttgaccaataaaagaactggcgactgctctgcatcgatgggatgaacacatttataagtacttgtcatttcagtggctatctctatgtatggtagttgtttaaatgatttaatgattttgactagaatctgttgcaacgcagcgtgtggtgaaacgtggaggctcgttgttgcatgaagtgtatccaggtccagatttacttctttatacatttgcgaattcctttttccaattagattgcctttcccctcattcttcttcttttggcttgtaaaagtcgctttgcgtgtatttatgcgattaagtctctcgtcttcggtacttctacgaggcttctgactataagcattaattttattgtcaatcacgaagagaattttcgtatg

SEQ ID NO: 22857 - DNA, 3003 bp, Unknown
  misc_feature (1)..( 3003): 2750-1469P.txt file - cDNA_ID_2123497; gDNA_ID_1621198; Annot_ID_174798
taccaaggacaaagacagcttctgttttgtcttcatgtgaatttatattaacaaacagctgcacgtgcatttagagacagcatgggcgaccttacggttgaagcaaagtcaacccataagatctctattctcagatcacattgtcactttatttctttcttaattttgatttgattctgttttctctttatttatgcatgtagtagtcaaagtatgtgattaattaatgttataagtacgagtttctatttctcttaatatagtattcttacctcaggtcccacttcagtgtcggctagtattactgctgtgcaagaatcttcgccgacgcagtgtaagttgtttttaacactctgtttttcaccgcactcctcaacgttacttccccatgatgatggtaaaaactccgatgtaaaatccaagtcagaccaactgctgcaggatgtgccgctggtggtggaggatcctgtggttgttgtcgtgttcttggttgtgtactgatgaggttcaaaatgtgatatgtcctcatgcaggtccttagacgagtgccatcgcacgatgtctttgactcgaataacggtgatgcttgcttggttttctgctttgttcttggttgctaaccgccgagaaaggctccttggtaagatccccgatggagcggatttgatggtgttggaatggaggttcttgatggcgttaatcacagcctgcaatgcattggattgtttcctctttggtatcattgggaaagggttgagaggatgccgtctgggaatcgatttgaacccgtttgaggaacatgagttggaatcttccaagagacagtctttgagcattctcgaccttagctccatcctgaaacactctttggctcaggtacgaagctgaacttgaaaaacactgaactgacgataagaaagtgtcttaacaaaaagaaaatatcttgaaagacgggagtgggctagtgaaatgcttaggagtgttaagatgtatttatgtgtggctgatgtgagtttatggaaagagagaggcagcttcttgatgaagatctcaagatgatgacaggcttagagaaagaaaggaactgagttttttgcttaatatataattaagttagttggtagagaataagacaaaatatgtgggacctaggatgtttcgctctacgtgtagcaagatttggagcttctgcttatgtgcttgttagtttataattttataattgaaactcaaaaaggtttgttggagctatgctatactcagttcttgtgtctagtcacaagatccagagacctggcgatgctattaaagtcggtactgctaataaatggtttttacttttttcaaaaattatctcaattggtaaaaaatgaggtctcgttttctttgtttttgttgataaacctaaaaagcttttgtgttacgtattgagcagatgaccgaaagttgtctgtgtagccttttgtcttaccttcttatttacactgcatgttgactgttgagtaattctgatttttggttgtgttctcagctaaacggtgaaagccatgtgaatgttcctatcacttctgacagtatacctcctctatggggctaattgtgtgatcaaggctacgttgctgtttgtctgcaagttcccatcaccgaaacccaaaaggttcatccagatgcttgtgtttatgcgattttctatttgactgcaattgtttctccgtaacaactttatatcgtgaaagacatccataaatgtgctgagatgcttcgtgcagactacaggacatgggcataggattttgtggtaatcatggtcagccagcagaatcatgtgtagaacaagatgggctgattgaagagaatgaatcttaggttcatgatcatgatgactatgttgacagcttgtgaatgagatgaatgcataggacttagtctgccttttgaggtgaagctgagcaatcactgtgcaaaggtaatgatttttagtccttctttttgccttttggccctgtctgtaactctacttttgcctctttgtttattgtttttgctatagatgtgctataagtgtgaacataaatccttaaacagcatcaacatgtatacactcatatccagcccatttccgcaaagacatatcttcagcataactattcactgggaacacacactgcgctgcaaaatctttgatgtgtcaaaatagctagctttcagaatgaactcacgacactgatgacatgagcccattctgaaagctaataatgcttgactcatcgccatagttatgctctctgcgtattgctactgtcagcaaatgcgagaactaaaaagaaaaaatgtcgcaagcttgaaattgtgttgcacgatctcttcatctttgcattcaatttctggtttcttaagagttctttgcacaatttatactcggagttgtcttcatagctttgtttactaataaatttctgctattttttggttaaacgaactgtgagtgtgaagtgtctcgtttgattaaagttcttactaagcatacataagcaagatatatttgtttgactgatagattttcagtctgtccaatcctgcatgaactgaatatcatatacattggtatattgcatctttgaccaataaaagaactggcgactgctctgcatcgatgggatgaacacatttataagtacttgtcatttcagtggctatctctatgtatggtagttgtttaaatgatttaatgattttgactagaatctgttgcaacgcagcgtgtggtgaaacgtggaggctcgttgttgcatgaagtgtatccaggtccagatttacttctttatacatttgcgaattcctttttccaattagattgcctttcccctcattcttcttcttttggcttgtaaaagtcgctttgcgtgtatttatgcgattaagtctctcgtcttcggtacttctacgaggcttctgactataagcattaattttattgtcaatcacgaagagaattttcgtatg

SEQ ID NO: 22858 - DNA, 3000 bp, Unknown; identical to SEQ ID NO: 9335
  misc_feature (1)..( 3000): 2750-1469P.txt file - cDNA_ID_2123511; gDNA_ID_1972069; Annot_ID_178527

SEQ ID NO: 22859 - DNA, 3000 bp, Unknown; identical to SEQ ID NO: 6887
  misc_feature (1)..( 3000): 2750-1469P.txt file - cDNA_ID_2123597; gDNA_ID_2684224; Annot_ID_191894

SEQ ID NO: 22860 - DNA, 3003 bp, Unknown
  misc_feature (1)..( 3003): 2750-1469P.txt file - cDNA_ID_2123597; gDNA_ID_1972047; Annot_ID_178267
aaagtgatatatattgaaaatatggctacattagcggatccatcacagaaaaagagttttgtggaaacaaaaaggtgtggcggctacatcattctgatttatattattatatatgcaactccttcaaattttggttcaatggattcaaatttcaaacatatttcttggtcaagaatcaatatgcatctagatctctgaggtaatcattcttttcttatttgatttacaatttggattagcaaggtttccaagataatatccaatatcacgtgtatttgaggttcacctaccaaacttgattgaattcaataaacaatgagctcgaatgatgttgagattgttgactattttggctctttgctttcttctatacttgtcaaaagtatataatcattgattccatggattattcatccctccatagttattcaaacttgattcatattcactttttacacacaacatagaattataataatactaggcattgatcacatgtaggatttgagacggggtcgcgtaagggactgcgctccatccaccaagacagtggtgcctgtcatgaagcgtgagccatcgctgatcaagtagataacagtggagtagaggtctgtgtccgggttgagccactggccgaggggtgcagcgtccttgaccagcttctgcgctcggtctcttcccacagaagctgtatactcatcatccagatgcagccctctagagatcatgttgacccgtatcttgtgcttcccgagactcatggctgatgcctgaaacccaatcatcaacaaacatattcaagttacgaacgcgatgtgtctaattaggagctaggatgcatacccggacgagctggtgaatagcggcagaagttgaagcgtaggcatcagcgccagggtaaagcgccctctctccgctggcgatagtggccatgaagacaatggagcctcctgatccatggtccttcatccttgtggctacagccttcaagagaaaccatggagcggtgagattgatctttgtgattctgtggaactcatcttgagagacttgaagaatgtcctgcacctttcctgcaagaaagaaagattgttgaataaaggaatgatcaacacacaagagcatcaaaggcagggtagtgaaaaacaagaagcaaattaaaccttggtaggtataagagttgagaaaagcatcgaaatggccggaaagttcccatgccttttggacagcggcatgaaaagcaacttcagagtcagattccatgtcgagtgctataacatcggcagggaaggctccctcaatggaatctctaatcttgtctacaatgctccttagggaaccctcatttcccatcattaccaacctagcaacagtacattgcattttttgaaggttaactatagacaccaaagtcaaccacaacacaaatcggggctagaagaagaaacacaggataggaggaaagaagacaaaatgagagactcacttgcaaccgtgtttggctagatggaaagcgatgtttcgggacacctcgtcgccgttggatgtcatcaacactctcttcgccggattttccattttgccaaagtaactctttataaaacaattcagcagattcaacaagacttaagggagggagggagtgagattgattcgatcgccaattctaaataactataaagagtggctgcaaaagctcttaccggaactgtgtctgtgtgttaccaaaacggcgaaacaaagcaaataattaatgcctaaccacatgatccaccacgttctgttgttaccttctttaatttgtagatagaagaagatggtgattgataacggagatgtatttttttctttaataaaaagcccacttcaaggcccagatccatttctgtactttgtaggttttccaactttcccggcgccggaagcaagcgtaagttatcactgttccccaaccaaattccatcatatcctattatcctactactaatggatccatctccaagattcctaatttcactttgctacaaacttatttcgtgtttttggtttataattaatagccgttgttggttatgaatatgtaagcataaaaggcatttgggagctccagacagacaatgaatcatcaacatcaggtactctgtctttcgtttatgtttctgttccattcttttgaaatatatagaggaggaacttgttattagctagtccattgatcaacacacaaagagtgagaatgaaagcaattcctccaaccaaaaggatgctttcccttattgatttagttggaccaatatataaagagaacaaaggagggtgttggtaggtaacaaaagattctaggtggtgggagggtagtggatttttgaaaaccgtgtgttgacttaatgaaagaggtgtagagtaatgggattgtgagagtgttaaataataaaagactaggatacgaaatcattgtgacatgtcaatttttcaagtgggtggtggaatccgcaacaaaatataaaataagaaaaatgctttgcttgcttgcttgctctactttgccttctttttgcaaccaacatgacgttatgctggaaaggaatcaaattgttacttggtcatgcacctgtgaacgttacggagaggtctacctcaagataacgaatgatctattatactagtaaataccacatcttgcttgagaaggagaatataatcccctttatgatcatcaaattgaccccaaatcttcacccgacttttggtagtattcgaacaattataacagaatctaaaagttgctgtgcccgtgccacgtcatctctaagaatctttagtggcacgtgctcgatcaactaatgaaaacaaggttcggttccggtggcctaccatttttatcctccttcaacttccctctccctctctcttttaggaattttcctcagaaattggaggactcacactcttctgggtttctgctgcagccaaatcaccaaggagatacatactacaaccatg

SEQ ID NO: 22861 - DNA, 3000 bp, Unknown; identical to SEQ ID NO: 6887
  misc_feature (1)..( 3000): 2750-1469P.txt file - cDNA_ID_2123597; gDNA_ID_1621111; Annot_ID_171789

SEQ ID NO: 22862 - DNA, 3000 bp, Unknown; identical to SEQ ID NO: 14765
  misc_feature (1)..( 3000): 2750-1469P.txt file - cDNA_ID_2123597; gDNA_ID_2684224; Annot_ID_137529

SEQ ID NO: 22863 - DNA, 3000 bp, Unknown; identical to SEQ ID NO: 6884
  misc_feature (1)..( 3000): 2750-1469P.txt file - cDNA_ID_2123612; gDNA_ID_1621111; Annot_ID_171797

SEQ ID NO: 22864 - DNA, 3003 bp, Unknown
  misc_feature (1)..( 3003): 2750-1469P.txt file - cDNA_ID_2123626; gDNA_ID_1621111; Annot_ID_171803
gaagccgaagctagaataagagatccagtgtatggatgtgcaggtgccatataccatttacaaagacaagtgagtgaactccaagcacaacttgcaaaagctcaagtggagatggtgaatatgcaatttcaaagatcaaatttactagagctgatttataacatggaccaacaacagaaacaagaacaagataatatgtcctttgagagcaatgatttgggattccttgaagacaagtccaacaccaactcatcaatgttgtggtgggatcctctttggacatgttgatcattactaagattttgactacttcgctttaaggccctctctagaactttactcagggttagttagcatacacaaatgtaacattgtacggtgaataaagaaaagtagaggcggcttttttaaattgtttttttgaccgggttttcaatgttttttcctgcggtttttagacacaaaccggaaagtataccggatctaaacaaccgcagagcggaaaaaaaaaatctaaaactaaacgacgtcgttcggctctttatcttgtcaccctcctcaggcgacggcgacgatgaacctccgttccaaatcttcccgtatcttttatgaaacgcgaccgactcttcaaggcccaaagaaaaagagaatagtcggcgggataggggtatgtttgtaatttggcaaacgaatccccatcatagctttattccttacttcattcaccctagccgctttactctcttgcgttatctccgaggtaagctttttcatcaccatctacgatctgcctctttctcttctgctgatctgtgttgaatctgtttcgatacttctcgtttgttgttgttatttcttggattcgattctctttgtttatagatcgtttggaatttctgatcggtggtgtaaagttttatcgatttaggagaacaaagttttacagtgcaatcgtattgttttttttcttcatgccagctgatgataaactataggatcgatctggttctgagatttttgtactgttcagtggattgttgattatatcttttgatgtatgtgatattaattatcgatttgattgggtaatccaagttgtggaaactctaggattgtttgctgtatatctcctcaattgctgatttgtttgaatttagctcgcttagctcagatgatagggcaccacaatttttgtggtagaaatcggcttgactctctttttctgccaacaaaaacaaaaaatagtctgagtcaaaccattgtagcagtacctaaaatctcgtttgtgaaccgttgtagcactacccaagtcaccggaaaggtaaaacaatgaagccgtgggattaaaccttcacagatctgtgttaccaaaccctcctcttcgtcgttcagtccgccaaaccaagccgacgagaaaggttgcgggaaaaggtacgtcgcagcttctcgtgtttgtggtggtgtgttgctaagaatattgaaccagaaattaaaccaatttaaaccaagagaccttacgtgtatttcagtattgaattgataaaacccaaacttaataatcgaagatgggattgcgttatacatttcagacaacaaagtgattttaactcaaggcattgatggtggagtgaatgtcgattacttccagaagatcgagtcttggcctttctgattcacagtattcaacattaacgtgtgaatgtattcacagggttctatgataatgattgtgaagattcttgtgaaccttgattatgtagtgtcctagtgtcttctattccatcagttgcacatgagagtttaccaaaactttgaagattatgttgtgggcagaaaataaaccaactgataaaaagccttttgtggtactttaacattaagagaattcaaagcctagttataggaaataaattataaaagcatgaaagatattgttttctttgcaagtttggtctgaaagagtgtattttaaatgggcttactgtgggtagttattgcagaaacgctgaatttaaatgggcttactgtggcccaatagatagatactgtgagtctgtgatgagcgggttatttgtgggtgggcattggtttatagaaacgacgttgtgttcaagttactaaatcgcgtgtgttttttacttttctgcaactaaatcgtgtttcttcctaagaaccctaaatctgaactgtctcatcttctccgatatcagtgagatcaataaatcatcttctcaccctagacgacagggaaactcggggattgattcggaaaaacgagttcgtttttctgcaaggtacttttcttacgaaacaaatcgtaattgattcacaggttctgaatcttctagttaagagtaatgttgtctacactcactgattgcagcaactgattcaagtttttcaaagtagtagatgatctcaatctaaatcggtttttgatagtttatgcttgtggaatttgatggttttgaatcttttgatcttgcatctaaagtagtttttcaaactttacttatttatgccaatgggtttctattttgatttcggatttttttgtgggctgggtttttggtggacaagtttatgattatctggaattgggctagttaaaatagcccagattaacagccctagatataccgtagggtattttcgtaaatttagtttatagatttttgtttgttacggtggtctttcccgcaccataacacttccactaactccgtcgtcgtcccgccggtttcacagcttgttagtgactcagcaagacgtcgaccgaacttggtcgccgccatctctctttatttttacgtggttcgcacaaaattaagccacgtgttgatgtcgttaattcctcacacaactcacttcgctttctctatcaacattcatctttctgctacttctcgaacctcctctcttctccgatcatcttctccttactttaccttagctcgctctctctgttttaactcctctatcagatttttatcctcagatatg

SEQ ID NO: 22865 - DNA, 3000 bp, Unknown
  misc_feature (1)..( 3000): 2750-1469P.txt file - cDNA_ID_2123639; gDNA_ID_1621111; Annot_ID_171808
atacagggactcaggcgagcaagaaccctttattcttaggggttctgcctccaaaagagagattcccagagaagtacattgctgtggtatcgggtgtaccttcgacacttcatcctggtgcatgtgtgcttgcagtagacaagcaaagcccacccacatttgccttgtactgggataagaaagtgcagtttactcttcaggtaatgacaaatttaagttcatttttaatatgcatggaacagcttacatatacagaggatgtgaaaagggattgtggttagtgatgaacttgtgtactggaaatggaacagggaagaacagcgctatgggactctatgttgttgatatgccacagaatcaaggtgggatacggaggtgttgttcgtgggatgaatctgggttcttcagcccttaacatcctccaagttgttgattccgacactgacgattaagaaagctggatttgcttgagatagtggaggtgcattgttaggaaatgccatcttcattttgccattgttagaaggaagtagtgaaattagttctctttggatagcaacttattcttgtgataagtacatattaaggatgcttttttgtaaccacttaagaatcagttgatggacagtacaacactgaagatggattcatcagaaaacattcgaaattgatatttttgtttgccgatcatgaagtttaatgagtctctatctacattaataatgggaacagaagcaacagtagaatcatgttttttttttcacttctcaaaagactgctaaagttcgcattactctgtctctttctcaaggttactcatgcgtattagttctgacaattcactgaatatgaaattttaaagcaagaactttggtctgcagctgctcttaaaacgaacatacaacacaaacttgtaagaaatctcgactaactacacttacgtctttgcttatctgactctgaataaaatggaaactgaatattttagcaaaacagtggtgtgaaaaacctttaaacccaaagatgctcctccatcgtgctgaaaaccatgcctatctaactaacggtaagagtcacacaactgcataggaaaatgaaaaccaaagggaacaatgtatcaggttctaataatcaccgactagttgtatcacagttccttgtcttcaagctgtgctttttctgctgccttttcagtttccctctacaacaaaagccttgagcgattcaacgtctctttttcctgaaatcacaaatgcaagtatgaaaaaatatcacttatagcattactaaactaaaggattgaaaaagtccaaatatgcatgtggtggtcgtgtgtgcctaagcaagtttacctttatatttcgaaacttcttctccattgtaaaatagcataaatgttggatacgagtgaatttcaactttggtgcaaacagctctgctagtaccacagtctacttcaccaacctcaatttcatcgtctccctccattgcttttcccaagtcttcccacaaattccccagtttcttgctggacactcagatccagtttatcaacaagggataaacaagccaaactgctaagttgttaggtaattttatgaaacaaggatactaaccagtgtttacaccaaggaacacaaaactttacgaaccacgcagtatccttctcctttatctgaaccaacaataaacatggagagagtaaacatcttgttgtgtctgaactaagactgtagaagctacaccaagaaatgcaaccattctgaagttgagctttgttattcgacagggtcagctttacaattagatctaattatcaaactccaaaacaagaccaaagtatctatgagaactacataatatcctgaaaatgctccaatatagagtatgtaaaatctgaaagatcgcctaacacatttaaatttctggtagatatagtctaagttagctggacatcaaacaactaaactaagctgagatatgagtctctctactcaaatagatcagaaattacacttacgagcaatgcaaacaatctttgaaacgagctaagccgttttcaatatcgcatcgtcaaaggagcacagaacacatatataaatctacctgattccagtaaaacacttgagttcacacaaatgaaagtactcttgggatatagagaaaaagggcttcagatcattaccttgtcagaaaaggtttctggtgtcagtgtaatgacttccgctttaactaattcaatcggtataaaaaggagaagtataatcatgggagcaacaagccgagcacctagcgtcatcgcagcaaaaccccaaattttgatacttcaccagtcctgttaacttttcttccaaatttgcaaaataattgcatttaaccacactatttccaaaataataaactacaaaggatcaatgcacagtgcactgaaagggagcataagaaacaccaaaatctaagacaaaaagattatgaaacaacacacgattaaatagattgaagttgcaaacccgagtttaactaataacattaaaagaatgaaactttcaaaacctttcaaggttttactaatcaattgctagcaaaggcaaaactccaaaccgattacaagggacgaaattaggatttggttgagaaaacatttcaaaagagaaacgatctattcatctgatctgaaactaatacgaaagaattgaagcaagattcattggagggatcagatagaagagtagggatatcaaatcttagatgtgtctgaatcgcttaccttctgcaacaccaattccgagagcagaagaaagagaggaatgtcaaagcatgtttggttttagaaagttaagtcccctaataataataacttaaaacacaaatacgtaagcccattactttaggcccaatactaacatcatgctcctttttttgttgggtggatcttcttcccatagccatcagcttcttttactttcttcgtttctttgcaaaagaccagcgataattatg

SEQ ID NO: 22866 - DNA, 3000 bp, Unknown; identical to SEQ ID NO: 6890
  misc_feature (1)..( 3000): 2750-1469P.txt file - cDNA_ID_2123646; gDNA_ID_1621111; Annot_ID_171810

SEQ ID NO: 22867 - DNA, 3003 bp, Unknown
  misc_feature (1)..( 3003): 2750-1469P.txt file - cDNA_ID_2123652; gDNA_ID_1621111; Annot_ID_171813
tgatactcccaaattcatcaaaaaccatgtgaaattaagttcctcaagctaaatttatatgtctaattagtactataccgtggctttgttgacaagaaatacagcatcctgcataatctgaggagcagaattatcgcttctcatgatccgccgaatccgattcatcggaaacttgatcttagcatcttccgcgcctccatcgtcctcttctcgatttttactcgtcttcgtcggaattcctacactctttccgttacccctcttgctcacgacgccgttacttttcttcgcctcatcgcctcttattgcttcttccacagagtcactgctcgatgattctgagatctcgtaaatctccggcttcttcttcacaatgttaaccttgttcgacgtcttcttcgttctggaaccggagctgcgtttactccgaccactcgctttattgacgacgacatcgctcctcgccttcttctccttgggtttctttgacgacaccattaattttttagaactacagtatgtttcaccctttcgcctgaataaatcgatggatatttacatgggcttatttgtttgagccttttaggcccatttatcatatgatcaatttaaggaatggacatggtgatgttgaggaatgaagatgcatgacgactacttcaaaataaattattggacatgctttcactgtttcgcatacacctcgtaaaacattgtatagtttatggagaaataaataaattagggtaaatgtacttgggataagataatgtttttatacaagcatccaaaatacattatcttgttcccgacataatgtaaagaaattttagggattagataaggaagaatgggtaatgttggagtatgagacagaagaggtgtccgcaagctggaaccaccacgtgttatcaacaacacgtgtgagtctccatgaactctctctgcaatatttaaacgtggcctagctcgtgttctttcaatctccaattattactctattaataagagaagacgagttttgctttcgatactgtctttcaactattccgacacaaccaaagcttctggaaacgttgtcgtttgttatcaataatggctgttgtagaagaaccgatactttcaagattggatcgtattgatttcatggtgaggaagttagaggagatgaaaggaagctcgcctagaagctcgagcccatcgactccatctagtgggactcagccatcgtcaatggatctgtcgtcaccgaggagcatagggaaggtacactgccgttcgatggaacaagtcagggaggagactgagcggaaaggaactttgctagagagacttaataatgtagaggagcaagtgcttaagctgtgttcacagtttgaggaagaagttgaagaagagaggaagagagaagataagacggataaggaaaagaagaccccgaagaagaagaagggattgaggaagctggttgataaagttgttggatcttcttctcccactaatatccattccaagagctggcgttgttgagtcattgtagtactttattacatcatcatgtatacttcaacgtaccacgtttaaatgaaagcttctcttcttttttctttgttgaagcgctagtggaaaaaaatatctttaggtctctcactctcttgtttgatcgtttgtttgttgaggttttttgttgtccagtatgcactttttaagtgaaaacaacaatgaattttcagtgtactttctatttttcagagtgcacttttcaagtgaaacaatgaaaatttgaaggaaaaacaagtacacacctataaatgattagaaaaacgaagatgtgtgtagtcatttccataaacgtaacgataaattctcagtggagatggttaaaataaaccgtaaatagttaaaatttaacaaatgcccaaggttttgtgtagaatagaacaatttaattttatatctgttctccgggttttcttgcttcccgatcaaattggggtgtcaacattttgatctaaaaatcagtgacatcatatatgagacttttcaacgtgtttttttttgtctaaaaaaatttcatcattctcttgtcaagtattatgtaaggttaacaaatctcctcataaattttttaaagatcgaaaattttctaaaaatatgtaaactttttttcgtctatggtttcttaaggtgtgaagaaaaagaggctgtttacggagttcactctgtttgacacttcaaccaacttttgtctttatatgtttttattctacaccattaaatcaaacttaagacaatcatatgcatttctttatccacaaaattgatttgcttattgtacttcatcatcccgttgtaaaatttataagcacaattttcgccaactatttattccgcaaattgaacagctgattttatttaaattaatgtgatctttatcacaacaaattcacaagtcacctgctgctggtgacgcaagtatccccctctctgttacaatatctcacgatcattcaattgtatccataaagatgatgtatgttactatcaccaccaccaccaccatcgtcatgaatcatgatcatcagacaacgactacgaaaaaatcataagtctacttttattagacacacaaatctgtgaaaatggcgatttagttaataataattcgctcaactttttcttaatcaatcaaaggaataaaataacaaataataataagaccattttttacttttccccttctttatgcaaaattcggcctcttaattttcaaaattttcgacctccgatctcccatctccgcttccatcatctttaggatctctcaatctctttcttcactgatcgattagggttttcgagctgaaatcgatactcctccaccgcgaagaagcgattacctagatttttcttctaggtttctggcggatctcgccaagttctccttattctcttcagctacggcgaaactttctctagctccactcctccctcgccaccatg

SEQ ID NO: 22868 - DNA, 3003 bp, Unknown
  misc_feature (1)..( 3003): 2750-1469P.txt file - cDNA_ID_2123707; gDNA_ID_1620739; Annot_ID_166361
tatgtaagtgaagacttggtgtgaagccttggagcttacgttagaagagcaaaaggcccggggctagggtgagctggggggggacagcgtaagtgagcgaatgtgtgtaagcccagtcaaagatgactgttctaagcggggggagccacccacctttgaatggtgttggtcctacggaccgtgaacggatttcgcctctggcctctgggcacgtcggaaccgcgtgagttcaccggggtggagcacggtccgccaaaaccggcatagattaggtgctattgatggaacatggtaagcctatctttctccatatggaagtgctgcgagcacttagagatgcgggtagaggaagcctcaaaaagcgaaggccgagctgtaggtcacgtgacctgcaccgagttggtggctgactgggctttttccttgatcaaagcagatcaactcgccttctttcttgttacccaaaactaaagttggtcgaatggtttttttcctgccccggaacgtcgaatgaaatagggggccgggttctctttctacaacccttttgatatgataggcctggctacctttcccctatcccttatgattagggggctgttaagcccaagaacaaccagtcttgtggtggtacggaaggaacggactccgcgaacgtcccgcgccccggaaagaaagtctcaaccagaaccacattccttttgcgtgcggatgtagctaagtgtctgactctattggtcatagtttcctgctgttgcggctggtgctcgtttgcgcgcgcgtgaaccaactcaacaaagaaggaaaggatgcccggggaggcatctgagaatgattcgagccgtatgaagggaaactctcacgtacagtttgttttttttggggggggcaggagcccgacagggtcccccactgacttggcccgggcctaagttaaagtgaagtggtgggcctacccatcccaaccaggggtatgctgggattcgcgaagagcagcaccttacgatgttcatgaccaatcggatcttgacgtaccagtaggtaccagaggagatcgctatgatcgttactgtatccgtatcgaagagatgcgacaaagtcttcggatcattgtgcaatgtcttaatcaaatgcctagcggcatgatcaaagccgatgatcgtaagctatgtcctccatcacgatgtcgaatgaaactatccatggaatcgtgcgtcgtgtgaaacgtagatcatcgccgttcttaaccaagactcaggttaagctccgtctcggaaccttgtgggttaggagtaaagcatcccggggttggcgcatctcattgggcgtagagaagcattgggaaccccaatttatttcttcggagccgtttcttttcccgtcccccccaccccggcatagcgcttcgcttccggttcttcggaagaatcaacttacttctaccttcttcattgatctgggggaaaaggaaccgtctaccagttgggaagctagacatcaagtaagtggcttgatgaggataactaagctgacacgccggagttggctgctggcacaacagggtggtgccttaccgcaccgcaggcgaacgcgcggtagcgttcgtggtggtgcttcaggattccaatgtactgcgtccaagatcagaacgagcttgccggcggaccactgccgtcccattcttgagtgagctggagcgcagccatcttatccactgaactagctagaagctatcgcttcgggtcgaagcactaaaagaaaagcaccgggaaacgcggcggcataggaaccacgggacccccaccctactagtaaagggaaaacggaagtgcgctcctgcgcaccagctgaaaaaagccctttcccctttctctgataataaggaaagcttcttagctccaacctatacaaggggtttttatgtcctttttataggttgggttgttggatacgggatcctcgtagtaggctggaccaacatccagccgagagagggcagcctctagaagcaacaggttgggaaaccaagagaacgcttcgccttttcttatcttctttctgccctaggagtagaagtagcacaaaaagagggattcgcattattgacccaatgataaaccactaacaccttcctcgttggggctccgcgcactgggaaaacgcttgacgcgattgggaaaccggccactagttacaaagctccaataaggtatcgagagggctatcacagtcaggtgcgaagaattacccctatttggaaagtacccttcttcctatttagggggttaaggcgagaaatggcttgatgaatcgttccgttcgccatgcaccggccccattcacttgcttatcgtagaggctgtaagtacacagtgccccacaactatcaatagtatagtggggttgaaagacgagagtgcccgccctttcttttctttcaagtgggccacttttttcccgaacgcagtccgggatcaccgtggccgtgtatatatatatatatatcttcgatgctgtcatttcgaaatgtccgcttcaatcgctctttcacctccccccaaaaaaagcaaagttggcttaacgagcgcagatgtgaggaagcgggagcaataaaacaaaaaaatatctttcttgtccttctacttaaggggcaaagagaagcgcttttgctactgagaaagcgaacggtcagcgcgaaggttcaagacttttctgagcgttagcgaagctagattctcatagcgaggcgcttcgagttagcgaagcctgtagtagcgccgaagccctatgtgctataatgctgagccaaggacactccgccttattcttataagaagcagtcaactgagttctgaacgaattagatccttggtaaatggctcaatctatagatagaaagccttatgatgggaaactaccacgttaggtttggagagagatgggaccggttatataatagagggagcagatgcaagcttttttctttcaatagccggccaaatg

SEQ ID NO: 22869 - DNA, 3000 bp, Unknown; identical to SEQ ID NO: 14092
  misc_feature (1)..( 3000): 2750-1469P.txt file - cDNA_ID_2123774; gDNA_ID_2214698; Annot_ID_189589

SEQ ID NO: 22870 - DNA, 3003 bp, Unknown
  misc_feature (1)..( 3003): 2750-1469P.txt file - cDNA_ID_2123774; gDNA_ID_1971666; Annot_ID_175034
ttagtaaggtaagccaggtaagccatgtcagttggtaagaaagtaatcccttccagagttgtaaggttagtaagcttttcccgtttataggaatgggtttctaagcctaggaagtcaaggaagttgtgttggtctttcccctggttccttgttcccctgttgcctttctcttcatttcattgacgggttggagaaatgttcacgacgtaagtcagtggaagcaaacgggcaatcggctgcctaaaggaccccatttgtggttgaaggctaagttcattcttcgatatatatcactccgctatgctagaagactgagcagcttcagtttattaccaacctcgagttcaacaactattgggtaaagcctaaaccttactcctttccttctatcggaactggcaacagatctctagatccgatgcaactagaagtcagtcgattccgtctgaaaatggtttcagtccaaaccttttttgtcgagtgaaactccgcttcttaagagcttctttggacagactcactcccttactcgctgggttggcgtatccaaggtagcgccagcagcaagcgtaggggttactacgtaagtgcgttcgttagcgcgttacgttttctcgcttgctagacacgacaactaaggatagacgcgctgggatagcaagcaagtttgttgaaagaggggcagtagattctagatctgctgaaaaccaggttatagggctatatctttattccatggtagggctaggggcagggtggtttaaaataactccttttactttccctcctacaattacaatgggaagggacgagacaaagccttcttttaaactaaataaagtaggattccgctttcactgttctcaaggtatctcctgactcgaagattagggcttcttcccagccggaggcatccgaaactggagaatcatcaaccctcgcataaagaaacaactaaactatacgcggcaggttggtcaaaaagggaaagaaaaaggtgacatacattctattcggggacataatagtgattcctatcgagcacactctgttatatcgatcccaatcaatagtttttgggggaagtcgatggtcccccccatgctttatgacatcttttctcttctccgtagtgatcagtgtatgcacgtagcatcacagtcaatcttttatgcttggttccggtcgcgctcttcttctaactgcaggagcccgacagggctgtcttactctttttgttgctaatgaataacctttttcttggtgattcatttccaagggaataaaagaaagacctgtgactcattgtctcaatcataacttcaaacagaacctcactgtagagagggagacccccgaaagcgtaagaacgacgatttttgagcctgagggtgaggttctccatcgacgagtgagaaaagggcctggtctcggaagagatgcagctaacgtgagtaatagctgaacagttgcctaatgcatgtggtcagcatcagacaaggttataaaatacatctttacatcccggtcaaagtaacgaaaaaagacgagttttagcaactttttcatacagttttgccctcttttatataaaaaactaacttacgcaaatagtaaatgagaggaccttagcacttttcgttatggagtgattcatctaaaattcccggggttttgtgaatgaattcaactagaaaatctcaattgcacgggattcgcgattcggtgtaagttcaaaatttatcgtgctggacgaccacggttgagttttgttgtggatccaactccaagcgtttgcgggattttggatagatggaatactcttgcaacggagcttgtctgtcaaatctggtctggtatggtagcggttcacaatggcagctcattttcctggaatccgggtgaaagatcttttctttccaaggtctttgctttctattcgacttagcgatggagtcgggtcggaaataaatactaagtaaaggcagacttacaataatacgcaaacaagggtcccgcgatgtcttgtacattctaagtactttgcctgctaagacgtgacaaacaatcgctgattctttactaacgagcccagtagccactaaggcgatccgaatgaggaaacgccggagtgaccgagtgtcttcaaaaacactgcgccaagagaccaagcggagcctctcggtgaatgtggtaaacaaattgaaagccatatcaatcggtataaaatgacaaaccttttggtatgtaccacaaaacactaagaaagaccccgccggttctactctccttgacccgtggacaaacgccacgtgatggacggcgcccggctctgacgaagaaccagtaagattaggtattgcctaatccgtaaggttgtcatacccttatcagctttctgaccaaacctctgtgttgccactttggtaaggaaagtccaccaaccgggcatagtacctcgttagcaggaccactattgctccttttaaagctttgtgctcaagtgatctgggagggtgtcaaacctcccccagccccttattcaggggatggtgccagggagtttgaactgttaacaaaagattttctcgatacaaagaagagccccactcctagaatagttagccactcagtccacagattcggcttagtgaaaatagccctagaaagatcaaggtgcggaaggataatttcctccgttaatgatagctataccatagagttttccatcaaggaaagacaatgccttctcttctccatcctccaggtaccagggaagaactctatattccgggtccaaggatgatggttgcaacgccccgcgcttccaccaataagaggtgcgggggatggtgatatcccttgaaagacataactaacttacaagacttaaaatgaaaagtaaactaacggaacaaggcgccggaggaacccccttctaaaagtctaagagctagaaggcggggtacagcggttgcttcctgtaagatttgaatagtcatg

SEQ ID NO: 22871 - DNA, 3003 bp, Unknown
  misc_feature (1)..( 3003): 2750-1469P.txt file - cDNA_ID_2123815; gDNA_ID_1971666; Annot_ID_175065
gctctgcctgagctggagttgtccctccagcgagagttgctttcttccttgcttgatcggtaggagttgccgagatagcaggtattagctgttagccgtcggactcatttaaaggagtcctatcgggctacactagtctaagggcagttgagtaaccgattcctacgcttcctccgcttacctccgtcgcttaactattaatacgtcgcttacccgcctccgcttacccgcctccgtcgcttgttatctgcttcccttagctaaaacgttaggcgatagtgaaagccttcactctcttatatttacgtacacgtgggaagaagacctagtaattgagtgacagcattcctggaccaattctataaacagccaatcaggcatatcatggtacaggtgaaagaaacttatccaatacagatcttatcacctgcccatcaacgctcaaccgtctgctcctctcgtgcgtgtaggaataatcaaaagaggagacagcatgcctattattaagaacccaattctactaaaaacgataacaacgattcgaggttctcaatcaaggcagaaagcaagaaacccatccagctaggaggaaagcaaatcaaggagaccaatcagacatctagattctatagtacgcgtatgtgtacgtacccaggctaaaacagcaaatcaaacttggctatcgtttgagagcaacctatcgctaaacacaaaccaatccttttacacagtccattgaaaggaagaaaacaagggtggaaattcatgttcctttttacacagacctccaaaactcgaataggccaatcttacttttcctcattctagaggttgcaagggaagaaaacaagattggttctttatgaaacctggttcaaagcaacgaactccgctctctcccgtgggcacattcctattatagtaaacggggacttctctctttattcctatgcgtgctttacttgactcctctgaattcagaacaatgacttttaggctatttttccccaccggcaagaatgaacttctatgtgttaagcaaagaagaacagaagatctattccagtagttaggtacaatcttggacggccggggacctacttcgcgggaccgcctaaaaggacttggtccacacgcggcgaagtttctttgggcggcgttttatcgattgatatctaaagtgactggaattcgaatcttcttatataaggaattatcgattataaacttcttatataaggaattatcgattataaacgaggatgaaagaagttaggaataaaaacccgatgttgtgttctcatgcccggtcgaagtccaaggccaacccggtctgttgccaatgagttgtgaggaagtccaccgtcaagtgcgggatgtgaggccacgtcaactgtgtatgttgctgcgaaggtcaaccaagtcgaggaatgcgctgcggaaaaaataaaagtcactgaggatttgccttcgcggataccaattgcttggatggatgcgtttgaaagcctcgagatgacttgcagaaaaaatgctttctaggtttgtcttgtgtctccgtaacaaatggtccatttattgattaatgggcgaacgacgggaattgaacccgcgcatggtggattcacaatccactgccttgatccacttggctacatccgcccctaccctccccgcccttaattttgtttcactgtcataaaacctattaaacaactcatttacatttgtatcttagcaccaaactaaaatgaaattattctctgcctaatcattaataatcattaatgaaggggcccgcctcaccactccacttcccctttttatggaagcaaccaaactcaccatgacaagggccagcgctcttacagcgaaaggctccttttctctagccaaaaacattatgccatcaagccaagccagctcccgaatgtctttaatcgagagaggtacagaatagtcgaagaaagtaagcaactgcgacaagaaaggacttataagataacatggaaaatgagatttcacttctagttatccgccaaggaaatgccggaggaattctatatatagctgagcgatgaccgtttcgttgtgcatcttggatacagtaccgaaggtctgctctactaaaactttgtcataatgagagcggggatcatgaagattgaaactattcatgttgttttctataaactccaaggcttctggtcttatggcccagggtgattgagatcaaattttgattaggcgcgcatccggttcgtttaccaataaagtaaaaagtttattttgtaaatgtgctttccgctccattattataatgtcgaatagctcgttgtttagggcactttgatagtgatgaatgttgactgcgtggtccaaataatctctgaaaaaggtttcgtatttaccgaagtggaggcaatccatgaactaatttttgaggtttcgtatgcgcgaaaagagtttcgctctcaacttcgacgttctctgccctatattgtccagccagggatgtaaatcaagttggctggttaaaaacattggtccagcttaagcttgacgttgaatgggaatttagagttccaatccagctagaagaagcgttgttagaagcggcaaaagctatgagattcgaatcataggcaaggagttgtgtcaagaaaaaacaaaagacaatcgaaatggacaatcgacggatggcaaaaagatccaataactgagaaagacaaaacaaagattcttttcgataaaatacaaataagacaagatatatgagcaagaaatctgccaaaggtcttcgagattttgtatttatatgtcgctctattaacagagccgtgtataccggaaaaaaaaataaaagcgttatcgggtttgaacaactgagttgttataatgttctttttcattttaataaagtgactccgtcgcgatgttttttttcctcttcttatgaaatatgaaattttcattttatttcttcaccgggcttggaccatg

SEQ ID NO: 22872 - DNA, 3003 bp, Unknown; identical to SEQ ID NO: 18364
  misc_feature (1)..( 3003): 2750-1469P.txt file - cDNA_ID_2123863; gDNA_ID_1621133; Annot_ID_172546

SEQ ID NO: 22873 - DNA, 3003 bp, Unknown
  misc_feature (1)..( 3003): 2750-1469P.txt file - cDNA_ID_2123870; gDNA_ID_1621133; Annot_ID_172552
tcatgtttctgttcaagatatggcggcaactctccatccctgatcaatcaaatgttgctctctagtatatattatacatgttgttacatctatatccaaaaaaaagtgaaaggtttagaaaagtgaattacttgacacaatgggaactcgagcagccgcagctacaggtaggacaaggaacaatgttttggtagtagaaggcagagagtgaaacgcagcattttggcgatggtgatgaccgaaactgcgagtatacacacactgcctcccatgttgctgcactcaacaccacatatcttatgttacataactcaaaaaacctatgtataacatgtttctacatttctcaacttctttttgtaattatattgcaatttatataattttggttacctagagcttgtgttttgcgacggcccttatcagtactaaacttagtcggggacacggatgtagcattgtcgcagctataacccgggacccctatatcgaaattagaaggcatattgaactcctcagggccatcaggagagcttccaactgtcatgtgaaaagcagagacgtgattggcgtggtcctgagacatggaagtcaagacgcctccacggcaacaattggcaacttgaacgttgagagaagcaccgggaagaaggtcgactatggttggtcgctcgagacagcagtgaggaaggttaccgctggaggcaaaggcagagcaattaccttgctccgtcgtctcagctcctttcatgtcccatatcacttcttggttgagccaatgccagctaagcttccaccctggcttttccacgtgtcgatactcttgcatgttctctaacgttacttgtacctgcaacattacattttcaacattccaagcattataagctttagtttttactttttcgtttgcaaaattaatgtaggagtatctttcaattttaggtaaaatcagtaaacctaaacttaacaatatataataaatttgaatcatcattgaacaagggccacattactttataagacataacagatttcataaaacgtcaagagaacaaaaaaaacgagaaaagaaaaccaaactttacaagctttttataatcagaaaatgattttgacaaaatcaactttgcaggaaacaaaacaaacttttgagtaacttcttcgtctcaagcttaatattcggacactaatttagttattttcttttgttatatcattaagtatttttttttataaacccagattctcccaagaacaaaaaaaggaaccccagattatctgaggctcatgcgggtcctataatcagacacagaaataaaacttacgagaaaatatggagaggaataaaaaaaaacaagagaaggaagaagagttacgtggtgttggccaggtgatgataaaagaagatcccatttgataatgatttttccgaacggatcaagaggatcgtatccatctgcaaccattttatcaatcataatcataaaccctacaaaacaattttcaaagattcgttttgtgataagaataacaaaaagagtctaaaagacttacgtgtgggtgataagattgaacagagaatgacagtaacgacgagcaaaagatttagcattgcacccatttttgtctcacagacgatgaacaaattaaacgagaagatcaaaataaactagtcacgtcgaatttcagattccgatgaaaatatttttttctaaaacgtgaattttgatttggctttgggaataagaaagagagagataaaaatctcaagagttttaagtgtgacgcctcgggtttctctgtgttaagagagagagatagagagacaattaaagcaaagaagtcacacagtgactgtttagtgtttgcaacgaagagttttgcatttgtgtacacaacaacaacaacactcttcactctttttctttctatttttggatttttgacttacttttattttttattatcaaggctattagctgtaaaataaaatcatttttaccttatttgtacactcttctaattcttcaagttttctggtagtttagtaggtgccagctattatttttgaggaatgattcacgtacgttatcttcttgtaactttttaattttctgtatttttatggaattcaatccaggggcattagcaaacaaaatcatttgattttcactaggttatcagattaatttttgaggttaacaaagatttggacatcactacatcagtgaatatatatagcaattatttgattatgcgaccataataatattgtatggtatcagttattctagagcgagcagcttgctctatctcttatggcattgatgaaaactttttaactaagcaaccattatataaaattacgaatagaggtcacaaatgattcatatgcaattaaacatgttgaccaaggggaaataaataaagattagaatttaattagagaagaatgtgtcagaaagagatgcgtttttcatgagcgtcaacaccaaataagctcttttcacgccttccttaggcatttcgtttaataaataacatagagacgaaatttaattaacaataatatgccgttataaagaaaataacagtttttattgacaatgtaaaagcacaacgattattaatttattatctttcaatttatatcttaaaatggaaaaacaaaacccaatattaatctatcaattattcatcttaccaaaaaaatctatcaattattcaaaagtagtgattagtgaatgaatatatttcatccttcatttgaagtgtggtgcaagacgcgcgaaccagagaaataactctaatccggtttggttcgatttataagatcaaaatggtttaaattttggttcattaagtttgatcggtttggttgtggttttttattgtttcccaaactgccgatgaatagtcaaagttatgtcaagtcggtgatcggagaactttttgacgccgagagagagacagagaagaagcgagagcgagagagaaatg

SEQ ID NO: 22874 - DNA, 3003 bp, Unknown
  misc_feature (1)..( 3003): 2750-1469P.txt file - cDNA_ID_2123892; gDNA_ID_1621133; Annot_ID_172556
ttatggcctcaaattgctgaatgtgcaaattaaataaagaaaatatttgtttttctacttgttctttatttttttttggacaaatttgtacttgttcttttaattaagaactttatgttgcagacgtcaaagaaaacaagaactttaaaatagaagttttctcgtaacgtagatgaattatgtatgttcatgcaaatgtgtatagagatacgtaggtctacattaacattacatatactaaagtgtatagagatatgtatactgattagggttttgacagatttgaaatgaaatgttcaattaccgtataaaagtgggtttagctgcaaattattatgcatcattgtttccttaattaggataactaattgaaatcttactgtgataattaattcacaaaactaagggtaaattatacaacgcttttattaaagcagccaataggttctctttgttgttcttttctgatgacacgtagaccccatcttcacttattattgtgaaataacaacaaaaagatgtcacactatagctagtaaacaccacaaaacttgcatagcaatttcttaaagtagacactagacaacgaatacagtccgtataggatatactgtgtgttattactttaaaaaggaaagaaaaagaaacagttgatatacctttttctttacatttgccaatataccaactaatattgtatacaactcaatttcgaaaggtttaacgtacgaatcaactaattattaattagggttgtaaattaagttctaaatcctgaagttgtcagcaaaagacagtgaaagtcctgaaggggatgagatcataggaataaaggaccaagattcatgtctgttcctactacttagggaccattattacactaactctctgttaattctccttttcatacttttatctataaatatatatatatttatcaataataacaccattttgtaagtatatatatatacaactcattatcaacatagaacagagtgtgttttgtttcttcttctctgctctgcttttctcttccttcacatacaaacaaaggaataataaacgaaaacgatgtcgttgattgcgtgaatatatctcaattcttttctttcttttcatagatcatcgaatttccaattgtcaatttttaacttgattcttgataaaagactcatctgttcttctccacgttcttgaaaacaaaacagaggaagaagaacaatctgaaggagttcaggctcctgattcttctttctccagttcgatatttgttctaaaattctccaaagagttaagaagactcatcgacttcaaatcaaggaacggctcaagattcgcatgccacaaggagaaaatgaacaagtcaagctcatggagcatatacagtcccagagagggagatagtgaagggccatggagatcgtcaacgtcgatgaatgcgatctcatttgggtttgtagcgacggcgatactcatctccatgttcttgatcatggccatattcgagcatctctttaggcctgagaattcttcatttgattcaccacatcagatcagacaaagacagagagatgggtccagtcagttccagaaacttgctgatcaagcatccatggtaagcacaaaaacaattaaaagttattaaagcatttctcaaaagaatttttgtcctttttataaagccgagccgcattaacttgccactgttgagtttagtttttcgtttgtttctgcaaaataaaattgcttttcttttcggtgcaaaaacctttgaaaagtcgaaaacattcgtcaaaattaatacaaaaaatataacccaactttggaaagtgaaaagcaagacacacaagttgtagtttaattctttgctttcatatagaatatttttttttcaaaacatctttacgtacttgtagaattgttctttgttttatagaattaagtcgcaattaacttgttttaagttaatgataaggaatgtaacggtggcaggttccggtgagtacggtggtggatgtatcggtagtgatgccaggggagaagttgccgtcgcacatagctttgccggctccgttaccttgtcggagagaaggcattcattggcctctccgcctctaaatattactatagctattttcttcttcttcgtcttctgtaatttttatttatttatttctgactcataaagtagattagtattcgtaatatatttcaatatgcattcccgttacgtgaatgatcggccaaaaaatatttccttttttttttttttttttttttgtcaaaatagatactcattgtaaatttaagattaaacttttgtaattatgctttttaattaacattttatgtctaactaatcaatttgggataaatcacttttagaagttagaaccagagtttttaatagcttaaaaagttaaaatatactgtgtatccaatataatgaagctccattacaaagaaagagatttcaaccccactatatatatactaggttcaagtgtagtgacatagtgttcatgagtacgtgtagtgttgagtacgacaaagttgaatgatttacgccttcacatgtattatcaacagttaaattccaaatgtaataaagttatgggaccatagttcaaaactttttatttatatggtttctacacaagtggaaacaaattaaggatgaaaaaaatcccaattagatttacatagagggattcttgatcttatttcgtatggtgcaatatcatcctagattcagatgtaacttacaggattttaaagatacagtatgatttctatcaatttttcttctcgaattcgaaaagtataagatacaatgggccgataatgaagcccattactatcagtgggcggatttataaggccgagacaaaaaaggcaccttttctatcaatcgtcgcgtagaagctaaaggaaagctgactcaaagattcaaaatttgaactgcaacgagagagagagagaaagagaaaggaggctatg

SEQ ID NO: 22875 - DNA, 3003 bp, Unknown; identical to SEQ ID NO: 18351
  misc_feature (1)..( 3003): 2750-1469P.txt file - cDNA_ID_2123940; gDNA_ID_1621133; Annot_ID_172574

SEQ ID NO: 22876 - DNA, 3003 bp, Unknown; identical to SEQ ID NO: 18350
  misc_feature (1)..( 3003): 2750-1469P.txt file - cDNA_ID_2123944; gDNA_ID_1621133; Annot_ID_172575

SEQ ID NO: 22877 - DNA, 3003 bp, Unknown; identical to SEQ ID NO: 20502
  misc_feature (1)..( 3003): 2750-1469P.txt file - cDNA_ID_2124035; gDNA_ID_1620746; Annot_ID_166679

SEQ ID NO: 22878 - DNA, 3000 bp, Unknown; identical to SEQ ID NO: 4941
  misc_feature (1)..( 3000): 2750-1469P.txt file - cDNA_ID_2124042; gDNA_ID_1620746; Annot_ID_166681

SEQ ID NO: 22879 - DNA, 3003 bp, Unknown
  misc_feature (1)..( 3003): 2750-1469P.txt file - cDNA_ID_2124057; gDNA_ID_1620746; Annot_ID_166685
tttgagatggtgaccgtttcaaagatgtttacacttttacttacttctttcaacggggtttagtataaaaaagaacaaaggaaaagtagcgaatactttttgacgcaaatataactaacaaatattttttgattcaaaagtatatgtacgtctttgaaggtttttttttaatcttttcttcaaaccacacgagaaaagacaaaaatgcttgcaagtcaaagataagaataaattcactcgtttcttgaagtattttcaaatagacactagtattttcttgaagtccaaatgttagaaaaagaagtttgaattcttccttgagtattagcgcgagaagaatcacaatttttatgaatatttacaaaaacaaagtggcaaaatatccaagatccgacatggagttctcggaccttattcacaaagacacaaaccatagctaactataagcgtaaaacgatcacttataaatatagagacacatatctatttcttactaatctaaaatcatttcttcttccacaatactaaaagcaattatcaaaaatatatcaaaaccagtcttcatctctaaatcactctttcgcttaattcaatcatttcatttcttcctcgtctattcaaaactcttcgatgcaacgtttgttaacaccttgctcaaaaatcgcatacacaacaagatacattgcaaatccaaccctaccttacccaaacccatgtgatattttcatcaatcatcgtgggatcgataccaagaagactatttcaggcctactatatgattgtttcactagacaacgtttgactgctttcttggatagtaagagtttaaagcctggagacaggctttttgtcgagatcgacatggcaatcaaagcatgcggggttggtattgcggttttctctcctcgttactgtgactcttacttctgtctccatgaactcgcattgctcgtgaagaacaagaaaagagtcatccctatattttgcgatgtcaagccatcggaactctgcgtaaaagacgacaagacacgtccagctgccgagatccggaggtttcaattggctctcgaggaagcaaaatataccgtaggactcacgtttgatacatctaatgggtatgctcttgtttttctacattatatatatatatatatacatatatatatatatatatatatttatcatttttaaccatatgaatgcaatatatagttcatttttacatattaaaatattaggattgcttaaaataaaaacatagcattttattttataaaacattcgactgtttttttgattacaggttcttttacgaatttgttagaaatcatacacgcaatatagaaataacaatcttatatctcataaattattatttggtaatgtaaatgtgcttgtttctaaattgagttttctattgttcagagactggtcagagttcttggccatggcatcggatgcagtcacgaagaacttgttagaagttgaagaaaggattggagattaattaaggagcatcaacaccacgtacaagctgaccattaccatcaataaaattaaaataaaatgaaggagaaaaaatacgctaattttccttgattctaatataatttaattgatgataattctattttaatttaattgatggcaattaagtattttgtgaattttaactactcatttttcgatgaacttcatcctcgtaagaagttagttaattgtgtttattgattctcttgtcacaaagtgatttattttgtaacctatctaatcatatagaaataattttaaagagaagcaaaatgtaatttcccattattatgaaatgtttctcgcatttttttttatctgtttccttatttttaaacaggtttgaaagttttcaatgaatccaaactgttgtaatatttttttttttgttgattagtcaatttaacattagaaaaacaattagtcaactaaatacttgagtaaaaacataatttattgaacataatcacaaatgctctacactgtattactgttaatcatatcaattgaaagaagctgttaaaaaaaaaaaaattgaacataatcacaatttcttttggtatatatatcgagtgatcgaatttttacaaatacaataagcaaaattttcacatccttctagaagcattctgaattaaaataaataatcttacatttaggacgaattccaaatttatatataatccattctgtattaaaatatgtatcatttaaaaccttgtgcaactaaatttgtttggattcacattttaaaatcctcacatttcgcataatgtttcaatatataaatctattcattgcttgatcattatacatttctgacgatatcttttttattctcacttgcaaatattttcaagaaaccaaaatcaaaatttattcccaatccaaacaaaactcataaccctaattccatagatcattcttgtcatggtcattcgtctctcatatgtcttttccttccaatatggacctactcatctattaaactccaattaagaataacttctacccgttgaggtgggcttacaccactttccctaaacggtactttgttatgttgtttgatatttcttttctagtgtctatgatatatcgatttaatagccgacaagagaaaaaaataacacatactataacaataacattgattataagaagatggatcgattaggaaaaataattaaaaaaaaacgacgacgaggatgagcataaaacataattgaatggggaccactaaataatagtattggtcagtcactaatgtgaatccaaccatgtgccaactcttaactcatcctttgctgtcaccgaaagcttcgaatccaccaaaaaaaaaaaaaaaaagtcaatatgtctccttcacgtctctgcctttatcttcttcttccttcttctccatcatcatcagagagacgaagacgaagaagaagaacttcactggttattctctctccgtagccaaccactatg

SEQ ID NO: 22880 - DNA, 3000 bp, Unknown; identical to SEQ ID NO: 7668
  misc_feature (1)..( 3000): 2750-1469P.txt file - cDNA_ID_2124091; gDNA_ID_1621156; Annot_ID_173504

SEQ ID NO: 22881 - DNA, 3003 bp, Unknown; identical to SEQ ID NO: 18588
  misc_feature (1)..( 3003): 2750-1469P.txt file - cDNA_ID_2124101; gDNA_ID_1621156; Annot_ID_173507

SEQ ID NO: 22882 - DNA, 3000 bp, Unknown; identical to SEQ ID NO: 7674
  misc_feature (1)..( 3000): 2750-1469P.txt file - cDNA_ID_2124179; gDNA_ID_1621156; Annot_ID_173535

SEQ ID NO: 22883 - DNA, 3003 bp, Unknown; identical to SEQ ID NO: 18576
  misc_feature (1)..( 3003): 2750-1469P.txt file - cDNA_ID_2124222; gDNA_ID_2926150; Annot_ID_198026

SEQ ID NO: 22884 - DNA, 3000 bp, Unknown; identical to SEQ ID NO: 7640
  misc_feature (1)..( 3000): 2750-1469P.txt file - cDNA_ID_2124222; gDNA_ID_1621155; Annot_ID_173454

SEQ ID NO: 22885 - DNA, 3003 bp, Unknown
  misc_feature (1)..( 3003): 2750-1469P.txt file - cDNA_ID_2124274; gDNA_ID_2926150; Annot_ID_198006
ttcaaaaattgagaaatctagatagacataaatgaatcatttaaatttcattagcataaccaaacaacttatatattttattcatgttttttactttcattcttttatttgtattaaatgtttcagttactacaatatattattacatttaacaaactaagtaccgaccaataactaagagcaatgaagtgctaaaacgacaaacagtttactcatgcgtaagataaacgtgaagaagttcaaaacgaaacaaacttgacaaaaaatgaacaactttgaatgtaactgtacacagagccagaaactacaaaagtaaaaaatcatggtatattcgaagatgaaggaagatcttcatgatattccaaacatggctgagttctaaccatcgtcgccgccggcattctactccgaccaatccaaacatttccgatcgtttcactcttctccgactctctttccatatctcttaacctctttttcctcactaacttcaccgaaacaatgatcaccacaactacaataaccgaaactccaatcccggttaaaacaatccaccaccaattcctccgaaccaacaccggttcgtgtttcggtttgactttctcctggtttaggacaacaagtgcgtaatgcccatgagaattcgtagtggcacactcgtaattccgtatcgtattgctgatgttcaacaacaaaccattatctccaaagacgatgcatttgacttttgagcgatcacgagaagcgtgaggatcgaatttgatcaagattggcttgtctctcttgatcgaaaggttcaattttttgagatcattcgtgttggtcgcgtcataaccggtgaatccaataaccggagaaacaaatgagtaattatcagctaaccggaagtaaaccgatgaagagttatcaccgaaactctcaaagacaaaagctattcttttagcgtacggcgacgttttaaccatcggaggaatcaaaacaccactaaagtttgttccttttctccagaatatactgttacggaccgtaacaaccgatgctttgatgtcggaaagatttgacggaagtgaaacatcgtacaacgagcctgtgtgtcttcttgtagtcgcacgagccgcgtatgaacggatcagatcgtccaaatctgaaatgttgttgatgcaatgaaccatcgtttgtagattagagatgatgcagaagacgaagacgatgatgatgagaccaagctttgtagatcccattgccaagagaaaatcaagaacgacgatgatgaagaagaccaaaatgagttttggtgatcttcatcaagattagtaatataaaaaaaagaagctatgatatgattttgattaaaggatatgaatagaattgtgatccagatagataagaatcaaagtggaagaagcatgattgagatttggagacatgattgagattgagattgaggttgtgatgagggaatataattaagcacatatacacactcaaaaggaagtaagaggacatataataaaaatgtaacagctgcatgaaatatggatttgatgaatgtgtatggttgattaaataactattatatagaaaaaaaagagaccgtactttgatattcaaacttgtaagaaaaaaggggagagaaagttgggtttgagctgtattaatggtggatgctttttttttgacccaaaattatattgaagttggagtttatttttttttctaatcaaaattttgtaatggaggtgataagaaaaaagaagatgtcggctatgattatatgccgatgacgtaacgatcatgcaatttctttggttttagtattcttacgattcacatgtaatatgattataagaaaatattgaatttttgttcaaccattctgtcaatttagtgataaaattaaaatagctgtaaaataataatactattaccacattgaaaatttatttttttcttcatattttaaaattctcatctttaatatctcatcgtggactattttgatgtgcgaacattttttttttttttttcgggtaaaaatgaacaatattttttatgaaatcgtacataaaaccattcattttttctttaaatacagtcgaaaattagattgtcattgcaaatgagtaaactatcagttttactataaaaaatgtatgtatatttattttgaattgaaatgttaatgcaccaacaacattaatataaaccattatactattatgttgtaaacttgtgattattgtatctcacatctatggactcaaataattttaaattctggtggaaaaattagatagcgaactctttgttttttcatgccaactcatcctagatgaatacgtatgttgattatattaatcatacaaaaactaccaaataagattaaataaaacttttataatatcaactattttgttatattaacaagagaaatggagttttggttagtagttgaaagcgccagcgaagtattagggtggaagagctgtaccatcactcaattttagtgggtttgttatttatttctctctttttgccacatttcttttatcaaaaagaagtttcgttttttcattcacttatacaaaacataatttagagttagatatttaaagttcattgttcgaatttctctttttagttaatctcgtattgtcctcgtaactgtcttatagtttggttagaaacaaaaatcaaaggtttgcattcatttgccattttttcctcacctagaaaaagacaagagttatcaaaaaaacaagatgggcttttagtgacccatataatagatgggcctaaaaccccacagaatgcgagcattctataaacaccactgagttggatttctaaagataagaggagcgaccaataagagcgcgaggagcttccacgtgttactacacgaatcttgtttagtaaaaagcgcagctgcaaaaaaaatcgagtagagaagaagtaggcagacaaagaagaagaagaagaagttctcggcgtgcttcaatg

SEQ ID NO: 22886 - DNA, 3000 bp, Unknown; identical to SEQ ID NO: 7648
  misc_feature (1)..( 3000): 2750-1469P.txt file - cDNA_ID_2124274; gDNA_ID_1621155; Annot_ID_173474

SEQ ID NO: 22887 - DNA, 3000 bp, Unknown
  misc_feature (1)..( 3000): 2750-1469P.txt file - cDNA_ID_2124288; gDNA_ID_2926150; Annot_ID_139261
ttgtataactttgaaagttaccaatcacaaaaactttatcaaaagtgttattaaaagttttatactcacctttttttaataatttctttgtatagttccttctaacagctttgcactattccgataaatctaacagctaaaaatcttgtataccttttggttaccaatcagacccatcatataatgtataagaaaattgcaactatgccatcaatcttgtttcttgtcttttcatgttttggagggtccatactcaaaacaacaaatcaatatcgagtttttatgtttagttatatacactatcattactttcaaaacaaagaaaaaagcctttaacaaaaaaacaagtgggtgtgtataaaagtagatgtcggaccacagttgataagaatcaaataccgaaagccttatggctattattctatgtgataattatgtagatcacacataaaaaaagttcaccagctcattactcatactcacttacatgatcaagttcaaattattaaaatgtaaaagtcttcatgtaaacaaatcgggccgttctaagcccatataatgaagcctgttatgcacctaaacaaatagggcccttttatcaattagggaaagaattacgggcctaaacagctcagaagttctgtcaattaaactctgtgtttccttagtctaataactaaccgataaaataggtagtaaaaaagtcaacgatagttatcccaaaaatgcaatgttaatatttttgtcaaatctgattggtgttggaaagtggactatctataaatccatctttaaatgatagacagagacacagagtagaagactttacagctgtacgtagctttttgtataaaccacaaaaatagtcagaaggcgacctacactatgtgatcatataacactccccatatatctttcaagtcttcgtttacgaggttaatatttttcaacgtttaggatccaggtttcttttagattcaagttgtgaattagaaaacaaacaaaagaagaagttttgagagcacgtcttctaacatggaagcattaaacttgacgtatttttatggactatattaatcgatatgctgggaggatgatgaaaaaataaagaatttatatataaatattagttatttaggtaagtatgaaagataaataatatataaaccaaaaaattttttttaaaaaaattaattacaaaaatgctattgaataaaaataattgtaatattcggatgataagtatataattatttgtttaatgttttaaaaactatgatatcgcgataagtttataaattatttgttaaaacatatttatcgatttaaaattgtaaatcagaattttttatttatgtatattcagcacaataaaaggaaattagacttttttatataattaacatgataataattataactacatgatatatagaatgataacatgctaatatattatataacagaataatatttatatgaaaacgttaagatattcgatacatgaataatgtttactgtaacggataatttatacataatatttactaataattgttaacgaggttaacctgatgataacaatgaaaatatttagtaacaaaacaatatatgagactttaattaaaaaaaagaaaaatacagaagaataataaagtaacttcattagttcttttactgttgaaatagtccacaattcctacacctaatttttcagtcttctgagcatataaagtgatattttcctatttttatttactttttaattgtattataataatatttgggtatttttggttattataataatatctgaaaatattattgatatttttggttatttttatatttttactaaaacaaccgaaccgatccgaatccgaaccaaaatcgaaccaagtttttagaatatctgaatggttctcaacctcttcatatccgaatagatttgatatccaaaaaagaaccaaacagatagggatacccgaatgaccagacctagtattattgatataaaaaaggttgctcaatgtataatttcatttgactagctggtctgttttcgtacaaacacactcacaaaagtacgaaaataggaagtcgtcttagttttagaaaataactattgctgcttattggcatatattgaaaaatcaaatactactagtaatcgtaagttctaaatttgaatgtttttttcccgagtaattgaattgttcttagtaattaagttcacaaatttggaaaattgcgatatctgagaacgtattaatttacctgtcggtaaacagtcacactcatgtttctagatttcgtatattttagtaataatttggttagtctccttatctgcgagtcaacgagacccggtccgctcaaccgtactacagtctaaattctagtttcacgcgcttacttacattacatacgcgctcatctcttctttactcaaaagttttaaaaaacgaatatcaaatcaacgctaacaaagtttgattttttgcttccatcttcttcccctccttaagttttcaaatctattcatcaaattttcttttgtctttcccttaagattcccgggaaagccaaggaaaaacgctagaagaaaattaacataataatgttaattgttgcttaaaccttccagctcaagtttggtagtaagtaagcagacatttaatcccccaagaagcaattgaagaagacttttaattcttctgaattttctttccaaaaacccctttttagaaaattggttgcatcatagagattggttcatttattcccaccggagaagatcatcaaattcgtcttctcacctatatcgccgacgacattcttcacggttcgtttgatttctacctgttggttcttcgttttatctgaattcaatcggagatatatgtttttgagttcgaatttgataaaaaatcgaaacttttttgatttgaatcgcagttggaaaaaaacaaagcaaaaccctagaaatagtggctgatg

SEQ ID NO: 22888 - DNA, 3000 bp, Unknown; identical to SEQ ID NO: 8176
  misc_feature (1)..( 3000): 2750-1469P.txt file - cDNA_ID_2124376; gDNA_ID_1621199; Annot_ID_174824

SEQ ID NO: 22889 - DNA, 3000 bp, Unknown
  misc_feature (1)..( 3000): 2750-1469P.txt file - cDNA_ID_2124700; gDNA_ID_1621127; Annot_ID_172344
aacatataataaatgcattatttatgatcttatattaattttcttcagtattaaaaaatatttttattagactccaacgtcatctcttggtatgctaaacattatcttcgagacttgaacatgtggttcttggtgcattatattggttaatggttattcaagcgtattcaagttcctcgtaatttagaaattctccgaccattaagttcgtcggaaacaaaatgttttcttgtagaatcccctgttctcactttccacacagaattttttcgagcaatttaagttagcaacttcatgaagttctttaaacctagagataacgtttttttacactcgagaatttcctgaatatggtaaattcaaatgacaaaatcttataaattgatagaaatctacaacaacaaaagggcgcccggtccaagtttcttgtaccaaagctattgacacaagttctaataaaaaatcctacaaaagacaaaatatggaaatatttattgatatttgatttacacataagactttaaacctttgcggggtatcgggtagccaactctttttataatgttgaaaattaaaatgaagaaatagaaagtcacaatctctaaattatttgttttgtcatacaaaagagattaatgtgactttgtagagaatatttatacgtacatataagcctaagcatgatcacttacgctttataatgtttcaaggctttgcaccactcccaccgttgctaccatcttcactcacctttgcattgatgacaaatctcgtttcaaagtttttagtagtaaaaagaacttcgctttgtacgttggtaccgactcccataacggaaacactaggttttccagtgttgttagtggcaagagttgcttcaccttcacgtagaggagctggtcttaaaacgccattaagaggagctttggtgccaatagtggctccactttctttgatgggagaaactcctacaatgacaccaataacaggagttttagtgccattagtggatccgccttctgttacatgagacggagcaactcctctaatgccaccactaagaggagctttggtgccatttgtggctccaccagtaacattgttagtagagtttccaattggctgttttttattcatgagtttggtattattggccattcctccgatcttacgtgctccaacattaccactcaaagctgcaatgaataccaccacaagtaacttgatgatattcatcgtttttggctctaatttttttttataatctaagataatattttgtttgtgtagctttgagattgtgttcctaatatcattcccacatgtatataaataatgtgtattttgtacttacttagagagaaatacatagatgtgaagagagttttatacgttttaataatcattcattatcttatagtgacaaataatgactcttcttcgcttcattgaaatttcagagatgcaatgtccacaagaatcatgcacacttgagccgtttaacgtgtgttgattcagatggatgactatgcgaaagtatagctacaaaatcacctaacagtcaaaatttaaaataattttccaacataaatgtttcgtatcgtggaaagtataactttcttttaaaacaaagacggtgattgcattaactcgtaccaaatcaataccatgggcaacttagagcatgtccaacggttaaggccctaaaaatttctaaaaagacaaaaaaatagattttattttaatagttataatctatttttttaatacagatagaccagtaataaaaatacatgtgttattttgtttgtgagctcgtcccttacttacgggttttaagagtttctctctcatgttcctactaacttttgattattttttactttttttattgttagggcctcacctaaaagcctccggttggggatggtctttaatgcattaactttcaaatcaatatgggattgcattcactttctttttgggtcttcaaaaagttcaaaaacctcaagtaatttccctacttaaattatccttaaaatctgaaaaaagagattaatcaacttcttaaattcttcttatggttttggtttacttttactttttttggcatatgatttatttattaacattgaaaataaaataaaaacaacttaaaaagttgggtttaagtttttttttgagctttaacacttgaagaatgaaatcataagacttttaagttataaaatcgaatatggacttaaatatatccggatatccgttatccggttcaaattctcggattattcgtatctatatctttattcggactatccgtcgttttactatctgcatatgttggccggctatccgtttgtttggataaaaatccgtggtaaaatatattaacctcatgcgtactttggtctactaataattagactataaatattattctaattttttggtgtgttattattggagttgtctcctaccaaacaaaaatgcgaaaagagtcaattttgaattttgatcattttgataaaaagtaaaagaatcgttttattaaatatttttaaatgatctttttttttcaaaatcaatcaaacccgttatatctagatatctattaaccggcctaaattctaggattatttgtatccgtcgtttaactattcgtatatctggccggctatccgtttgtttggttcaaaaaccggatacggatatccacggtttaaatagattaacctcatgcctacctacttttggtattctaataattagactattctaattttctggtgtgctattgttggagttgtctcctaaaaaaaatgcaaagaagagtcaattttgatcatttaaaaatatttaataaaaacaattcctttagtttaattggtatactgggccatcaatgggaccgaccaccaagagttgtgcaagcaatcggattatttagcgtttttgatgagttccagtaatctatttgcttttctcaatagctttaaaatg

SEQ ID NO: 22890 - DNA, 853 bp, Unknown; identical to SEQ ID NO: 7100
  misc_feature (1)..( 853): 2750-1469P.txt file - cDNA_ID_2124745; gDNA_ID_1621127; Annot_ID_172362

SEQ ID NO: 22891 - DNA, 3003 bp, Unknown
  misc_feature (1)..( 3003): 2750-1469P.txt file - cDNA_ID_2124777; gDNA_ID_1621144; Annot_ID_172948
tcccacgtaggtcactaaactccctttgatcgactttctgaatgctccattatagtgtcattaaagtttagttccattgagtaaagccatgtaccctccaagaagattcgaagtcacacagtcacacatgccttccagatgatccaaccagtatttgttacgtttttcgttggattctcaaaacagtacaagacaacattcaattcccgacgtctataaatgtcgttaatccattgttaaataatttaacaacgaagtaaccacaatcaattaagcatcgttagttgtttaactaaactagtttttcgtacttaagagtcgttcgtagttaaagacgtttaacccgtcgttaaattaatgatgcacgtatataagttttaccaacgtttatgtcaatgttaatttaccacattttggcgtcgcaaaatgacaattaaataaatcattgcaaattcataaagttttgcttaatgatatctactatttagcgacatatatgtttttttatagctaccacttatttttgttttcaaggacaacccctaacaacactctgtatgactgtatgtgattctgtaagatctcatgatctcatatcaaacttttttttttacatgtgatgaattctattattaaaatggaacaattatttacaattggttgggggcaaggagcttttatggccaaataaatgtaatcaccttagagaattagtacaaagaaacttgagtttactaagtgtgggaaaaccattaagagagcagatgtctacaaaccttttcgatatcatctagctagagaggaatgtctctgatgcttatgccaatctgccgaaagaccgctgtagaagttactgagacattgttgtgcaacctaatgtttctttctttccacatcaggaagataaaatttgtaatgactatgttcaatgattacaaaaataagaagagacatatttacatacatgagaaaaagaagattttcctggtttatttttgggatgaaatctcaatgtgtacgaatatttagttgtttgattaaaataaagatttctaattaagagaggaaattaacaataggctaatgatgatgtcttaatcttttttttttttttttttttgatgatgtcttattgttatgctggatgagttgggggactgcaaggtggcttcttataaggttcctttttctggggtcccctttttgacttgcttcgctttactcttgctttcatttggacaacaatttcattgctcctattttcatctccttctctattccctaatttatgttttagatgaatcaaacaaagcaaaaaagaattatgaatctttcatacaaaagaatcttcacataataacatccgaatattgtatgatctaactaaacctaaaattggttaacatacttagtctatgttattggttccggatcaagcaacgtaatgaaaacgaacgtgttaaaatgttttgactcaccgagcttccgatgctttggttgtttggtcgatatagcttttacttctccgaagaagaaagaagacaaaaggagcagagctgcgatgagaatcacgaagaatggtgcctttcctgtcattgtatatcttactgtccaaaaagcctataattttctaacttgttccatctatttatatagttaaaaatatccacctacccaacttgatttcacactaaaatgttgaaagaaattaaatctggcacataattgaaaactgttacttgattacatgtcctgtttgttatttttttttgttgtttcaatattcattttagatcttttcttactctgaacataataaaataaaatagaagatattttcttactgaaatatataattttgagatgcaaggtatactataaatagagaaaaaggtactgaaaatgttaaatttcttgattccgtactttttattttatttgatataaaaagaaagttgactttaatagagaaagatcataggaaattacacgaaggtttggcaaacaagtcatggtagagaaagtcaactagacgaatagttttgattgacaaattaaattaaagcctcactacagctgttgccatttcctcatatattcctagaaaaaatgttcaccttcacatgtgagtgcaccttatttcccggcaaaaagctctactacagtcacaacgacgaattcatttgagctctgatatacaatagccaccttactgcaaaactagacccaataaaccctaaagaacctctctattatttttttcgggcaaaaaccctagatacagcctagataagttcaatagattagatacatatacctagaaaaaaaatatcttataagaagagcgaaatatggaaattaaaggatgcgttaaatggtgttacttgatggaaataacaataattaaaacttgtggcggcacttttttgtaccttaattatatgcatctttaaggccttttgtcagtgattatgcatgtgataacatataggctatagaaggtggtatgctttattttgagatagggttagggttttaagatccctaacttaattatgtattaaaactgctcacacttagtgataaatgtgtcaactttctctcacgtggtggttttttttttttgtgactctgtttagctggtcttggtaatgtcattttatgcgtgtattgcatatttagtttataggtaaaaaattgtttattgcgtttcacatttaatgatgtttagtttcagtttgatttcacatgttgctctttggcttcagatttgtagtttcattttcacttacacttagcttgctttgattcgatttgctatattgttcactcactcttgtttcaaaattgttcatttttagtacatattcgacgaattctccggtgtggtatgagagagtcttagcttgttttgtgtttttttttaattagcacatgtcttctaactcatgttctgtttttaattagcgtcatgatgtcaaaagattcttgcttaaacgtatg

SEQ ID NO: 22892 - DNA, 3000 bp, Unknown; identical to SEQ ID NO: 7415
  misc_feature (1)..( 3000): 2750-1469P.txt file - cDNA_ID_2124820; gDNA_ID_1621144; Annot_ID_172962

SEQ ID NO: 22893 - DNA, 3000 bp, Unknown; identical to SEQ ID NO: 5680
  misc_feature (1)..( 3000): 2750-1469P.txt file - cDNA_ID_2124844; gDNA_ID_1621144; Annot_ID_172974

SEQ ID NO: 22894 - DNA, 3000 bp, Unknown
  misc_feature (1)..( 3000): 2750-1469P.txt file - cDNA_ID_2124871; gDNA_ID_1620742; Annot_ID_49629
actgcaagctccgggaaactgtattgattctccaaaccttcttcttcactgtactgcgtgttatcgcttttcaccgaactaccttcttccccaagtcttttcctctcaatagactgagtttcaagattctcttgcattttcagcttctctttgagaagatcgacctgtttgaatgtgtcatcaaaattttgaacagactcttgaaaatagtggcttgttaatctattaagaaactgtaccttgctcttgagggtttggttttgtacaaagagaatgtcccagtcagtcttgagcttagcatagctagctttaagagagtcacagtcgtgttcgagctgtttggtcttgtatctagctcttctgttttggaaccagacagcgacttggcttggctgcagccctagcttctcggctagccagagtttcctgtctggttcgagtcttttctcttcttcgaaactctcctctagtaaacgcaattggatcggtgttagcttccgtttcttggttatctcacgcatcatgtagctctcacatacgtcttcttcgtccatagttgcagtctctgtgttgatcattgagctagatcctgaattaagaagagaatgaggaatgacacaaattttatagaagagaatctgacctatgtcgtcacatgaggttcttcaaagttcttgctattcttttcaaactcttttaaaatgaaaggacaatcttttaatctgagtggttacattttggggatgaagattcgtcaaaggtgaaaaagatgcatttcaagaaaataaaataaaataaaattagaatggaggaacagagatataccataaaaagcagagtgagagctcggaggaaaacaagaagaaggaaacttatggctatggttttggttttggttctgaaaccaaaagaaaacttctgaatcagtgtctgagttttccatttttactgaaaatgttgggactcttaagagtcactttttataaagaagaaattgtagaatgacgaaacataaaagttacaagagaaagaaaaaacgattccttttgcttgttttagtgtctggtaagaagaaggagacgaatgtgctgttttgctataatagggattatacttgtggttaataattattaaggtgattgattttacatttttccattcaataggtgtgatttttgttttttaaatggtgtgaatgatttcgcaagttggattggagatgctctctaatcacctttgttgtctctatttatattgcaagtgggcacaatatttccttaagtgacacaaacaatacatatgtcctacatttgacgaaaaaagaaattttaaaagtgacccattctttttttttttccgtatacatcagattcttttggtttggttttgtgaaaattgtgaatgtccagtgctgtaagtattagcttgcttttgtttattgacgtaaaactataggtcttgtttctcttgtttgggttgtatgctatgtgacggaaacaaatagaaattataaatttgacaatcccaaaaatatgtatgatttagcatttcacaccttggcgacaacatatcgtgaggggaatgagtgatgaagttatagaggctataaagcttttgatttcggaactaatcaatataataaaaacaaaatgaaaaatctccattctgccatatcagattttatttatcacttcgtatacatataaagtggtaactatcttaacatctcttttgttttttaaactcatcattgtttataacatttccttcttttcgtaattttcgtggagctttgtgatctccttgaagccttcctctgcttaagtccttgcttgctatttcttagaatggaaatatcagcaattgttcttataagaaacaaactaaccaatgcagactctccgatgggaattgtgtggttcgaaattaggttctattactggtttaggttgggctacgatatatttgggtccttaaatggggtttctgtattgtaatgggccaatcacaactttaggtttatttgatttatagaaatttataatatatatacatttaaatttaatcttataagtaattctttcttgggtgaaagtgaaactatcagaggtattttaacatttatttacatgcatgtatataaaaagtgaacagttaatatatggagacatttgccaaaaaagtattaatgctcgacatttggcgattttgcaaagccaatttactacgatgaaatcaagtagcatgtaatataaccattaggtcttcacagttcacactaatgagtaatgacacgtttagatttatatcttttggtcaatttggattttttttttttttgtaacgcatatcctcctctattaacagtaagcaaactcaaagctaaacctcttaaataaataaaatccaaaaatgtgctgtctcgtctagattcagataacagactgaaaaactattctctatttgtaatatacattgtcacacttacgttgtaaaaccttattctctctctctttttctagaaaattttgttatttagttaaagaagtgtattattgattattagatgtcagaaaatctactattctttaataatactagatcttagtgagtctactattcagaaaattccacgagattgcttacttttttttatcgagtcttgattaaattatcatttttatgtctttaaaatctaattactaattagggttcttaaaatctactttttgtaattccgaaaacacccttcttatcacttatatacttcaaaaacccttacctttatttctcatcaaaatttgagagagaaatcaaatggtgggttcttcaagcatctaatattgttctcattctaattattttttgttgttgcaatttttagttgtttaagaacaagacatcagttttggggtgctgatgttagtttctatttagagaaatagatattttctaaagtcttttaattttgattatttccaaatacaggaagtagaaatg

SEQ ID NO: 22895 - DNA, 3000 bp, Unknown
  misc_feature (1)..( 3000): 2750-1469P.txt file - cDNA_ID_2124871; gDNA_ID_1620742; Annot_ID_166490
acaatgcatttttattccatcaatgaatattattactgctttctttcttagaatatgaagtctaagataaaaaggatggagacagcgaagataacttgaggcacacggaacgttgttgacctacactatcacaaccttagatttgaagcagttaaggttggatcataataaaatccgagaactgcaagctccgggaaactgtattgattctccaaaccttcttcttcactgtactgcgtgttatcgcttttcaccgaactaccttcttccccaagtcttttcctctcaatagactgagtttcaagattctcttgcattttcagcttctctttgagaagatcgacctgtttgaatgtgtcatcaaaattttgaacagactcttgaaaatagtggcttgttaatctattaagaaactgtaccttgctcttgagggtttggttttgtacaaagagaatgtcccagtcagtcttgagcttagcatagctagctttaagagagtcacagtcgtgttcgagctgtttggtcttgtatctagctcttctgttttggaaccagacagcgacttggcttggctgcagccctagcttctcggctagccagagtttcctgtctggttcgagtcttttctcttcttcgaaactctcctctagtaaacgcaattggatcggtgttagcttccgtttcttggttatctcacgcatcatgtagctctcacatacgtcttcttcgtccatagttgcagtctctgtgttgatcattgagctagatcctgaattaagaagagaatgaggaatgacacaaattttatagaagagaatctgacctatgtcgtcacatgaggttcttcaaagttcttgctattcttttcaaactcttttaaaatgaaaggacaatcttttaatctgagtggttacattttggggatgaagattcgtcaaaggtgaaaaagatgcatttcaagaaaataaaataaaataaaattagaatggaggaacagagatataccataaaaagcagagtgagagctcggaggaaaacaagaagaaggaaacttatggctatggttttggttttggttctgaaaccaaaagaaaacttctgaatcagtgtctgagttttccatttttactgaaaatgttgggactcttaagagtcactttttataaagaagaaattgtagaatgacgaaacataaaagttacaagagaaagaaaaaacgattccttttgcttgttttagtgtctggtaagaagaaggagacgaatgtgctgttttgctataatagggattatacttgtggttaataattattaaggtgattgattttacatttttccattcaataggtgtgatttttgttttttaaatggtgtgaatgatttcgcaagttggattggagatgctctctaatcacctttgttgtctctatttatattgcaagtgggcacaatatttccttaagtgacacaaacaatacatatgtcctacatttgacgaaaaaagaaattttaaaagtgacccattctttttttttttccgtatacatcagattcttttggtttggttttgtgaaaattgtgaatgtccagtgctgtaagtattagcttgcttttgtttattgacgtaaaactataggtcttgtttctcttgtttgggttgtatgctatgtgacggaaacaaatagaaattataaatttgacaatcccaaaaatatgtatgatttagcatttcacaccttggcgacaacatatcgtgaggggaatgagtgatgaagttatagaggctataaagcttttgatttcggaactaatcaatataataaaaacaaaatgaaaaatctccattctgccatatcagattttatttatcacttcgtatacatataaagtggtaactatcttaacatctcttttgttttttaaactcatcattgtttataacatttccttcttttcgtaattttcgtggagctttgtgatctccttgaagccttcctctgcttaagtccttgcttgctatttcttagaatggaaatatcagcaattgttcttataagaaacaaactaaccaatgcagactctccgatgggaattgtgtggttcgaaattaggttctattactggtttaggttgggctacgatatatttgggtccttaaatggggtttctgtattgtaatgggccaatcacaactttaggtttatttgatttatagaaatttataatatatatacatttaaatttaatcttataagtaattctttcttgggtgaaagtgaaactatcagaggtattttaacatttatttacatgcatgtatataaaaagtgaacagttaatatatggagacatttgccaaaaaagtattaatgctcgacatttggcgattttgcaaagccaatttactacgatgaaatcaagtagcatgtaatataaccattaggtcttcacagttcacactaatgagtaatgacacgtttagatttatatcttttggtcaatttggattttttttttttttgtaacgcatatcctcctctattaacagtaagcaaactcaaagctaaacctcttaaataaataaaatccaaaaatgtgctgtctcgtctagattcagataacagactgaaaaactattctctatttgtaatatacattgtcacacttacgttgtaaaaccttattctctctctctttttctagaaaattttgttatttagttaaagaagtgtattattgattattagatgtcagaaaatctactattctttaataatactagatcttagtgagtctactattcagaaaattccacgagattgcttacttttttttatcgagtcttgattaaattatcatttttatgtctttaaaatctaattactaattagggttcttaaaatctactttttgtaattccgaaaacacccttcttatcacttatatacttcaaaaacccttacctttatttctcatcaaaatttgagagagaaatcaaatg

SEQ ID NO: 22896 - DNA, 3003 bp, Unknown
  misc_feature (1)..( 3003): 2750-1469P.txt file - cDNA_ID_2124889; gDNA_ID_1620742; Annot_ID_166503
ttttccttatagaacggtgagtgactgacaaaaccgcttaatagttcatctctagacttcaatgattgaatggttttatatttcaggggtttgttttggaggatgccactggattagcagtcaaaggaaacattgatgtgcattctgtatatgctgcctcgttaccttctacaaatcctagttttgcaccgcagaagcatctcgagatgcaaaggatatggaaagctccttcgttacctcagaagcctgtagagttgttcattggaattctttctgctggtaatcattttgcagagagaatggcagtgaggaagtcatggatgcagcagaagctggtcagatcatcgaaagttgttgcccggttctttgtggcattggtaagcacaactcttgaaagacaaaattcacctaaatatagccattggtttaatatactaattcatattgcagcatgcaagaaaggaagtcaatgtggatttaaagaaagaagctgagtactttggtgatattgtcatagtaccgtacatggatcattatgaccttgttgtgctcaagacagttgccatctgcgaatatggggtaacttcttcgtccctcttttgttctccttaccttttattacttttctgattactcatccggaaaacttgtaggtgaacacagtggcggcaaagtacgttatgaaatgtgacgatgatacatttgtgcgtgtggatgctgtgatccaggaagcagaaaaggttaagggaagagagagcctttatattggaaacattaattttaaccataagccattgcgtaccgggaaatgggctgtgacattcgaggtatagattttgtggcagacctgaaactctattgagaaagaaacatgtgatgtttagactttatgttgattttttctgacttgtgaaaccaggaatggccagaagagtattatcctccatatgcaaatggtccgggttacatcttgtcatatgatgtagctaagttcattgtcgatgattttgaacaaaagcgattaagagtaagttatccttcacgtagatatgagattttgaggtgatcctttcatgtttccttttatgatatggtcttggttcttcttggtcattgcagttattcaagatggaagatgtgagcatgggaatgtgggtggagaagttcaacgagactagaccagtggcagtggttcacagcctcaagttctgtcagtttggttgcatagaagactacttcaccgctcattatcagtcgcctcgccagatgatttgcatgtgggataagctgcagagactcgggaagccccaatgctgcaacatgagatgacataacattgttttttgacggatttttcgttagaaaggaaaatgaagaagcagatgggtgataatggagctaactgttttagatctctgtatattatagaaacaatatataatgtatctatatatatatatatataatataatgaagggttcttgagaagttgactgagaagtcaatagtttttgcagtgtttacaaatatataatccagaggtactgcaagtaatgagggaagaacataacttctcctgtaccttgagtagtctacgtaaagcccatgagacaagccgcaacggtctggtatctcttcaacatctttaccaaaatgaggatttttgaatccttacaggtacttgtttcatctgcattcttacattggaaattcttttatcaagatgctaaacaagtgtctggctaattctaacttggctagttgagagtataagttccttgattagcctggttctgagggaaataaagtgggaaagctataaatagattcatacagttgctattagtagactgtttgcttaataatttttggaaacttgtgcttatgaacattaccgaagctgttagttagtgactggaataagcatctgacaggacgcacaaaacagagttgcagcacttgcttttcattttgtgattttcctgttcacttggcattggttcccacgtactccctatgctagactctcttcttatgtggtggattcgtttttcacaacagtaaccttatgtcaagacctttcctgattattcgccaaaacaactctctgaaccggacaccaaattaccaatgggataaagctgcttcaggctgagcctccctggcggtgtttataaagccttatgcatgcaagttcaggcctaatcactttatctgaattctgatgaagattaagagtgtgattacatgttggttctagattaagagtagttacaggttggttctggatttcgttctcaccacgacacaaaacctttcaagccttttacattgtgttttcagttggctattagcctcaaaatatctaaaaccggcacattctctcataactagtttttgtaatgcagtcactttacaaaaagtaatagatgccaagtgtaaagagctaaggtccaaaaaaaaaaagagctaaggtgcaagagatttgagggaggtcggtaaaagccattggtgtgttgtcacgttcaatcattttgcatagaatattggaagataaactggatgttggcaaaaaaaaaagtatagcaagttaggaagcagctaatgcaaccaaaactctctcatgcaacaacaaaacattgcaacctgaaggcggcggcggtactacaatttttggatttggtaaacattggttagccacaataagtatttgctgctgcggtccaaatatattcaactcctagtcctaggtaactaaaatataatagtagaaaattccaaacattaaagccatcactatatttgataggtacgtggtcgataaaatagataactcagagtacaccacctttgactcatcagccacctgccaacgagaaacacgactcctaattccactttcctccctcactcactctattatatataaacaaatcacactctgacctaaaacaaacaactctttaactatcatcagatcaataaaaaccagaagaagtcatg

SEQ ID NO: 22897 - DNA, 3003 bp, Unknown; identical to SEQ ID NO: 17679
  misc_feature (1)..( 3003): 2750-1469P.txt file - cDNA_ID_2124996; gDNA_ID_1621200; Annot_ID_174859

SEQ ID NO: 22898 - DNA, 3000 bp, Unknown
  misc_feature (1)..( 3000): 2750-1469P.txt file - cDNA_ID_2125000; gDNA_ID_1621200; Annot_ID_174860
aggtaaaccaagcactatcagattctacccaccaccaggggttttcctccaactgtattaactaacgtaccagttgcaagttccggggattcaatgcaatacaaaccctcctccttttcaaggtgatgacgctgatgagctcattctttcaccgcccccttctcttgtgaaaccgaaatcaccaaatattccctgcatttttttaatcaaaaaaacattccagaatctaaaaagtacaatgacttgtagagactcatgtacgtaccattgcatcattgacagcatatgtgacacagtaatgttcctgttgaatataaacggttaaataatgctcaactacctacacactagaacaagatctgacgcatgcatcatcaaaaatatataatggataccgttgatattcaacaccaatcatcttttggtctttttatgctttcccatacatacatagaggtgcaacatctagttaatgaggtatagacagacttgcctgcatcatgtgccactcttcaaattcgtcaaacaactccaatcgctcgatcctagaaacacgacattctcatttaagatatattccaagagaagtaggctttctaatgaaagctcatgaattgaagaaacaagagagccaaaacaggatagtgagagagagagtgagagagaagaaaaaacaaaaaacaggatatatatagtaagactgtaagaggttcatctaaaaaacattggaaagctcaaaagtcacgggcaacagcattttttagatatttcttgacagagttcagccagatactaggtatgaataacataacgcccttacacagttttaacaaaacgtacagtactgacctgcgtttttcttgagtatcaacaaaactaccatacacttttagcatgtcccaggcaacagctctctgaaacaccagaataaagaagagggtaaagaaatgagagtccttatatcagaaattatacatgaaagttagccctgctttaatcataatattctaactgcaaaacgaacctgccatccattatcaagaaacaatctctcctttgcaagtaaagttggtgatgcatcaatgcttaagagtgcacatccccgactctgaagaacagaaacaccgttaagctttcagaacaagtttaaatgaaggtaattgatcagtacaacatgaacccatgtggcaatactagaatattttagtgtcatactagtatccatattttgacaaaaatctcaaaaaagctttactaatgaagatgtcgctgtaactagagtagtagagtacacgttcttacctccaaatttctaatcatttgatgcccaaatgcatcatctggatggatctgcaaacagaaacccaacgggttagacacataagcaataagattcgtatctgcaatattatgcagacaaggaaaatcacagttgagctaacctgctcatataagaaaaatactgcagttgaaaacgtttttgacgaccaattgacgatggcacggcttgaatcggggtccagataaatcaaaacacattctgcaataataaacgtcggcagactgataatgatattagggatcaagtaggtctatcaccagtaagtatctgttaccatatatcttaaacccgggtagaagaagagggttgaaggttcaagataacagtgtgtaaaataaataaaaattattcatggataccttagatccatatctgcaaaggatataacatctcttaattttggtatatcgcgcaggtcaactggaagtaacttgtaatgatcactgagaacttgtccttcgtctgtagagataaacagcccaacgagttaagagtaagcaactgaaactagacgctaacggtacaaagtaaaagggggtggttgagttagtagctagtagaagcggaatgaagaaaaatatgagtgcacaagctgaaatgcatcataatgaaaaggatcattctacataataatacatggggggaaaaaaggctcttaccaatagaaatagatgcattggctcctagtttgtccctgagttggctggagttttgtataacagcagccttcttgctagtcacctaacgtaagaagcaaatccatttaggcattagactcaaaacacatgatggatacttttgtcagcacgctcatccagtagtacctccttaaaatcaagttccacatagagattgggcccattcccctcatcctacaaaatgagaagagaagaagcgagagatccctggaataagccgaagaatggtgaatttggtaaaagctaacaaaaaggagaagaaaaagaagacgcaccagcaactgaaaataggtagtatcaaagccagctccgagagacagtatctgtttcttagaacttgtcccgcttagaagaaactgagacataagctttcggaaggcagcccaacgggaaaagtaacctcgattaatgatgggagatcttcgaacaggtcttttcacaaagagatgaacatagtcgtctttcatatatccctttttgacacaagacctttaaaaatattatctaggctcaaagatccacaacaacaacaaaaaaaaaagaagagccctaattaaagaagagagaaagaggtaggcgtacaatttactggcggatgcatcgtcgttagtagcctgaaccgccgctctgttgctgcgagattccgccatcgtcgtcgctctctcagccaaaatgaaggaagaagaatattcaatagtctctctcttccccgggattgtttgggctcaccagacgcggtttctaatatttctcttagtaggccttggcccagaaactacgaaatttgagcccaattattaaacaagattctagaagaattcggtcggtcacataaaaaaaacagtaatataaaaacggaagaaggaaggagcagagagaagaagtttgggattttattcgttattagtgtggtaagaaagaaaaccctaaaccaccggaaatcgatttgtttggaagatg

SEQ ID NO: 22899 - DNA, 3003 bp, Unknown; identical to SEQ ID NO: 17685
  misc_feature (1)..( 3003): 2750-1469P.txt file - cDNA_ID_2125031; gDNA_ID_1621200; Annot_ID_174872

SEQ ID NO: 22900 - DNA, 3003 bp, Unknown; identical to SEQ ID NO: 18233
  misc_feature (1)..( 3003): 2750-1469P.txt file - cDNA_ID_2125136; gDNA_ID_1621115; Annot_ID_171853

SEQ ID NO: 22901 - DNA, 3003 bp, Unknown; identical to SEQ ID NO: 20958
  misc_feature (1)..( 3003): 2750-1469P.txt file - cDNA_ID_2125292; gDNA_ID_1620852; Annot_ID_170361

SEQ ID NO: 22902 - DNA, 3000 bp, Unknown; identical to SEQ ID NO: 6228
  misc_feature (1)..( 3000): 2750-1469P.txt file - cDNA_ID_2125304; gDNA_ID_1621084; Annot_ID_55337

SEQ ID NO: 22903 - DNA, 3000 bp, Unknown; identical to SEQ ID NO: 6236
  misc_feature (1)..( 3000): 2750-1469P.txt file - cDNA_ID_2125304; gDNA_ID_1621084; Annot_ID_170451

SEQ ID NO: 22904 - DNA, 3000 bp, Unknown; identical to SEQ ID NO: 6235
  misc_feature (1)..( 3000): 2750-1469P.txt file - cDNA_ID_2125311; gDNA_ID_1621084; Annot_ID_170453

SEQ ID NO: 22905 - DNA, 3000 bp, Unknown; identical to SEQ ID NO: 6246
  misc_feature (1)..( 3000): 2750-1469P.txt file - cDNA_ID_2125352; gDNA_ID_1621084; Annot_ID_55349

SEQ ID NO: 22906 - DNA, 3000 bp, Unknown; identical to SEQ ID NO: 6230
  misc_feature (1)..( 3000): 2750-1469P.txt file - cDNA_ID_2125352; gDNA_ID_1621084; Annot_ID_170468

SEQ ID NO: 22907 - DNA, 3000 bp, Unknown
  misc_feature (1)..( 3000): 2750-1469P.txt file - cDNA_ID_2125370; gDNA_ID_1620315; Annot_ID_153133
tttgtttcttatatagaacacaaatcattacaatattttatttttgattgtagaaatcatataaaatgttcaaaaatgtgtttttttagtaatttgatatagagattaaatgaataaaacaatatagaatgttttctttgttctataccatttcatgttatatgttctatgtaaacaaaaccatttactcaaaacgatcaaagacgcactttcttaattttccatagtacagtgtcataagcttcgttttattatcgaactaggtcattgctgcaagtgacccttcaaaaattgcactaggaagaagcctaggtgactcagaagcgcaaattgcaaaatgcaaaagattgcactagagattttacctctaattacaagagagatttaaaaggcaaagagaaaatctgaaagccgtggttaagttattcattaagacaatccatcaaagaaaccatgagtttcagttgcgaaagtgtgttggacagcctcaggtaccagttgcgatttacgaaatgtgttgaaagtgtgttatagtcccctttttccttctcaggtagctaataaccaatcaatatctttgcttttgaaggaaagacaggtcgtcgcaccatccaatctacgtgcttcagatcttctctggtgacggattcgtgctccttctcaatcctcatcaacttgtttaacgtgtgcgctattccctccggctcagtgagagattgcagtttctcgaacatgcatgattctcttcttctccatcctcctattttccacttttgtcttcgcaagtacatcaaccctgatcgatgtcggagcatactccgttgtacagacccttttcaagagatggctactagaaccaatgatacggcggaagttcatcgtcaatccaagctctcaaagttcactaaccctaattataatacatatagctttcttcttatctccaattaatgtgctatttataaaaatgtttacaaagtttataaaccttgattacatagatgttcaatatcataagtttaatccaatctgtatattttaatgctgaaaagatagctaagaaactatatagattttaatttggtatgttagagttgaatatcttgtttaaaccttgactatacatagatgttcattatcttaagtttaatccaatctgtcatactaagccatgtatatcacaagaaagtctgaaaatgtgctatatgtcatagtaaaattattaagttaatgcttttttgatgtgagaatcagcattatagatttgatggtaaaatgcttccatcagtttctctactcttattaaaaggtagccaaatttagtttaattacttacttttaatatatattttcattatgttgatatgaaaataattttatttttattacctccaaagtgatgtatatgaaaataaataaaattgcaagcaatggaaaacaatagaaaacttaaaggtaaatattttatttaagagttgagataattatgtactaaaagtttactacataatgacactaattaaatctttaattcttgttttctaaagttgactacattaagatctactaattaactctttaaactcttctaaataattttgttttcaactatatctcaaatttaatagggcaaaaccaaaatctccctactcactttggaaatcagtaatgtttggaactaattttgactaaatatgctaaatgcaacaagtattaattcagaaacaaatttactacgcaaattcggcaaatgtaaaatgtcaaatatatatagtaattaaacatgttatgtgtgagttgtcgaaatgataaactagtttgttaagtacttcagttagtctttgttcttcatcatgtttctctataactaagtccctttccatatttcatcaatatgcatttatcttattcaaacatcataacattacaacatataactttccttgatattaaaagtgcatacaaagtattaaatctttaaatacctatccgggtgcaataacatattcaagccatcaaacctaatttctaaaagcccgatccgatcgacaacgaaatgttgtcctcggactcgaattacgctagtgatattagcgacgatgcctccgccaccggatcgatagagaatcctatatacaaatgcaagtattgtcctaggaagttcgataaaacacaagcattaggtggtcatcaaaatgcacacagaaaggagagagaggtcgaaaaacaacaaaaagcatttttggcgcatttgaaccgaccagaaccagatctttacgcgtactcgtattcgtatcatcattcatttcctaaccaatacgcactcccaccgggatttgaacagcctcagtacaaagttgatagatcatacaagatgtccatggtctacaaccaatatgtgggatcctcaagctctagctttgcaggactacaaagtgacccaagtcaaggaatgaaccaggattggacctttaccgggatcccattcctaccccaatctcaacctcaaccactatcgtcaccaatatgtttggatctttgccttggcattggtagctcccaaacccaaccacaacctcaagaaccaaatgatgcaacagaagagatggatgctgagaaagaaaatgatggttcttccctttctctctcactcaaactgtgaaattgtaatctttcccttttaagtatttcttaaactttcattcctcacctttgttttcttgcatagtattatcggcttgtgtcaaatcagtacttgtgcacttgaacattgtaataaacttggttgttatttgcatttgaatttcatataataataaaaacttgatattgttctgactttggggtgtcaaattctatttataagaatttgagatgcaaatctcaattttagttactttatgataccaatataaaaaaaaaaaccactctttcgaaaggatgcgggttttgaaatactttcgagctccttcttctctccgtcatcgttcctctcccatg

SEQ ID NO: 22908 - DNA, 3003 bp, Unknown
  misc_feature (1)..( 3003): 2750-1469P.txt file - cDNA_ID_2125376; gDNA_ID_1620315; Annot_ID_153136
aataggaggatggagaagaagagaatcatgcatgttcgagaaactgcaatctctcactgagccggagggaatagcgcacacgttaaacaagttgatgaggattgagaaggagcacgaatccgtcaccagagaagatctgaagcacgtagattggatggtgcgacgacctgtctttccttcaaaagcaaagatattgattggttattagctacctgagaaggaaaaaggggactataacacactttcaacacatttcgtaaatcgcaactggtacctgaggctgtccaacacactttcgcaactgaaactcatggtttctttgatggattgtcttaatgaataacttaaccacggctttcagattttctctttgccttttaaatctctcttgtaattagaggtaaaatctctagtgcaatcttttgcattttgcaatttgcgcttctgagtcacctaggcttcttcctagtgcaatttttgaagggtcacttgcagcaatgacctagttcgataataaaacgaagcttatgacactgtactatggaaaattaagaaagtgcgtctttgatcgttttgagtaaatggttttgtttacatagaacatataacatgaaatggtatagaacaaagaaaacattctatattgttttattcatttaatctctatatcaaattactaaaaaaacacatttttgaacattttatatgatttctacaatcaaaaataaaatattgtaatgatttgtgttctatataagaaacaaaattttagataatagccaaattaaccatacaaaaaacaaagtaatgtttgtgtgaacaacctctccacttctgcttcccaagacaaatttgaccaaatgccaaagactgagcataagtaccaaacacatattgagaagcagcaccaaactgatctttgaggttgagaaaagaaaactgatcttttgcatatttttttttcaaaggattaacaacattgatttaaaatgggctttcagatgagtccataaaatgggcttaaaaatcatatttaatggcccataatatttgtttgcttctcttaaacggaaagagtctttaaccggcgaaagaaaccaccctctgactgttaagaaaattctcatcggcgtttagatcagaaacttgggaatcggagaagctcactgagaacaatggatatgagacgtgcttcgatgtgtatgatgttaatttgcgtctccttggttctcctttcgggttttggccagtttgtgatctgcagtgaagaaaaaggaacgtacaacgacaacgtcgtaaagatgaagcttggtggatttagcgattccaagaacgattggaacggtggaaaagagatcgatgatattgcactcttcgctgttcaagagcacaacagacgagaggtttgatttcctccaacctaatttgtatattctctgcaattagggttaggattctaaaacttttagcgtaaattcaagtaatttgcgtgtctgagtgttcttgatttatagtctgaagattagagattaaggattttgtattagtatttagtgatgaattttatgatttctctgttcacggtgtttatctctatatgtggtctaatagcttttggattttatgcgtagaatgctgttcttgagcttgctagagtattgaaggcaacagagcaggtggttgctggcaagctataccgtcttactcttgaagttattgaagctggtgagaaaaagatttatgaagctaaagtttgggtgaagccatggatgaactttaagcagcttcaggagttcaagaatattatcccctccttcactatctctgaccttggcttcaaaccaggtaatcaccgtctctggtttagtcacagccaccgatttttgtgcataaaactgtttccttttcgatctttgatcataacaagtttttaatgttttttgatatctttgctctgtttgaggcagatggcaatggatttgactggagatcagtatcaacaaataaccctgaagtccaagaagcagcgaagcacgccatgaaatcacttcaacagaaatcaaactcactgttcccctataaactcatagatataatcctagccagggcaaaggttgagttattgtgcttattatattcactatcagtttctttcgtaatcaccaaacccaggcaggcacctaattaagtaaaggaatgatatttttacgagcaggtggttgaagagcgtgtgaaattcgaactgctgctgaagctagagaggggcaacaaactggagaagttcatggtagaagtgatgaaggatcaaaccggcaagtatgagtagaagttgcagatagcttttgggttgtgtgccatgtgtgaatggatcctttatagtatatagtatactaaatactgctatgtagtgaaaataaacatggtgattgtttggctttaaacaaggtttcttgtaaataaatacatgacttcacatatgtaaaagttacaaatatgatatgattatgcgtgtttgaaaaaaaggttaaatctagagtcaaaaccgaccacaccaaatcatgagaatgtgataactaaactaaactattctcatgtcttcaaaagggaaagttgtcttctttagtatttggccccaaagacaacaactttggggaaatttcaaattggaaacgttttgttgggttaaaagaaaaattaaaggctacaactttattttattctccccactagttttgtgtccgagacagagagagagagagagagagagagagagagagagagataaagggtcgataaggtctttttccgtttccttgacctctctgggatttggatttcgatttggatttcgatttcctcatctcatcgatttgcttctcaatctctccaattcgattctcctctggaaatttcaatcctttttatattttccttggtgatttctaagataattaagatcgagaaaaggagaattttgagagagaaagcatccatccatcgatg

SEQ ID NO: 22909 - DNA, 3003 bp, Unknown
  misc_feature (1)..( 3003): 2750-1469P.txt file - cDNA_ID_2125401; gDNA_ID_1620315; Annot_ID_153145
acagacatagtattattttagacaatcaaccatctaaatagactattcaaaaataatattataacttattatttaactaaatttcgaaatcttaaaaccaaaataaaaaatgaggcgtgaatcggttaattaggtcaagcaaacagtcaaaatcgtgattttccccaatcttttcattaatcaaaagatgtggaattttagggtttaagtaaccgaacatgattactatctacgatattgtcaaaatgtaacaggcttattactgtactattttcttcccttttttttgtacgttagcttattagcagtaactaaaataaggttgcgtatacaaatgaatttaatgatcttttgtttgtactccagatagcaaagaaaacgaatctatgatgatatgtcttttttctccgacgaggtcatttaatggagggaacgaagtttatttttgtttctttgttctgaaactctgacttcgatatgacctgaccagctgacctttttacccatcaaacgacattacctcctagacagattagctctgtcaaactatgtaagatattcgtcggttataaagataatggtacctagacaacgatgcaaaaagtgatagtcgaaagagagaagaaataaattaaaaagacgtgtgttcgaatcttcgagagaataatggggaacagtgatgtatgtaagacactattactaagactctaacaacacacagtgatttatgtaagactctctctaatccattaacctacgtttctcaaaattatacgtaaactacatatatagtacatacagtatatgataaaaaaaaaaaaaaaaaaatatagcccaacagattgtggcctagttagctagcctgatgatactgacagagatttgctcaacagatttgtcgaagaaggctatctcgtacttcaacgaaaaaacggttagctaggaactaaagaaaacaaaatgaatctcttactgtgatggtgatgccccggcccaacaataagtagatccctagcgcaaaaacaaaattgtttgggcttttacagtgtatattactacatttacaatattatttggacaggatttcttcaaaaattagcacaacatttctaaaattttacaaataacactataaactttaattcaacttaattaaaatatcagatagaaaataaaaataagagcaaacactaatctaatatttaattgaattaaaaaaaactttaaatagtaaaaatatatatccgaaattaaaaatagagaacccaaatataataccacaaaaactaatattaaaataaaaaatctcttttaaatagtgaaaatatactctaaattggaaataggaaacccaaatataataccataaactaaaattaaaaggaatcaaaatttcttttaaatggttaaaatatataccataaattagaaatagagaacccaaatataatactttaaatttatttctaatttattttggatgatagaatttatataaaaattatggtattgttgaaaaaatatattagtaataaacttcatagtaagttaagtagtgctatttttagaagtttatggagtgtgtgctattattgtccataaaacttgttttagtgatatttttaggaatttctcataaagttattagacatggtttaacaaatatagataaaagatcaaagtaggaggaggaggggtgagaaacaggattgaaatggcggatggatgacaaacttctattgagagatcatacatttcaaaagaaaagtgaaagtagtatactagtatttatttcaaatcaaaatagtaaacttacattttatgataaattaaaatacataccaccatctcaacatactagagcaccagagagtatggaagacggggaaaaaggagataaccacggtctccatggtcaacatctccattactatcctgcatctcgaagtatggagtgccatcaatttcatctctaccagcccctattaaacaaaaaaatcaaattaacaatatacaaagataagtttccttttgcttatgttaattattaatctcatgtgagtattcggtatgtgaatcaaatcatcattcttaaaaaaatatgaaatttaatctcgtaaagtgattcatcagttgaaaatacttgtcaagagcatggtgtgagtaatagtcttcttataaacttagggagtttttttataagcatcacattcatcatcagttggtttgtatattccctaccagaaaaaaaaagttaaaatcacaaacaaaaattaatctacaaatatttcttacatctccgctatgatcatgataacttggaaaccagagtacgctgacgatcactagaacctcatctttagccaaatattcaatcacattgtcccatctttccggatttttgttgtcttcataagaaactgtcattgaaatagctttataaactttcaagtcacaaatttactcacaaaccaaaaacaaagagagaaataaacaattctcactaacaacaacaaaaaataaacaattaccacttcaggatcgttttcagactcgatcccaagaaccgtaagagaattttgcgcaacgatttatgcaaaaaagtgagcaaaacgatttatgcaaaaaagttagatattagttgaccaattattacgacgaaaaaacaaaaaaaggttgaccaattaatttagttgatgtgtttatttttctaaccggttcacttatttttcttgacattattaatttttaaaattatttaaatactcgacgaaaaaataataattattatttaaatacttaaaaaaaaaaaactactctggtttatttgtcaaaagttaaatcgtagtaaacgtgaaaagccctttaacaataaacgaatgaaaactttggtaaaccgataataaagaaaaaaagatatttttatcccaatttccctaaatcataaagaaacttagggttcgttatcatcgccatctcgattctcctaaatcataagcgatg

SEQ ID NO: 22910 - DNA, 3003 bp, Unknown
  misc_feature (1)..( 3003): 2750-1469P.txt file - cDNA_ID_2125423; gDNA_ID_1620315; Annot_ID_153150
agcgaatccggcgacgaatatccgccactagtaactctagctcaggtaggttactctctctctcgttttctttctttatctggttttcacttcgtccacttagaagtatgctcatttgataaattggcatttgaccccagttcaggatttaggattctgattatctctcaatacttgattagtttagtgcttaagttattagtttttggtatgcccacttgcgccatgttcgtttctaaagcaatgagattattttcatttaaagatctggaaaaaagaaactaatggagacaacggcaaatgaagatggattttaagggtttttgttcttagtaaaaaaaagttatcttctttttaattttctgagactttaattgctagaaagttataggattgattcagatagtggaatcagacaactttttcttttatgggcgattactcatttttgttctttggtcttctgattgtttagtttcttagcagatgatttagtcttctcttttgtgatccttttttgctttccttggaagtgtaggtaaggatttgtgtccatggcagctttgcaaacgcttcgtgaatggatcggtatccagcagttcccacctgctactcaatctaaattgctcgagatccttgggaagtataaagaagaggttcctttcttgtttctagcttcatctgctttctgtttgtttcttcttgtcttagagagatttaagaaagaaaaaaaactggtgtaggatgtgagctcgctaacggtccttgtaatggggaaaggtggtgttggaaagtcatcaactgtgaattcagttataggcgagaaagctgctgcagttagtactttccaggtgccaagtttaatgctcttctcatggcttgtctttatgactattggctatctttcttttaatttttctcatagaaagtgtgtgattttccctctttatagtctgaaggactgaggcctaccttggtctctcgcacaagatcgggatttacattgaatatcatcgacactcctggtcttattgagggaggatatgtgaatgatcaagccatcaacattataaaacggtatgatgaactgtttccaggtctaaggagttactctcctaatttggggctcatttgtggcatttgtattaatttggattcgtggatgttgaatttgaacagatttctcctcaacatgactatagatgtgctactatacgtagaccgtttggatgtgtaccgggtggatgaccttgataggcaagttgtcggtgctataactgatgcatttggtaaagagatatggaagaagtctgctcttgttctcacccatgctcagttctctccaccagacgggttaaattataaccactttgtctccaaaagatctaatgctcttctaaaagttatccagacaggcgctcaactgaagaaacaggatttgcaggtatagttttttcctccttacataaatgtctgtaacgaccttgatagtagtcaagttaatagactcacttacctctgatcttttattgtagggtttttctattcctgtcattcttgttgagaacagcggaagatgccataagaacgaaagcgatgaaaaggtcagttgattggttttgtccacgttctctttttctcgcgtcttgtagtagttggaccaatcttgaagtcggattttccaaatttgtgacagattcttccatgcgggactagttggattcccaatctgttcaacaaaatcacagagatctcttttaatggcaacaaggcgattcatgttgacaagaaactggtcgaagggccaaacccaaacgaaagaggaaaaaaactgattcctttaatgtttgcattccaagtaagcccctctgaaccattcagtaacaatacagaataaggcttgatcaaaacatcatgcatcatttattcatcttttgatggtttgaaaatgcagtacttgctggtgatgaagccattggttcgagcaatcaagtccgatgtttcgagagagagtaaaccggcgtgggagctgcgagactccggtttagcaagtcgaaggtcttgagttgtggacacgagttttgtttggtttgtttgtctatctgagagattgttctgtagttgaaattgtgatacaactcgagaaatgtggttcacagataattactgtcgcaaagttctctcatcttaattacatcttctttagcctctcgtaaatcgtaattaagagctactctcttggtgaaaatgattagaagagataattccattttgtcattaatggtaaaagtaaccgctgcagttatttttgacgcgatgcaagttttgaaataaaataaaaatttgagttaaagaaaaaaaaaaccgatgtttaaaggaggaatttggcaaacggagaagacggttcagagaagatcgtttactctttcctcaatttcgaacaaagttttcgaattttccaactctctctagtgaatttagggttctgatttcgacattagtgtaaagatttgttttttatccgaggggtgcgattgtgtagtcaaaccagatcaaatgtcggcatcaacggtgtcgatcaccgctaatacggcggcagcgactagacggacgccgattcttgccggagagaaaaaatcaaactttgattaccctcaaagcgaatcgcttgcgaacggtggtgttggggaagccggtggtacgagtagagatctgagccgcggtgaagctacccttgatcgatctcagggacaagatttgggtcctgtgacgagaaggtctgtttccgctgcgacggggactaataccaccgctacgcagcgccggacgcggaaggttgcgactcctaagtctgagaaagcgcggtggaagacagtggtgaggatatttgcgaagcagcttggtgcgcttttgatcattgttgggttaattcaattgacgaggaagatgattctcaaggcttcttctccgtcctctccgatttcttcttatgaaacggagatg

SEQ ID NO: 22911 - DNA, 3000 bp, Unknown
  misc_feature (1)..( 3000): 2750-1469P.txt file - cDNA_ID_2125437; gDNA_ID_1620315; Annot_ID_153154
tctatcaatgattcgattcatatacgttatgaataataagtggtggatctcgtttataatgcaataacttcaaattaagattagcaattcatcgatctctagattctctacacacataattatattcaaattttatacttagtttagacgtataaagaaatggtaagactgtagatggttaaaacttgattgttttatttatcagtacaaatttttttatatatatcttataagttatgttttgatgtatctcgatttatttatcagttaatataagcatgcatctaacattatagataatctatataatcaggtgataaacagagtattttatctatattttgaagtatctatttgcataatcaacattttataatatggcaaaaaaaataataaaaaaaaatcaacatgttatacatgattactgcaaatacatacattcataaataattgtgctaaccattccaaactaaaagcctttacccacatggcatgatccacgacttggataaccatatatttgcgaatgttaataaaacatgtaatatgcataaaactttttttcagttatatcgttcattattataagatcatgaacggtatgttatatgagcctcctggaattaggttatcataacccttcccgaaccatgaacagtccatattgcggctacgaagtatacaagatgtggacaagcctcaaaggatctcttatctctcctacttctcttctattcggacctcaaaaacttaattcatataatttctaatattatcgttaattcatattacgagataacgtattgtatatagagttggtaaatggtaattaattaaggcatgtctcagaacattgaaaagtcaccatggaaatttatcataatatattaaatactatatttataagaaatatgattagtttgatatcatattatatagcgttgaattagaaacactcgtcaatattagattccgttcactcccatgctttgttggggataaatctcaattggaattccgtcgggctctagacttccgctatatttaatctcaattccgttcactcccatggtttatatcattccaacctacatattaattggaatatgttttgataataaattgatgttgcatatatacattgatttatatttatatatcagtgtctcttgcttaaaatgaatagccaatttgacgtccttctcaacgtatgttgacatacatgatcctaaaaaaacaaaatgcgattttgttttcagacatcaaatcaagcacactacagtaaacatcttgttgaaatgctttacatgatcctgattgtttcgtttgcttttgatatccctactgtttttgatattagatgtattggttacatcttgtttattgaagttgaaccaaaataaaagaaagatatattggttacaagtcttcatttacattaattgtttttgtttttgtgtttacgtttagagtttacattagttattatttttcactagtttctctactattattttttatttttgtcaaccactagtttctctatttgaatttattttttcttttgtctatttatagtaatctcaaaaaccataaatacaacagaaacccgaaaaaaacaatgagtgtgttagtaagttttaaactaacaagtgcttgtcaagtggtcaacactcaacagaacaaagatttgcatccactaatcaagacgtttaccaacacgtcgatttcaacaaaataaaaaaaaaataaaaaaaacttagtatcaaggccaaaaaaaaggatatcttgctcatttattttacaaattaggttatctattgaccacttatcaagtgtttttcgtatcaaataacgtcttcacggtatccaacgttaggttaatacgtattgaaggtggccttacctatcaaagtgttcgaatctttgtaggatcgggtccaaacacaaacaatatttgacgctttacaatttacataaaatagagttctatggggtgattagtagtttcctttaatcaaaatcatacatgacgtaaaacattttgctaaaagtataagtgatcatttaactctatatatttaactgatctataacctgtttttttttttcttggtgcaggacttcatcgacaatggatcttgctaaaaccaattccgttcctcgttttagagggattggctcttagacagaattttcagatttaagcgtttaaggtgacgttagactatgtatgaaaaaccaccaataatttacattgtgctcgtcactactttcgttacaaaactcatagaccattataatattgagtgaaagtactataaggaacatacatatatgatttggatcccacctagggaaggatatatactatataataaatatataaataattcattatgatgaatttctcaaacaaaatgtatcattttgtttgacgagtatatgtgtaaaatataaaataaagagaatcttacacgccaaattgtaagattttttataaaaaaaacgaaagaagacaatttctatatttcatcacttctagttctacatatattatatatggatttcaaagcttcattgaaaccagcagaattctacaatcgaatgaatggcttagtgagaaaataatataaaaagagtaatgactactattattaaatcaaatcttattaactttaattataatgatgcatataaacaggaagatcgatcttaaaataaaataaaacgagaaagatactaacatatacacaaagaaacatgagaagcactcgcaatgttaacgatcaaattattcatcttagtgcctcccacgcaaaatatatatttgtgccgcgtaaaatcaagtttaatcattcactttaattaaaaatacaaatcgtcgactcttatatatcctctctacaagagtaaacagataacatcaaaaacatttgatcacacaaaacttcaatatctcacaaacgagaggccggttaggaggaaattacaaaaatg

SEQ ID NO: 22912 - DNA, 3003 bp, Unknown
  misc_feature (1)..( 3003): 2750-1469P.txt file - cDNA_ID_2125451; gDNA_ID_1620315; Annot_ID_153160
tagacagaaaaccaaacttttttatacctagtgatgtagtggttatcatcaacctttaattatgagaaaagtttaaactatcaaacactttaaatattcgttatataagtagaaacttacgagttaattcagttcttgttttttccctccgtgaatccaagttttaaattttaatatatgtcacgtctatatcttctttcattatccaatattgaattttgaagttgatcttttgaatgattcaatatttgatttttcaccaagtatgtatttatatgaaaataaaagtatattcacatatatgagaaaatggaattcatttgatttaattggtggctgatatctggatattagtttactttctatatgaataatgaatatggtgatattgcaaagccagatattgtatggattacaaaaatgataataaaacaagaacaattatctaaatacattgtacatacgatacgtagtagtgtacgttatataaaactatacaagttcatcgactttggtcgagctaacataatctgaatcgtgtttggatttttaacgcatttgactgagagtttccatttgaaaaccgtaaaccggattttagactttcgtaaattcaacattagaattttataactagctagttttaagttctaactgagattaatatgagattaaaatgataatatgatttttaactgagattaaaatgataatatgatttttaattcgccatactgagattaataattagttgtaataataaacaaagagcaaagacaaacaagtcaagactcaagcggcttacacttcacatggccaaccacaaacaatgtaaagaagttcgaagaacacgatttccacgcccttgattgtattacttttgatatttaaaatttagagagtaattaaaactttaaagttatgtagtctttcacggttttacaaaacaaaaatgttaaagagattcaccaaaaaaaaaaaatgttaaagaattgcaaattggtcattatcgatcgagtattggttttaatatttcactaacactgtacacatatcgtcataataacatacactaacatgattggaacgagttagttgtatgtatgatgattaaacaatattctatacattaattattcacctaacgacatcgctttcgtacaagtttgtttaacgactaagcacgttgaatctttaatgaaggtaatcacaacaaatatacattaataatccgcataatgctagcataagaaaaagaaatcttcgcactaccatatatacactaacaagatttacaaataaaactaaatgtcatttggttgcaaaatatgccgtaaataatcaaaggaaattggttattttattattttggcaatatgtagtttgaacaataaaacaattcagctcaaagtaatcaaccgtgaacatattttagctttgacaaaaaaaaaagaacatattttagcaactaaccatttataaattataacgataaacttattcatgttttgcatgtgatagtatcgattttatatacttataaatttaattttatcacacacacaacatgaataaactacataattataaattgaatcttaaagatgtttttgatgtttcgttgacacaaaatatgggtcaataacaatagtacaacacattcttctttaaaaccaaaaaaaaactccttatctcaagattccaacgtcttcgtcatcacatgcattgtgtccaacgctttaatcaaccattgaagtttctcattcatatatcatcctcatacttaagtctttagctagtatatatataataagtcttctcctctatctcacatctcaaagatggccatatctactcttatcttgattgaaaatatataattcttggaatgaaacttctccacttctgtatttagtttcatgttatcttcaacagtgtatggtgaaagaaggatatgtttgaatgatcacaaactacaacatcaatcacttcatacttactcttgtctagtttgaaaagtcattaattcttagtatgaaacttctccacttcttcatttagtttcgtattatcttcaacattgtaatattgtatggtgtaaagaaggattgaatggtcagaaactacaacatcacttaaatctggattcaaaagttaaattaaaaagtatgagctattatcgtaatatgttttttctcataaggactgaaatataattttactaaaccgaggttgattctagacgtgtttagtggggagaaggttttttttttatctgaactatacaaaaagtacgtttttcagcctggacaaatgcttagtgctgatttatcatttatacctaaactcattacaaatgactcagttgacacgtgtgtattgtcgttttgctattttgttcatttttttgaaaaaaataaaaaagtggaatctcgaacctgtgatcatgggaacgtttaattcagcttttaccactgatccatataaacattattgacacaattactggtgtaactctttatatacaaataaaatccatgggattggatttagtaaaacgacacgtctacaagttttagggatttcgtattttgctttcatttcttcttcttcttcttcatacgagagccgaaaacgaataagaagattaattgaggagaaatcgaagatgtctatagcgttagtggagaagattcaagccaaattttgaagaagtctagtagattctgtattgtaagctactaaaatctgcgatggtgaggtaagattctacaaaaccgagtatttttattaagtttttgtttggttgtctacacaaaagctgcgtatttgttttgttttcttcggttgaatctctttgacctcaggcatttcaatcgtcgccggaaaattcatcggagatattaaaattgaatcaagcttcgaattggtcaaccgatctattaatttgactagagaggaacgagctgtatgatatatctgcttccgaattgagtctccatg

SEQ ID NO: 22913 - DNA, 3003 bp, Unknown
  misc_feature (1)..( 3003): 2750-1469P.txt file - cDNA_ID_2125472; gDNA_ID_1620314; Annot_ID_153092
cacttattacctactaaactaaatatgggaagtagagtccttgaaatccaataaagtgttttcttccatgtataaaatagggtatatatgtacagtttatagcgattacagaatgtaggtaaagaggaaatcattatagaaaacccaacaacttcatcaaatccatctataaattataatttcagaaatttaaacattaattttgtttcattagcaaaattatacacatttgtttagacaacgttgcaaaggtttctccaatctgatagaacttcttaaaacttgatgaaactgtggttaaaaaaatactaatactcaaatgcttatataccacaccggttagtccaacctctcgtcaaacattaagcatctaaacaaatattataaactattgaaatgaaagcatatgcatgtcttcagaaaatatagaaaatataaggtgtcatgcacatgtaattaaaagtagtgtatatataggatcgttttaaatacaggtacgatccaaaatactacaattttggcttggtttgagcttcgttaccatctttatcggcatttatagtgtcctacacttgtagcatcattacaatacttatttttgtatctcaattctcaacctctatccttaaactacaacttaatttaacttaacaattcatgcaaataaatttacggaagaaaagtgtaattgagtcattaattgaatcacaactacttccatgaaaccttaaatgcctaacccaactacacactgcacatctctataaaacacagcctttagttctttctttaccactctccacactacactctagtctcacacaaaaagaaaaacaatagctaatttaatatcttcttgtgatcatcacaataccacattgatccaaggccagttaaaatctctttcaccatgaagataaagattatgagcaaaacacatgtgaaaccaacaaaaccagtactagggaagaaacaattccacctcaccacatttgatcttccttaccttgctttctactacaaccagaagtttctactctacaagttccagaaccttctagatctcgaggaacccacattccaaaacgaggtcgtggagaatctcaaagatggtttgggtttggttcttgaagacttctatcaactcgccggtaagctggccaaggacgatgaaggagtcttccgtgttgagtacgacgctgaagactcagagatcaacggcgtagagttctccgtcgctcatgctgctgacgtaaccgtcgatgatctaacggctgaggacgggacggctaagttcaaggagttggttccttacaatgggatcttgaacttggaaggacttagcagaccactccttgctgtccaggtatgatgacttcttttaatgtttatatattttatacatattacactaatcccatgtcagtatctttgtcgtccaacttgtttattttcacgtataataatatagaattagattttcaatcggcgtgacgaaagaaaatatatacaactagataaccactactgattttacgtatctgaattatcacacaaatatctgattatgtaatcatttctatgtggttatgtttactgaatcttgatgcatgttatgtaataaatatatattgaactactacccgtcaataaatattaccatttcaagagaaacatcacgtaacatccaaaactctattagtattagctataaagaaaaaataaaatgaattacaaaataataaaataacgcataaaccagtatatgaagtacaagtgtatctttccagcaagaaaaaggaacgcagttcacgtacttcagaaaatgctgacattaactttgatcaaaacagagttaaaaatgggaaaaatattgacatctcctaactactgaagagtgcatattaaatcacaaaacactatacacgacttaaatggtaacaaaaaatcaggttgacatgcattttatacaaaagtttcttgttaccaataaaatttgttattttagaagcttgacatgcatactttatgcttatgaatatattacacatgcacgtattataccatgaccatacacatatgtataagatatatgtgtatgttcattttcatctctacagtaattgtagtcaatgatttgagaaactcggttttcgaatccctttttttttactgttttttttttttattgtgtaattttttgtaagagaaaaataaattaactgacacaaccataaatacaacattcaatgactgaccaataacatgctacggatacaaactatgagtaaatagcaaacaccacgtatgcatgtacaaaataagtagatagattaaatttgtatatatcactcaacaaatagtacacattagagaatttaatagtcattatcaatcaatcctatacaaatataaatatcagctttagcgccaactaaatcatatgagtttcatcatcatttttttttatcatcgacccacgttgactacttgactataacagtataaaaatattgttttcacaccaaaaaaaactaatagaaatattgtacaagaaaataacaacgtcgtgtaatattgagattcgtggggataaacactttcacctaaatagctgttcaaaaataaaataacttaaacactttcaacgtcgtatatttgattgattgtattcatacgtattaaaacgtgtatatattgcatacgtaacttcattcattatacaaactttcattttcgtcggatatggtcatttaaattctcaacggcattaatgtgcattgaatgtaatggctttagaatataggtgtagtcgttgggagagtcattgtctatgttggtctcgaaactatcgtccaaatcaaacactccaaaccattaacatgaaaaaaaaagcattacactaaaatttaaaagaaaaataaaaacattttcacaagtattaattaaccaacatttttcgtttcgcaacaggtgaccaagctaaaagatgggcttgcaatg

SEQ ID NO: 22914 - DNA, 3003 bp, Unknown
  misc_feature (1)..( 3003): 2750-1469P.txt file - cDNA_ID_2125476; gDNA_ID_1620314; Annot_ID_153093
acttgattcaagcgatcttcaccggaacagcggcggggctactagcagcgcacggaccggagttcggagcttcggtgatccagaaagcaatcgcggcacacgacgcgagtgtgatcgacgcacgtaacgacgagtgggagaaatcgccgaagatttttcaattcaaagacgccggagtgaattgtgttgcggtgggaagctcaccgaggtttcgtgtttacgaggtggatttcgggtttggaaaaccggaaacggttaggagcgggtcgaataaccggtttaatgggatgatgtatttgtaccaaggtaaagcaggaggcataagtattgatgtggagataactcttgaagcttctgttatggagaagcttgtgaagagcaaagagtttttacttagtgaggaggaagaagaagatgatggaaagaagctcaccaatggtaatggccatgtcaatggtaatggtaatggctatgtcaatggaaatggcaatgggtttgtttgagtgtttgtttagtttaaggttaattagataattaatcaaactacatattttggttaattagctaattaatttgattaaggagaaaaaccttatggctttttaagtatggtaataatgtgctcgtggttgataataagcgtgtgtgggttatttgtatgattatgtagtgtgtttggtttggaattgtaatatttggaccatggttttttagtacttatgttgtttaaagtttcatgtactgttgtcaataaaaaagaaaaattagttaatgcaattgttatcaaatctgttttaactttcaagtgaacggtgtaacataatttgttatttaatttgctaatctctaaaacccaatcactatctatcttcaatggtgattaccaaagctaaaccactctggtgtaaggttaaacagtacacaactttggtttacaaactcaaattgatgattttttttttgttaataagaatttcctaaaaataattaaatctaaaaccctaaagacaatcagtcttatgttctgccgtcgttcattgtcttcatcatctccgttaaaaacagagcattttcagattgatcgacccactctttctcctttctctccataaatctcatcatgttttcattaatactccatggtggaagaaggtcacgcgagttacatcaatggcggaatctgaatcttcttctccaaaactcctctgctttcactgaatcgttctcttccgttgttactactactaaagatctaagtcttgaagatgaacgaaagaggaaaactttcacagtctcttaccttattgattcattagggttaactacaaaactcgctgaatcaatctcaatgaaagctaacttcgatgaaaaaggtaatccagattcagtgcttaaactcttaagaagctatggattcaaagattctcaaatctcaagtattatttccacttacccacgatttctcattgagaatcctgagaaaactcttcgtgctaaacttcatttcttgaagcttaacggagcttcaagctctgagcttacagagattgtttcaaaagttcctaagatcttgggaaagagaggagggaaatggattagtcattactatgattatgtcaaagagattttgcaagatcaagattctagttcttcttcttccaagagaaagcagacgaatcgaaatcgaaatgtatcggttttgagaaaattaggagtaccacagagactgttattgaacttgttgatctctagagctaaaccagtttgtggtaaagaaagatttgaagaatcggttaagaagattgttgagatgggttttgatccgaaaagtccaaagtttgttaatgctttgtatgttttctatgagcttagtgataagactatagaggagaaagtgaatgcttatataaggttaggacttagtgttaatgaagtttgggcagttttcaagaaatggcctttctctttgaaatactctgagaagaatataattcaaaagtttgagactttgaaacgtgttggtctaacgaaagaagaggtctgcttagtggttaagaagtaccctgaatgtgtagggacttcagaggagaagatagtgaagtcagttaaaacttttcttgagctaggatttacgaaagacgaggttttgatgatcattaagcgacatcctcagtgcattggattagctgcggattcggtgaagaagaagaccgagtttcttgtgaagacaatgggttggcctttaaaggttgtagcttcgactcctattgtacttggtttcagcttggagaagttcgttttaccgcggtgtaatgtaatcaaagctcttatgtcgaacgggctgatcggtgaaatgcctgcgatatcgtctgttttgacgagtcctaagctgaagtttttgaagctttttgtggagaagcatcaggatgtgttgcctgagttgaactctatcttcaccggagatagcattctaataaataagatagcattgtgaagaaagattgcttattgtaatttgtatcattaaaagtctaatcagtcaccaaaatgtaaaccttttgttgtaaggaaacatttttttaggcaataaaacaaaaaatgagaacagttcaagctgattcaggcaagaaatcagaaaacttgtaacacttaagataaatttggtaacttttggcaattaagggtgtgtttagtatttgtctctaattagtcttctaatttgttttattaaccatttttgtatggtcacaaaatctaacaaatcatgagatttcaggtaaaacacttgtcatattcgatacatcacaacaactaatcttattttttatttctcatttttgtatataataataattgtaaggtccagaaatagataagaagacagagaaggttaaccactccatatctacactcttttcttaccccaccaaaccaaattgtcatctctcattttcttattcaagcttcgaaacaactcttgaaactccaaaaacttttccaatg

SEQ ID NO: 22915 - DNA, 3000 bp, Unknown
  misc_feature (1)..( 3000): 2750-1469P.txt file - cDNA_ID_2125479; gDNA_ID_1620314; Annot_ID_153094
gaaaagctcagagacagaaggatactcacagcggcttggacgaaaagtgaaggcttctccagaggggctaattgttcatcgataattcgatatataaaatgaaaccctagttgttgagacagggtccttattattgggcttatctttataaatgggcctggtctttaattaattggagacgacccaataaagtttcgaatacttgcgttttctcaatctctcgtataaacgacatcgttttggaatataaaatataggtatttttttttctttcacaaagtctgtttttgagtttttgattcggttattttagtttctgcaggataggaatatgcacattgtaatgtataatataacaataattggccataattcatataccggaattggctatctatcgaatcaagttgcaatatttatactcactagctactatatcaaataagaaagtctttaaaaattgaatactcaaaatgtagtagtaaaatgtatcaaagccaacttactcaagtactagttgtaattggtttaagagctttaatatgggagcaacggaaaatgtaactgtcattggttgacttgacttattatcgttgctaaaaaagtaaaccttcttcacgaccgacgtgcgatgttctaaattacaaatcaagaaaagtaattagtatgaagcggccacatattagatgaatatatagtttggagccaacatgtaactaattataattttgttaatcaaatgaacaaaaatatgtttatttcccaaaataagaatcggtaaaagggaatctttctttcctggccattttagtatgcacccattaggccatgaccccatatgtattaaaacatttaaatacattgttgcgagcaaaaaatacttggtagtataattctataaataccattaacttgtaaacatacactaatttatcaacatcaagacaaaacattacaaaaagccatgtctcgtgtcctcctctttctcttcatcttttctttatcggttttggttggatcaatcaatggtaacaatcttattatatcaaaccagttccttccaatctcagcaattcatatacaaaatataaatgccaagatatctacatttttgatataacaagaaaattttcaggacggtcatgtggatcatcgacgcccacttcagaggatatgtacaaaaagcagatggaaaggtccgaggaatcagcacgtgaaatgggaaggattggtttggagtgtgaacccgaagggtacacaggtggttcaggcaacacgaactctgttggtgatatgattctcggcttcttcattcttttctttattgttggtgcccccattatgatctgtctcgcgtgtgttcggagacaacaggctataaacgcagccaatctcaataacgtttccggttagtaatatgtaaataagaaataaataatttgttatggtaacgattaggaaataagtatataaagataatctttattgtaataggtcaagtggtaggagctcatggaactgatctcaagtcttatcctcagacagggaccgtccaaaagggagatcccaattaccaagtttgatccatcacttttcacaagtatggataatggttatttttcggttgtcttgccaattaatgtatgtgttttcaattacatatgcgtgatacgtaactttttttgtttgggttggattgtatctcctcaatctattttgagagcgaaaaaacatttgttagcattgctttcggagatgttttattttggtctcacaaaccaaaaaaaaaaaaactgcaaaaccctaatgttttacatactcgaaattgaaaattgtttaccattatttgatttccctggagaaaacaatccgtttaatcatttcaaggcgatatcaacactaagcaacgacgccaacaaagatatatatggtcggttaattaactcaaaagtaggaagaaaaaaaattctacaagcttagtaatagctattacagtattcacagagaagctcgagatggaaaaattgttgattcaacgtaatcaacacacacaaagctcgtagtcgataaacggaaaaagatggattcatctacaacgacgtagatttttttttttatcacaacggcaaagtatgtatgagtatatcattttagaaattatcaatctgttagaaacggtactaaaaataatacttttattctacatatcgttctcttcccgtttctaccaatgaaaagactcttattactttgtcatctgatccacatactacgcaaagagaccagagaacatagttgatgatggcgttggcgtccgctcgtgctcctttggattagataattgtatactttactttagccttattactttagccttattgtaattttgttttttactctcctttttttccaagattactctactttaggtgttgtttctgtaattccttcattttcatttctaatgatatttacaagcttagcaaaaaaaaaaaaaaaaaaaagaaaagaaaaggaaaacatagttgatgatacattgattgatagagagaaaatgctactcacgattacattaactcctactaattaataagagggtttcttaattattgggcttcacaataaagatgggccaatctcaaataaacggagccgagaaactttcttcctcctgtaaaacggtgcgtttaacttaatactaaacgacactgttttgtatgcaggcttcttagatacgccgaggtaggacacgttttgagtcatcatcgaaaggagccagacttcgagattttgaatttttttacttaacggctcactcactttcatctctctctctttatctcccaaatctgacactactacattcaaacattaagagaaaggaaacaaaatcttcaaattcaaacgtttttttccctttccaagagagattccttgtgtttctattcgatctagggagaaaaaaatctaggaattttgagaattatggagacaaagatg

SEQ ID NO: 22916 - DNA, 3000 bp, Unknown
  misc_feature (1)..( 3000): 2750-1469P.txt file - cDNA_ID_2125490; gDNA_ID_1620314; Annot_ID_153097
tttatgtggttatcttgagtgacctagaagctacatttagaagtctcacaatacatttctgggtaatttgtttagtttttcacagtcccacaatatgtgtctgtttcaattagacctctggctaccgttgttgattgctcttctttccactacatagtggtctgcaactgaccttttacatttctgactactcttgcagttattggttctcacgggcctgcatataaagatatattgattgatggatttgttcccccatccagcagcgtagctccaatgttcccatattatgataacacatctgaatgggacgactttggggagattattaatccagatgactatgtgatcaaggatgaagacatggaccgaggagcaatgcatgtacgttccttgaattctggtcttggtcttggtctttcttagctcttgttatatttgcaaattagacctcttaatttccatgatgtttgcatagtggtggttccttttacgatttttgtatcaagaagaacaaagatgtaagaaatctgcatgatatgctctgaggatttgggatacagataggaaatcttttgccataaagttgcttaggctcttgatttggtatgagtgcagttcttcaaatgagtgcactggttctacagttccatctttatattttccttaacaactgattgcttactagtaaaggtttagggtcattctatgtagagtcttgtgttgcttattaaatttgtgatataattttccatttcagaacggaggtgatgtggacggaaggcttgatgaggcaactgctagtctcatgcttgatacaagaccttcgaaagtcatgtccaatgagctcattgtaagtagactctaattatatccaaagaacaatacattgatagagattttgtctcagttaatgtcctcatttgttctccctttctagaatctctgattattgttatagactgcttatcaatgataggcacaaggagtagtcttctcacttagaaatagagagataggaattctcattgacatggcgttgtgcctgtcaaatttatcttcatctgatgatatgcatacaagaaatttattaattgatcttctaattagttatcacgggagaccttgctaatcagatctttagcacgataattcaacttacagatattttgttgtttggattaatcggtctaattttcttcttgttattgaacaacttttgtgttcttacttttacccacttgatcttatgtcatgtagaagtttcagaaggttattctcagaacgtaggccttgcctgctaaacaaaacaatatggctctttagtcttcttctgtctatacctaactgctgtctaatttccctgataaatgatttagtttgttcttatgcttttgcacaggtgactgttagttgttcacttgttaaaatggactatgaaggtcggtcagatggccgctcaatcaagtcaatgattgcgcatgtttctcctttaaaacttgtacgtttctctctcgtcttatatatatatagtgttaagcactgaactggaaacttgcggtgatctaatactatatatcatgtgaaggttttggtgcacgcgatagctgaggctacagagcatttgaagcaacactgcttgaacaacatctgtccacacgtgtatgctcctcaaatagaggaaacggtcgatgtgacttctgatttatgtgcttacaaggtagaaattacttagaattaggaagatcctttttaactcatgggttttgagttgtgtgattgaattaaccctgtatggtgatacatcaggtccaactttctgaaaagctgatgagcaatgtgatcttcaagaaggtaccttttatttccgtgactatttttttcttcttttccgatttgcaaccaatgtctctgaagaatgatgaaataatatcagctgggagattcagaagtagcttgggtggattccgaagtagggaagacagagagggacatgaggtctctactaccgatgccaggtgctgcttcgccacacaaacctgttctagtaggtgatctgaaaatcgcagacttcaagcagtttctgtcgagcaagggtgttcaggtagaatttgcaggtggaggagctttacgttgtggtgaatatgtcactctacgaaaggttggaccgacgggtcaaaaggtaattcaaagcaaatactgcatttcttacaacaaatcagagaatgacttatatatgttggggattgttcagggaggagcatcgggtccacagcaaattctgatagaaggaccgttgtgtgaagactattacaaaatcagggattatctctattctcagttctacctcctctgagcatgatatagaaaaaaaatgaagcttcttctcattttctcaacatttttcaaccactcaacatgtaatctcgtatagtttattgccttgcttataaccctcaaatcttatagattaatgtgttaaaaatggcaatagctttttgtaacttttttgtacttgtcatcttagtagaagcttaagttgtcattggatatattccactcctatttcggtaaagcggtaaactaaaacagtaaaacgtgataaactctcttctttgttccttgtatgttctctcaaaagtttaaaatgaaagcgaaaacactttccattcaagagctttcaacacctggtcttggcttcgtgctgacgtggcatctagcttttttttttcacttgtgaattaaaccaaccatatgtgttaaacatggaaagataaataaaagcaattaggtggttaggtgtgttagtgtgaggctgatcactgtccaacgctctccctttgtgcaatattctgtaacgaaaccaaccaaaaacacagaatacatttgatacaattactttaattccaattaaaccctaatcctcctctaccattcttctactgacgattctcttcatattttcttatcctctcttactctctctacaatcaaaccatg

SEQ ID NO: 22917 - DNA, 3000 bp, Unknown; identical to SEQ ID NO: 756
  misc_feature (1)..( 3000): 2750-1469P.txt file - cDNA_ID_2125576; gDNA_ID_1620316; Annot_ID_153174

SEQ ID NO: 22918 - DNA, 3003 bp, Unknown
  misc_feature (1)..( 3003): 2750-1469P.txt file - cDNA_ID_2125580; gDNA_ID_1620316; Annot_ID_153175
tcagatttcgtcgtgagtcatttctgtttcaggatatcaaactctggggtggaattgcaatttctcactgcttgcgtgagctacgtatcgactttttttctcactatgccaatccatatgttatattgcccagaagcttgtatacctgcaaatctctggtgaccttgaaactcctaggcttgggtattcgtgtggatgttcctcgagatgtttgtctcccttctttaaaaactttgctacttcaatgtgtggcatactcagaagaagatcctcttcgactgcttctttcctgttgccctgttcttgaagatctggttattgaactagatgatgcaaaccaaaatgtgaaagcgctagttgttattgtcccaactttgcagtgtctatccttgaagatacctgcttcatgttctgatgaacggtatttgattgttaccccttctttgaagtatttcaaagttgaggatgacagagaaattttcaatgctttgattgagaatatgccagagctggaagaagcggatatctatgttacgcaacatattgagacgcttctcgaatcagttacatctgtcaaacgacttacactacgccaattgtacaacagcatagatgaggtaatttgtttctgtctatcaactttaagctctcaatcgtctgttacaacttatgacactgttacatgtgatttgtgcagtataagtgtcgtgctggtattgtcttcaaacagcttgaacaactggagctatccatatgcagtgataattggacaaagttagttatatggttgctccaaaattctcccaatctgcgagttctcaatcttgacgctgatgtaagtctcttcattgactatttttgctaaaagctttctatggtgtaatcttgagtctgagtctctctgtctctctctcacccccacgcagagtgattatgaacgttatgaggagtatgaacaggataactggaagaatatacaaagatctgttcctaaatgtttgaagagcagtctcaaaactttggagtttgcagggtacacggcaaggccagaagagagggatttcttgagttttatcttcaaaaaagctcgttgcttgaagacttcatcaatctcgcattgaccacaacataagaaacttgagagctatcgcattttattctgaatcttgttttccaaagacaatttggttttaaactgaatatggaacttgcttaagaacgaaactagtgtagattattaatcttatcatgtggttagtgacttagttctatgatctggttatatgtgtgtgtgtgtgtgtcgcagtcttatgtttgtttaaaatatttcaaataaatccgaaatacaatttagttgaaacagaagcatacaagaaacatgaaattttgtaaattcgtgatgttttcttgtagtcaacttacatcctcaaaaagtcaacattttcaaagttataaatacattatacatttgtttacaaatagccattctcttacaattataacactctcatgacatacaagtgtatcaatatggcaaacaagaaaaaaaaatcataagaaacacaaaatcacttcttgttttctccttcaaataattgggacgtaccatttttattttatttttacttcatgtagtttagatatatacggtgcagatttgaaggataaaaaaatataaatatatgatttaatcaaataagcagcaacaaacaggaccggtgggtttgtcgaagaggcagtggccgtccatggctgcagcgtcggtgctcctgtgacaatgcttgtcgcagtcgccgtcgttgttgcacgttcctcttaagcggcatggtccgtccattacgtctttctctgtttttatgtaaatttaacacacatgcatgtatattattaggtcaaaaaaatatgacatatgccacaaaacacaagttttggatttaaaagtatttgttattttgaaggggtggaagataagtacctacggaatttgcagtaatactaataacgagagagaagacgacgagaagagcaacaagttgaaatcttgatgaagccatttttcagattatttttatcttttgtattgcaagatattcaactttaaatttgtgtttgaaaaattatgatctatgttggggggttttatacgtgaattttagttttaaagatagtaattttgttttgttttaaatagtagaccagttttagtcaaggtaatttatggttaatatagcaatacaagtaaataaatctcctcaaattagaattagccatcgtttcttacttctaaatttggtgaggatatgaaagaatgaacggtagaggagtggctttgattacttgaaaattacttaaaaagtcaatgcaaacacaaagtcttaggtttaattataaatattaaacattgatattttttaccaaattttaagcatcttaaatattaaacataaaacataatatgtccaagatcatttaagtctcaaaaaattatgcacacattatcaaacaaacaccaaagaaaacaaaaatcttattaactttctttggagagtcgctgtcaaaattaaatcttatacatattcgaaattttataaatattgaaagtaaaaaatggtctggtagttttgtttttgttttttgttttttgtcaattaattttgcgtaaaaaatctatacaattttaatgtggtataagtataatagaatctaataaacttttcaaaagaaatataaccaatccaaataaagtgcaatgcgatccgaaataaatgaattaagaattttactatttgaaagaaagttgttaagaatctagatattgaaagaaatattcaatagttaccatgattgaacaacttgggcttattataataatgggcctgatacattatcaatccgagagagtcaagcctcgtgagtggttaaagctctcttcatcggaaaattccagattgggaaacaccaaaacaaatcaccggcgatcggaaaccggcgacgtaagctatg

SEQ ID NO: 22919 - DNA, 3000 bp, Unknown; identical to SEQ ID NO: 751
  misc_feature (1)..( 3000): 2750-1469P.txt file - cDNA_ID_2125611; gDNA_ID_1620316; Annot_ID_153187

SEQ ID NO: 22920 - DNA, 3000 bp, Unknown; identical to SEQ ID NO: 747
  misc_feature (1)..( 3000): 2750-1469P.txt file - cDNA_ID_2125615; gDNA_ID_1620316; Annot_ID_153189

SEQ ID NO: 22921 - DNA, 3000 bp, Unknown; identical to SEQ ID NO: 748
  misc_feature (1)..( 3000): 2750-1469P.txt file - cDNA_ID_2125627; gDNA_ID_1620316; Annot_ID_153192

SEQ ID NO: 22922 - DNA, 3003 bp, Unknown
  misc_feature (1)..( 3003): 2750-1469P.txt file - cDNA_ID_2125685; gDNA_ID_1620318; Annot_ID_153232
atatttaaaatgtacttcccaaataatatagtaggataatatgtctttgacactactccaaaattaagaaacatatttctaaacaataaaatcataagttttagttaacttaaatttagataatgcgtccctaccactagttataagataagcaatacaatgcttaggttgacaaagaaaatgttatgcttatgatttttctagacaaaaaattgttgggcttaggtcgaccaaagaaaaaaaaaattgggcttcttattttcatgtagaacgaaaaaatagaggagggtggttatggttattgatattgtgaagaagatgaaagtaataagacaagtataagaaacacagacgatttttaaggagataaggaagagaaggtgtgtgaaggggaaaaagggttttgatgaaaggttcgttgtggattatatagaaaccaaatctgaagcatccaagatttgcaaaaacataaaatgaaggagtgcggtggcggattctcgaagcccatcatcggagccgtgtcagattgttgagttgttgctagctctggtttttaggtttaagtgtgtttctgatttagataggtttgaagaagtggttaattctgttggaatgttagctctgttccaacttacgtgagattttgtctagccttagaagcgagtgtaaatacgttcacagtgagcaagagctccagatgaaaccgaataatacttgagatccgatttctgagcaaggcaagaaagtgaaaggatatgaagatgtctgagcaagaagagggagtgagagaagacggtgaggttttgttcactgagcatatgagggaatcaattgatgatgaatgatgtggtggtagtggtgttaatttgtcgttaagtaaatgtttggatcatttacacagaaaaaggctatcatatgatctgaattacgttttaggagagcctgttaagttttgatcttttagggttttagatctaaaattaacagagctctttgatttaacattttggaaattgaatcccatgttaatgtagatgaagaatctacccaagtgtgttgaaatatgtttgtgaatttaaaaactgatttattcatttttggaggaatattgatagttggttttgttacatttgagaacgtagaacaattgtagagcggcgtgtaattgattttgttagtttgtgttgaacttatttattttgagatataacaaagaaatgaaagacgtcaacaacaaattggtcttatagttccggttatttattctattctagaatagattatgttggcttaagaagacatttagacttaagagttatttcctctgttaaaatatatgtccttcattcttccaaacgattaagtgattttaagttttgtttttgaaatgattaaatgactctgagttttgttcttccaaattaaatcaaaaatattaacaacataatctgttcttaagaaactgattagcgaatctcaagaaatacatatttgtaaacaagaagaatttggaacgagaataatatatttataggtttcttaacaacaagaatttggaacgatagattgtttggctaccaacaacataaacaaaaaaacaagcaaacggatatagttccaaaataaataattttatatggtcaaaactactgttgctatataaagcacaaaaactatagaaacccaactcaacaataattatcctgttactttttttgtttttttgctatataaactaagcaaaattttcataagtttgaacactcataaactcatctcttcaaaataatggcaactcaaacaataaaaaagatatacagtgttttgatgattgtagttttatttacgatgatggtttcaaccaacgcgagtacggtggaagtgtgtgttaagcattgtgtcccgaaccaatgcatgaaagtttctcagaaggcaactcttccattatgtgagactgcttgcacaaaactctgcaatgaaaacaaacatgaggaatatgtcgtgcctcggagttactgtgagggattattttggtttctatgtgataattgaaatttaataaatatgcaaagtaatatatatgtattttttatctgtaaaaaaataatctataatgtaaaaatgtacctttaatcaatatactaatttcatgtaattattttatttatactaatcaaattgacacatcaaaatgctgagaagttatctaatcacccaactaataaaaatcttataaatgcaatattgttctcatcatctctccacatcaatatttagatcgttttgtaatctcttgctaaaactaatccaatcggttctctatcgaaccattaagttatgagttttctctttacaattttgtatgaatgactagaatgattgtgaaagaggagagcaatctcgagttatctaaattttgttttgtcacttgttcataacaataacatttttgtgctacgaatgtcaaaatttcaggatttgttaagtattagagaggatgaatttaatagttttttttgtttttgtgttttatttttgggtttttaatagaatttaatagttcatgtattgtttaatacaatgtcaaaattgtgtatatatttaagaaagatattatttaattagtgtacaaatatatatttgtaaacttatggtcaatgatgtaaaaatttcaattagtaattttgaggcttgttttttttttagattcaagccacttctttagtgggcttatcgaaggcccaataccaaatttacgtctcctctctctctctccgatctcaatagatcgctggagttgagagagcttcgggacttcgcgttccttgacgaagaagacgatacttcttctccttccatcacagcttcacgcaaatctttctgcagttacatcttcttaagattctgagttccgacttatttcgtggaaggattttgatatttcaacagtgattttaattttatactggaacttaagcatcacttaatcttccggctaaaatg

SEQ ID NO: 22923 - DNA, 3000 bp, Unknown; identical to SEQ ID NO: 760
  misc_feature (1)..( 3000): 2750-1469P.txt file - cDNA_ID_2125720; gDNA_ID_1620318; Annot_ID_153240

SEQ ID NO: 22924 - DNA, 2025 bp, Unknown; identical to SEQ ID NO: 766
  misc_feature (1)..( 2025): 2750-1469P.txt file - cDNA_ID_2125758; gDNA_ID_1620319; Annot_ID_153255

SEQ ID NO: 22925 - DNA, 3003 bp, Unknown
  misc_feature (1)..( 3003): 2750-1469P.txt file - cDNA_ID_2125764; gDNA_ID_1620319; Annot_ID_153257
aatgttattttctgtctatctggttctttggagaaaatatttttggtttcatcagtaactgtagattcttgatcccttttttttttttttttttaaatgatgattactttgcagataacaaaactcactaaaggtttaaatgcggtaaattcagcatgtgaggaggtaagatttttgtgcagtccatttgcgtttctctttcttggaccattaatcgatctcctcatttcttgttcatcagatacgtacttcacaaaagctaaaagatattatggaaaatattctgtgcctggggaacatattgaaccaaggaactgggaggggtgagtgagtatttctattatttttacccaaatatcttttggctttaagatatttcctaacgcaacataataaaatctgtgtgttgttcaatgtgagctaagaaaagaatggcgcctttgtttcattgcatcatatatacttttgttttgtctgaacgtaaattctttgtggttgataaagacccttgttcttttttctgaaggcagggcagtgggattcaggttggatagtttattgatattaagcgagacacgtgctgataacagcaagatgactctcatgcattatctttgcaaggtaaaatacaatgcgaaagaaagaaacatgcagcgtctttgctttagaaatcatgaaaccctcctctttgcttttcccaggtccttgcttccaaggcatcagatctactggacttccataaagatcttgaaagtcttgaatcagcttcaaaggttttcctttctacttactttttccgtcctgctgtaattggctcatcatttgattgtcctgtctattgcagatacagttgaagtctttggctgaggaaatacaagctataaccaaaggattggaaaaactgaagcaggagcttaccgcatccgaaactgatggtcctgtttctcaagttttccgtaaagtatgttgctgtttttctatcttctccatcttttgcatatcttttatcaatcatgattcatgaatttgagattaggtcctgactgtgccacataactaaatcttccatcaataccagctgctaaaatctagttttaatgttttttcaacagttattgaaggagttcatatccaatgctgagactcaagtagcaactgtgatggctctttactaccccgcggtaatttttgtcaacctctactagattccaagcgccttacctttgacaatgtgtttggtcctgaatttgccattttttcttgaatcaatctaattatgatggacgacagagaggaaatgctgaggcacttgcacactattttggctaccattatccatttgaacaaggtatgcctcggaaacaataaacttcatcctcatttattctaataccatagaaagtggctcattgctaataacatacatggtgatcgattgctgcagttaccgcgacactcttgagttttataaggttgtttaagaaagcacatgaagagaatgtcaagcaagcggagttggagaagaagaaagctgcaaaggaggcggaaatggagaagacgaagtaacgagtcagtgtcactaagaaaaagagcaagcggagttggagaagaagaaagctgccttatataactgaccatagtgtggtaactcagatgttcttttgtgttgaaataaacaagtgatgtatatactttcactgcttggttttgttaaaatgtgtgtggttgagaaaaaaaaacagttgaaatttgcattcaattaaaatatttgatactaattcgaacttgggactctgaacagaagaagaagtcctcctcccaagtcaactgatattttatgtgtgggccgatctacaatttcttttattttcgtaaaatggcccatttaaaggccttcaagactgaaccggttcgaccggatggtttgtcttaaaaaattgattttaattctttccaataaatgaggatttggtttgctggatctgtaattctccagaaatagtttttttgttcactttttttctatgtaggaaatgataaaaagagaataattttctctgacttgggaaagtaaggatacattaaatgaataaatgtaataagaaaaagacaagaggaggaagaagaagaagaatcagatagagacgaaaaaaggagtaataatctttttttttctttttcttggagttggagtgggtcttttctctcacacaggtctctctcttctcaactcttcccatgttgtttcgcttcttctgtaagatttctgtaagttagttccctcagaaaattctccattctccattttcctgcaatccaatatctttatctccaaagataatggcccagcagatctcagatatatagaagatccctcttcttttggtccactttcccttgtttacattttcccgagaaaacaaaaagaaagcttttttgcttttttttctttcttctctgctttcccagctttcaagcttctgaagtaaaagaacgaagctttgtgttaaaatctcagaattttgattattcttcggattgaaaaaaactgttccttttcctaaaggtagatcctttcactcgttttgatttctgggtttcttcatcggcagattttttgttctgtttctttctttaaatactcatttaaaatctatactttctttcattactatgttcttctaggaatctagctcaaagtttcatcttttgcttccttcttggtctttaatgcttacaatgtcttgttttcttcttctttttttggcaatcaacaatgtcttgttttaaagcttggtttttcttttaaaccacttatgatttttctgcctacaaaatgttgttaatagtctttgagatcttatcttaaatctcatctttttacatttgcatattttgtttgtatagagaagcagatttgatgatgcattgtggggtttacttttttattttattttaatgatattctttcttggtgcagagtgtgaaagtgaatgaagaatg

SEQ ID NO: 22926 - DNA, 3000 bp, Unknown; identical to SEQ ID NO: 777
  misc_feature (1)..( 3000): 2750-1469P.txt file - cDNA_ID_2125768; gDNA_ID_1620319; Annot_ID_153258

SEQ ID NO: 22927 - DNA, 3000 bp, Unknown; identical to SEQ ID NO: 767
  misc_feature (1)..( 3000): 2750-1469P.txt file - cDNA_ID_2125772; gDNA_ID_1620319; Annot_ID_153259

SEQ ID NO: 22928 - DNA, 3003 bp, Unknown
  misc_feature (1)..( 3003): 2750-1469P.txt file - cDNA_ID_2125786; gDNA_ID_1620319; Annot_ID_153263
atggttgattgatcttgaagttttatctgactttttccgccaatctttctctttcggtcgggtttcgggacagcgcgctgctttggcatcgtttaatgggaaaaggggttcttgcggtgcagacagatggaccgccacagctacgggtttacgcacattgttcaaaaggaagagtgagttgctcatatcatcttttatatcgcagtttccaaacgtctttttcggttagagtttgctttaaatgctttggttttttcttggttttaggccggtgtgacattgctactgataaatctaagcaatcaatcggattttacggttagtgtcagcaatggcataaacgtggttttgaatgcggaatcaaggaagaagaagtcattgttggatactttaaaaagaccattttcttggattggaagcaaagcttctgatggatatttgaatagagaagagtatcatctgacaccagaaaacggtgtgttgcgcagcaaaacaatggtcttgaatggtaaatcgttaaaaccgacggcaacaggagatatcccgagccttgaaccggtcctccgtagtgtgaactctccgcttaatgtcttgccattgtcgatgtcgttcattgtgttacctaattttgatgcttctgcttgttcatgatgttaatggggtctctctttgcttattgggaaaaaataaataaaaataaagaatagttgtaatttttttggtaattgtatctaatgctggtgataaatgtatcatttcatatttcaatacaacatgattacaaacctttggttttgtgtctcttcgacttatgagccattgcaagaaagataacaaaagacaagaatcaattcgcagaactgcaagaagtgtctccacaagataaagaagtatcttcactgagtttcttcctctcttcataagcccattccaagccgtgacagtactgaaccggcgggttgaacctactgtcggttatatcatcaggtaagaaagcaccgttccccacaagaaacttgacagcttctcttttccgttctttagctgcagcatggagaggagtccagccacaagcaccagaggttctagcttccatgttggctccacgttcaagaagcaagtccataacttcgatgtgacctcctttggcagcaaggtgaagaggagtcattccttttgatttaggtccacaagctagagcgttcacgtctgctccttggtcaaggagctctttaacagctttgagatcgccttcacgagctttgatgtgaagctgagtccaccccctgtcatctctgtcaacacccgtttccatggaccggcgcctaaatgagttaggccgaaaggacaacgcaaccggctgctcttggagcatcttgcagataaaccagaactgactagaattcacagatgaaagactcaaaggatatttcctaagggaaacttactagacaaggagattctaggagtgactcagatttacataattttggttacaatcttatacaagaatgtctaaagcaggaacactacttgtgggtagaaatcatcaaccaatatcactcagaataagaacttatgggagaggcagattgagatgattcagttggaatggagcaactcaatcaagggaagtgattagcaatgcagtaagggaaagagggattcaaaccagggccaaagacacggagattttgagggatcacaactggagtcatagacagtgaagagaacacgagcatcaactagaaagaggtaggagcttaatggtttctaggaacaaagagaaatcagaaaaagcctggatcaatgggtaaagagagcatcgggccagagtctctatctgcgtgatttttaccagccagatctgccaacaagacaaggatggaaaaaaaaacttagtggattcagataatacaaataagcaaagtgttcattcaaaaaaaaaaaaaaaagcgaagtgctacagaacaagccataaatctctctgcaaagatcgccagaaatattttcagagatcaaaattttaggttaggtaacgaacaataaaaactttagtaacaagtcccaatctttagaatcgaaaactctggcaaatgaacagtatactaagagaattcccaaaataagctgaaattcagaaccacccaaaattcatctaaaaaattctaaagcagcaaagaaactaagataataaaagcttagtgatgaatccaaacaacataaagaccaaatcaatttcacagtaagacgacgacaacgtaatagaattgaatcggggaaagatagaaacctgtaggcgtcgtagcttagcgcggagggagaagaaagagatatggtgaatcaaacacagatttatccttgacggaggatatgaatcaattagtgttttttcgcgggtagagagtgagaatcgtatatcgatttccagatgaagaagaagaagaagaagaagaaaggcgcgtgagtgtgtgtcagagacaaatatcgtttttttttgtttgttactatacttgatccactttaaaatcgaatttgccacctcatattagcttaattaatcaaggcttcttactgttgggcctacaataaaaggcctgaatttggcccagatagattaaaccatatctaatatctttatcaactaatttaatttcaaaaagattttattctattttatcgtacatagtttgcataatatggttagatttcaaattttatatggaagtaactaattttggcagataattggattcataagaatagaataaaatctctatatatttatctatactattaaaagacatcctagaaaatagtataatacaatgtatttcacccattatgcacatcattttgcaatattaccttaaacaaaggctaaaaattacaacaacccccaaaatgataaaacttatataagaatctcatgattgatgctgtaggagaagaagaaaaacaaagaaacagaaccaaagtagagacactcttgttctttatatg

SEQ ID NO: 22929 - DNA, 3003 bp, Unknown; identical to SEQ ID NO: 22928
  misc_feature (1)..( 3003): 2750-1469P.txt file - cDNA_ID_2125786; gDNA_ID_2684233; Annot_ID_192323

SEQ ID NO: 22930 - DNA, 3003 bp, Unknown; identical to SEQ ID NO: 22928
  misc_feature (1)..( 3003): 2750-1469P.txt file - cDNA_ID_2125786; gDNA_ID_2684233; Annot_ID_137650

SEQ ID NO: 22931 - DNA, 3003 bp, Unknown
  misc_feature (1)..( 3003): 2750-1469P.txt file - cDNA_ID_2125790; gDNA_ID_1620319; Annot_ID_153264
aatttgccacctcatattagcttaattaatcaaggcttcttactgttgggcctacaataaaaggcctgaatttggcccagatagattaaaccatatctaatatctttatcaactaatttaatttcaaaaagattttattctattttatcgtacatagtttgcataatatggttagatttcaaattttatatggaagtaactaattttggcagataattggattcataagaatagaataaaatctctatatatttatctatactattaaaagacatcctagaaaatagtataatacaatgtatttcacccattatgcacatcattttgcaatattaccttaaacaaaggctaaaaattacaacaacccccaaaatgataaaacttatataagaatctcatgattgatgctgtaggagaagaagaaaaacaaagaaacagaaccaaagtagagacactcttgttctttatatggattctacttcatcggaagtaaaaatcgtttctcaatgctttgttaaacccaaaaccatccctgaaaaatggaaagagccataccatttatcaccgttggatcttgtgatgctctctatgcattacctccaaaatggtcttctctttctcaaatctgatgatgcaaccaaaacaaaagatttcatggagacttggctacaaaagcttagagattctctagctgaaacccttgtccatttttatccgctcgcgggtcgtctctcgactttaaaaaccgataatccgagatcctactctgtgtttgtggattgtaatgacagtcccggagctggatttatccatgccaaatcggatctaagtgtaagagatattgttggatccaactatgttcctttggttgttcaatctttctttgaccaccataaagccgtgagccatgatggtcacaccatgagtctcttctcagtcaaggtacattaatttattcttgtaatctcaaaatcatataattcacttagcctagaagtttagtctgaacgatagtaatacacatatagtactaggtttacttaacttcttgccatttgatttagagatacatcgaagtattgtgtatctatgtagtcttagttgtttgtatatcacgcaactatgcatgcaataccctaaagagatgaatcttttcaggtaacagaattggtagatggagtgttcattggattttcattgaatcacgctgtgggagatggaggttccttgtggcattttttcaactctttgtcggagattttcaatgcacaagaaaccgataacttgcttctcaagaatcctccagtcctttcacgttggtttcctaaagggtacggtcctgtgtacaaccttcctttcactcactctgatgaattcattagccgattcgaatcaccggtcttgaaggagagaatattccatttctcgtctgaaacaataacatcattgaaatcaaaggctaatgaagaaagcagaacaacaacaatttcttcttttcaagcgttagccgcatttatgtggagatgcattacaagagcaagaaacttaccttatgatcatgaaattcgttgtagccttgccgctaacaatggaacaaaattggatccaccattgtctttgagctatcttggtaattgtctttctgctgtaaagtccaagaccgttacatccggtgagctactagaaaatgatttgggatgggctgctttgaaaatgcatgaagctgtgattggaaacactagtgaagtggtctcggagacaatcaaaaactggttgaaatcatcttatgttttccatttagaaaaacttttgggagcgatggtggttcacattggaagctctccgaggtttaagatgtatgaatgcgagtttgggatgggaaaagcggttgcggttagaagcggttatggcggtaagtttgatgggaagatatcagcatatgcaggaagagaaggaggaggaaccatagatttggaagtatgtcttcttccagagtttatggaagctttggaatcagatcaagaattcatgtccgttgtctcttcttcttcttgatcttattcatataagtttgattgattgtttgtgttgctgttaaagtccaattaatattatgtgacaatgtgttattcaactgataatgactgttatttattaaagattagtacaaactaaaatgtgaggtttagagatgataaagttgatgtctttgtggattactcccactcactctcttgattctacactctacttgtaagaacttagataggaaacctgaaaacagaaccatgaaacagagaaaattgcagagaagtaaatgtgtaagatcaagacttttacgttttcaggtttcagtgtgaaagcgcctactcatgccttgacattgttactcggaatccactattaacaaggtttataatatcaagctctttcttgagcttatacaacaaccatacaagaagtcatctcctcccaaaacacaccctccattcaactactctctgaaccatttgtcccttttgtctcctgatatgttctaacactaagaccagatccaaaacgacacagttctacttttggcaagaatcacgtgacgtccttgtgattgggcttcagaatttgcttgcttcttcttcaaaccctctgtgggaatagtgtttagtgaagttagtagaaacatgcatgtgttatttgattaaagattaatacaaactcctaagactaatgttattcaattagaataaagatcatatatatgatgacatcattgatgatgaccagcatatcaaattgtgcaggaacatacatatagatatgatgacatcattgatgatgatagctatctataatcatattatatgaatatattatttggattgtttatgtaagcgagtataaaccaaagtaacaagataaaagggaagcaaagggaccattgaaagaaacaaaagagtcatattatacacattttttctctttttttttttcttcttgagaaaaatg

SEQ ID NO: 22932 - DNA, 3003 bp, Unknown; identical to SEQ ID NO: 22931
  misc_feature (1)..( 3003): 2750-1469P.txt file - cDNA_ID_2125790; gDNA_ID_2684233; Annot_ID_192324

SEQ ID NO: 22933 - DNA, 3003 bp, Unknown; identical to SEQ ID NO: 22931
  misc_feature (1)..( 3003): 2750-1469P.txt file - cDNA_ID_2125790; gDNA_ID_2684233; Annot_ID_137651

SEQ ID NO: 22934 - DNA, 3003 bp, Unknown
  misc_feature (1)..( 3003): 2750-1469P.txt file - cDNA_ID_2125794; gDNA_ID_1620319; Annot_ID_153265
ataatatcaagctctttcttgagcttatacaacaaccatacaagaagtcatctcctcccaaaacacaccctccattcaactactctctgaaccatttgtcccttttgtctcctgatatgttctaacactaagaccagatccaaaacgacacagttctacttttggcaagaatcacgtgacgtccttgtgattgggcttcagaatttgcttgcttcttcttcaaaccctctgtgggaatagtgtttagtgaagttagtagaaacatgcatgtgttatttgattaaagattaatacaaactcctaagactaatgttattcaattagaataaagatcatatatatgatgacatcattgatgatgaccagcatatcaaattgtgcaggaacatacatatagatatgatgacatcattgatgatgatagctatctataatcatattatatgaatatattatttggattgtttatgtaagcgagtataaaccaaagtaacaagataaaagggaagcaaagggaccattgaaagaaacaaaagagtcatattatacacattttttctctttttttttttcttcttgagaaaaatggattcctctccatcagaagtaaagattatctcaaaatgcttcgtcaaacccaaaaccatacctgaaaaatggaaagagccataccatttttcaccaatggatcatgtaatactctcaatccattacatccaaaagggtcttctctttctcaaaccatcgttttctgaatctgtcacaccaaaagagttcatggagactttgctgcagaagcttaaagactctctagccatagcacttgtccatttctatccgcttgcaggtcgcatctcgactttgaaaaccaacgactcaagatctcactcggtgtttgtggattgtaataacagtcctgctggatttatccatgctgaatcagatctaagtgtatcagacattcttggttccaaatatgttcctttggttgttcaatctttctttgaccatcacaaagcattgagtcgtgatggtgacaccatgactctcttatcagtcaaggtacatttcttcattcttgctatatcatattattcaaatatgtcagcagatttgtagtaataaaagttaaattgcttttactaatgatttattgtagtagtgttttactgtgtcatagtgaaaaaaagatgctgaatctttttctggttatacaatgtaacaggtaacagaattggtagatggagtgttcataggattgtctatgaatcattcgcttggagatggaagttccttctggcacttcttcaactctttgtccgagattttcaattctcaagaagataacaacaagtttctctgtctgaagaatcctccaatctttcgtgaagtgtccggtcctatgtacagccttcccttcagtgaacctgatgagtccattagtcaatcagaacgtccggttttgaaggagagaatgttccatttctcatcagaaacagtgagatcactaaaatcaaaggcgaatgaagaatgcggaacaacaaagatatcttctttgcagtcgctgactgcattgatatggagaagcattacaagagcaagaaaactaccaaatgatcaagaaactacttgcaggcttgctgctggcaatagatcaagaatgaatccaccattgccgatgaatcactttggaaattacatctctcttgtgatagctactactacaactggtgatctattggagaatgagtttggatgtgctgctttgaaactgcatcaagctgtaaccgaacacactggcgaaaagatctctgccgacatggaccgttggttgaaggctcatttgaaactagatggatttttcagtccaaatattgttcacatgggaagctctccgaggtttaacaagtacggaagcgagtttgggatggggaaagcagtggcggttagaagcggttatggtggtaagtatgacgggaaggtatcagcttatccagggagagaaggaggagcaagcatagatttggaagtatgtctacctccagagtgtatggaagctttggaattagatcaagagtttatgtctcttgtctcttcttcttcttcttcttgatctaatattcttattcatatgtgctcccatcatatctctatctaaactggatttgttagattggagtattttgtgttgctgttaaaactcaatcaatattatgtgacaatgtgttattcaactgataatgattcatgtttatgaaaatattaatacaaactagtatgtgaggtttagagacgataatgttgaaatctttggggatttattctcactcactctcttgatacaacactttattttataacaacttaaaaatgaaacttgaaaacagaaccataaaacagagtaatcgcagagaagttaattagcaagatcgagagttagtaaagctctttcttgagcttatacaacaacaatacaagacttcatctgctcacaaacacagcctcaattcaactcctctctgaaccttttgtcccctttgtttcctaacatgttctagcactagaaaccatatccaaaacgacacggtttactttaaccaagaatcacgtgacgtccttgtgcttatcacatatgagataggcttgggcttcagaatttgcttgcttcttcttctaaccctctgtgtggaaacagtgtttagtgaacttagttgaaatcatgcatctgttatttgatattgatataaattaaactaagattaatgctattcaatatgacatcattgatgatgaccagcagatcaaattatgcaggaacatacatgttcatgtgatgacatcattaatgatgatagctatctataatcatatgaatattttatttggattgttctataaaagagagaataaacgaaagtaagaagataaaagaagaccaaagaaacattgaaagacacaaaagagtcatattatacacattttttttcttcttggaaaaaaatg

SEQ ID NO: 22935 - DNA, 3003 bp, Unknown; identical to SEQ ID NO: 22934
  misc_feature (1)..( 3003): 2750-1469P.txt file - cDNA_ID_2125794; gDNA_ID_2684233; Annot_ID_192325

SEQ ID NO: 22936 - DNA, 3003 bp, Unknown; identical to SEQ ID NO: 22934
  misc_feature (1)..( 3003): 2750-1469P.txt file - cDNA_ID_2125794; gDNA_ID_2684233; Annot_ID_137652

SEQ ID NO: 22937 - DNA, 3000 bp, Unknown; identical to SEQ ID NO: 774
  misc_feature (1)..( 3000): 2750-1469P.txt file - cDNA_ID_2125798; gDNA_ID_1620319; Annot_ID_153266

SEQ ID NO: 22938 - DNA, 3000 bp, Unknown; identical to SEQ ID NO: 774
  misc_feature (1)..( 3000): 2750-1469P.txt file - cDNA_ID_2125798; gDNA_ID_2684233; Annot_ID_192326

SEQ ID NO: 22939 - DNA, 3000 bp, Unknown; identical to SEQ ID NO: 14900
  misc_feature (1)..( 3000): 2750-1469P.txt file - cDNA_ID_2125798; gDNA_ID_2684233; Annot_ID_137653

SEQ ID NO: 22940 - DNA, 3000 bp, Unknown; identical to SEQ ID NO: 770
  misc_feature (1)..( 3000): 2750-1469P.txt file - cDNA_ID_2125806; gDNA_ID_1620319; Annot_ID_153269

SEQ ID NO: 22941 - DNA, 3000 bp, Unknown; identical to SEQ ID NO: 770
  misc_feature (1)..( 3000): 2750-1469P.txt file - cDNA_ID_2125806; gDNA_ID_2684233; Annot_ID_192329

SEQ ID NO: 22942 - DNA, 3000 bp, Unknown; identical to SEQ ID NO: 770
  misc_feature (1)..( 3000): 2750-1469P.txt file - cDNA_ID_2125806; gDNA_ID_2684233; Annot_ID_137657

SEQ ID NO: 22943 - DNA, 3003 bp, Unknown
  misc_feature (1)..( 3003): 2750-1469P.txt file - cDNA_ID_2125817; gDNA_ID_1620319; Annot_ID_153273
gtatttgtaatataagtatatataacaatgttactattcatcttgatattattaacttgatcatatataaattacctaaatgaattaaacaggactacaatgaacaaagggtatgctttcgtgaacttcacaaatgcaaaagcagtgtccaagtttaaggctgcttgcaacaacaagccgtggtgccatttctactcaaaaaaagaacttgagattacttatgctagaattcaggctagttccactcctttacatatatatatacacatctttgatctgtgtatcttatcttattcaatcttattgtaacacttgtcggggaaaacaacaatacttttgtgtagggcaaagatgagctggtgaaacgtttccagcatatgacatatccggaggaggcctacagtgcggtatgtttcagcccagctcgtagcggagggaaagatacagttcaaaccacaatggtcggtaaatgcaatgaaccagtgtgctcggtttagtctttccatatatgtaattaggattatgaataataaaagtgtatgcgatggtgaacatgggtctaggatggaaaagaaaagactcagacaccgaaccaaatccaagtaaaattctgaaatgtttagttttggatttggtttttgatgtgtgtgagttttgacttttcataattagtgttatgtttaagcgtctactactctacctgtttctctgatctatatataattttctatgttgttgaactgttgtctggcgatgtttatatacaaaaatatagctatggttttctctttttttttttttgttaatgattattctgatattcaaaaatttggttgaaagttcttttttttggtgaaaatcaagtcatacttcattccagttatagagaagacaaaaaaatctttctacaatgaggattgtttttgcaccaattaattttttaaaggaagtaagccacgaactcttagcttagaaggtgatcgcatgaaaaactagctaacaacataaaaaaaaaaaaaaatgagttggccaaatatcgccggtggatattattagactacgttttcttgtcaacggtggatattttagatataagactttttggaacgtaccaaaaagtttctcttattcctttgaactcgcattatgttacaaaatataactagagaatcttgcatagaaaggtttgcggttttgtcactattttgtatgtgtactactgtactgtacattgaactgttgtgatcttttcaatcatgtaaaaacctactatagaccttagcctattctggcgttacctttacacattccagtttttattgagccgaaaccatcattgttagtttgggtgacgatagattctgcagtaccttgacacaaatcttcgtttcttggggaatggagcgacaagtgtgacgtagatgtgcatcgtaggctcctacaaataatgaccaaaaaggcctttttccatcaacaattgcttctttttcttttctctctttttttgccacttttttccccactatggtcatgagtcatgaccggcttcacataaacgatgttgaatcaaatagctttttgggcggggactgagtggaattaaagatgatggattcagttagggttttgaggtagttcttggcccataatatggcccaatatatgaattttgacttttttcgaattatcgttgaagttcatctcttaacaataataagcaacaactttatgagataatgaattattgcaatacaatgatgtagaaacggaccaatacagtgtcgtgtttgacgtttaggtgggtttggttataattgtcttatcactggcccacactacaacaacaactctcgtctaaaaccaaaccctctgacatggaaagagagttttgatctacgagccaattgctttggacccgagcctcgtatttgcctccggacccgaacctctgtttggctcctccgctcgccgttgaaaaatttccgcactgatatcgatcactttatctctctcccttctctctctctttctcttcttctcctggtttcgttaattcttgaattcgaaaaccctaaacaacttgttcctagaaattgagcaagcaaaggaaagctttttttcatcttcaggtttccatttgttgtaaagctaaacgtgacacaagtgtgtaagttcacatctctgtttccctctgtggaaaccctaattcttgctatatatcctaaaaagaaatgatttttttttttacccaattattgtaccgtgtcgataggtagtgttattgtttgaggttgaattctcggttactgtaatgttcatgttattattaaccatagcttcgatttgcagtgagattgtgtttgcggcaattttgatctcaagtgtgttctcgagttttccaatcaaattctgtatttttttcgaaattagcttaattttcagctgccataagagtgtttatagctgtgaaatcggaaattttcagctggtttttgtttaatgaagttgatgctgtttactgaaatgagctctccaagtttacttgattaggtgttaagagtttctgatgttgactggaacttaggcgtcagtgtaccctaagttccaatctaaggaaacaatgcttattctgtttccttgtaccatgtgggctctgcatcaattctctagtgtctcactttgctgccctgtggtttttgtttcctctttgcagaaacaacacttgtattggctttcttctgtctagtgtttttgtttcacttgttgtgttcaactctaaattttgcagtatctgttttgtttgtttagcaggagaacctatgagtattcaaagcatgccaattggaggtagctcatgaattctggggaaagaggtgtttatatgttcccttttttcttacacattcggaatttagatcaacgaaggcgcaatgttgaacttgtttctgtgtttttttcaaaggctcagataattacaaataatttagaggagctgaatctatg

SEQ ID NO: 22944 - DNA, 3003 bp, Unknown; identical to SEQ ID NO: 22943
  misc_feature (1)..( 3003): 2750-1469P.txt file - cDNA_ID_2125817; gDNA_ID_2684233; Annot_ID_192332

SEQ ID NO: 22945 - DNA, 3000 bp, Unknown; identical to SEQ ID NO: 7115
  misc_feature (1)..( 3000): 2750-1469P.txt file - cDNA_ID_2126339; gDNA_ID_1621128; Annot_ID_172381

SEQ ID NO: 22946 - DNA, 3003 bp, Unknown
  misc_feature (1)..( 3003): 2750-1469P.txt file - cDNA_ID_2126351; gDNA_ID_1621128; Annot_ID_56405
atatgctcttgtacctatgattgcaaggggtatcatgcttggtgctgaccaacctgttatcctccacatgttggatattcctccagctgctgaagctttgaacggtgttaagatggagttgatcgatgctgctttccctcttcttaaaggtagttaagggttttgttttgctgtggatatttgcattccgtgtcataagttgttttgtataagtgggaaaggagaagatgaatatttgatgtgtattattatcaggtgttgttgctacaactgatgccgttgagggatgtactggagtcaatgttgctgttatggttggtggtttcccgaggaaagaaggtatggagaggaaggatgtgatgtccaagaatgtttccatctacaagtctcaggctgctgccttggagaagcatgccgctcctaactgcaaggtgatacgatctgtttgctttttaagttaaatgaagccactgcatccaatcttctctgttcattggagtgtaacagatgctttgtgttctctattgggttctagtttacgactctcttgctcacacattcgctctcgttttgtcttttttttttcaggttcttgttgtggccaacccggcaaacaccaacgcattgatcctcaaggaatttgcaccatcaatccctgaaaagaacatctcttgtttgacaaggcttgaccacaacagggctttgggacagatctctgagaggttgagcgtgccagtgtctgatgttaagaacgtgatcatctggggaaaccactcatcctcacagtacccagatgtcaaccatgctaaagtgcagacctcgtctggagagaagcctgtccgtgagctcgtcaaggacgatgcatggtatgtataacatgccatagaacttaagaccctttctcttctctggaagcaaaatctagtttcacttaaatatattgctcattctgtaggttggacggagaatttatctctacagttcaacaacgtggagctgcaatcatcaaggcgaggaagttgtctagtgcgctctctgctgctagctctgcttgtgaccacatccgtgactgggtccttggaactccagaggttcataataaaactcttccccgttatttgcagtgctgtttttttgtaacagttaatctaatatgagttctttctttgattcaaattgtcagggtacgttcgtttccatgggagtatactccgatggctcttacagcgttccatcaggacttatctactccttccctgtaacttgtcgcaatggagactggagtattgtccaaggtaaatatgacgcacttacaaactcaaatgctcatcaattatgaaatcctagattctgcagaccctaatgtgtattttgtttggttaggccttccgattgatgaagtatcaaggaagaagatggatttgactgcagaggagctcaaggaagagaaggacttggcgtactcatgcctctcttaaacccttctggagcaaaattttcatctataaggtgtgagatcagttaaagcctttcagggctttgtccgaataagaagtgtgtttgaaagatctccaaacactgttttataacctctttggtctctttgatgagtattgtccctggtctgtttctaaaccaggatatcgtttttttcaatgtgtctgatttggtttacccatgaaaagaagaaaattggcagttgcatggttatcttttgcgattatttttttctgctttagcaattagcccaaaattgatgagctcttcgataatgggtttgtgcaattgtgatttgtgaggaatggtgttattgtgttgcaattgcaaaaagaaatgctactcttgcagattcataccaaaaccaaatcactagattaaactgaaattctaatgtggattattttaattttacttctatttttcttcacccaaatattttataaccaaacaccaagttgacaccaaaatatacatccaaaaaacttagattgcttctattttacgactatccgaaatcgaatcataaaccgtaggcaatggtccattaataaggggtatacgaggattcaaagtttgagagaacttttttatctttacctttttccttttgtaaagtaaaagcagtggattttgattatagattctacttggtaatgactaatgagaatcaagttctcacctttaagccatatagactttagatatttaatggattctacaaaagtgggcatgaccagaatcgagttcatgaaccaccgtcctcggccccaacgttaaaaaacttttttctctagcataagaagataagagtatcttcactgcgctttaggcccactcaacattcaaacaaaattcgatctcttataaaaaaatatctcacaagagaaagttcgtacatgatcccgataaaatcgtagatgagcaaatcaaagatgagatgtcggtaaaaaaaacgctattataagaacacacgccactagttgtggataaagttgtctacttttgtctcgttgtgattattatattgcacaattattaacattcatactctcatatgggtattgtttttggtctccgttagatctcaaatctttaactttgcatacccaaaataggaagaaagaagagtcaagtcactaaaataactttcacagtctttgattcgaagatctttgtcgccgagagatatccactctgatttgagttctggtaaaaagtttccagcttttgatttttgtttctctcaattgaatttctcttgcttgctctgtttaaaaggattaggattaaatcgaatctctctctgttatgtttttttgtagattattttggattttaggactcaaagattacagatttcttatcaatcattctctgttattgttatagaactattctctggaggaggttgaggtctgaaatcatggaacaacttggttagagtgtggaattttagctgatttgatctttgattcatctgtgatcataataactatgaagatg

SEQ ID NO: 22947 - DNA, 3003 bp, Unknown
  misc_feature (1)..( 3003): 2750-1469P.txt file - cDNA_ID_2126351; gDNA_ID_1621128; Annot_ID_172386
aatcggatatgctcttgtacctatgattgcaaggggtatcatgcttggtgctgaccaacctgttatcctccacatgttggatattcctccagctgctgaagctttgaacggtgttaagatggagttgatcgatgctgctttccctcttcttaaaggtagttaagggttttgttttgctgtggatatttgcattccgtgtcataagttgttttgtataagtgggaaaggagaagatgaatatttgatgtgtattattatcaggtgttgttgctacaactgatgccgttgagggatgtactggagtcaatgttgctgttatggttggtggtttcccgaggaaagaaggtatggagaggaaggatgtgatgtccaagaatgtttccatctacaagtctcaggctgctgccttggagaagcatgccgctcctaactgcaaggtgatacgatctgtttgctttttaagttaaatgaagccactgcatccaatcttctctgttcattggagtgtaacagatgctttgtgttctctattgggttctagtttacgactctcttgctcacacattcgctctcgttttgtcttttttttttcaggttcttgttgtggccaacccggcaaacaccaacgcattgatcctcaaggaatttgcaccatcaatccctgaaaagaacatctcttgtttgacaaggcttgaccacaacagggctttgggacagatctctgagaggttgagcgtgccagtgtctgatgttaagaacgtgatcatctggggaaaccactcatcctcacagtacccagatgtcaaccatgctaaagtgcagacctcgtctggagagaagcctgtccgtgagctcgtcaaggacgatgcatggtatgtataacatgccatagaacttaagaccctttctcttctctggaagcaaaatctagtttcacttaaatatattgctcattctgtaggttggacggagaatttatctctacagttcaacaacgtggagctgcaatcatcaaggcgaggaagttgtctagtgcgctctctgctgctagctctgcttgtgaccacatccgtgactgggtccttggaactccagaggttcataataaaactcttccccgttatttgcagtgctgtttttttgtaacagttaatctaatatgagttctttctttgattcaaattgtcagggtacgttcgtttccatgggagtatactccgatggctcttacagcgttccatcaggacttatctactccttccctgtaacttgtcgcaatggagactggagtattgtccaaggtaaatatgacgcacttacaaactcaaatgctcatcaattatgaaatcctagattctgcagaccctaatgtgtattttgtttggttaggccttccgattgatgaagtatcaaggaagaagatggatttgactgcagaggagctcaaggaagagaaggacttggcgtactcatgcctctcttaaacccttctggagcaaaattttcatctataaggtgtgagatcagttaaagcctttcagggctttgtccgaataagaagtgtgtttgaaagatctccaaacactgttttataacctctttggtctctttgatgagtattgtccctggtctgtttctaaaccaggatatcgtttttttcaatgtgtctgatttggtttacccatgaaaagaagaaaattggcagttgcatggttatcttttgcgattatttttttctgctttagcaattagcccaaaattgatgagctcttcgataatgggtttgtgcaattgtgatttgtgaggaatggtgttattgtgttgcaattgcaaaaagaaatgctactcttgcagattcataccaaaaccaaatcactagattaaactgaaattctaatgtggattattttaattttacttctatttttcttcacccaaatattttataaccaaacaccaagttgacaccaaaatatacatccaaaaaacttagattgcttctattttacgactatccgaaatcgaatcataaaccgtaggcaatggtccattaataaggggtatacgaggattcaaagtttgagagaacttttttatctttacctttttccttttgtaaagtaaaagcagtggattttgattatagattctacttggtaatgactaatgagaatcaagttctcacctttaagccatatagactttagatatttaatggattctacaaaagtgggcatgaccagaatcgagttcatgaaccaccgtcctcggccccaacgttaaaaaacttttttctctagcataagaagataagagtatcttcactgcgctttaggcccactcaacattcaaacaaaattcgatctcttataaaaaaatatctcacaagagaaagttcgtacatgatcccgataaaatcgtagatgagcaaatcaaagatgagatgtcggtaaaaaaaacgctattataagaacacacgccactagttgtggataaagttgtctacttttgtctcgttgtgattattatattgcacaattattaacattcatactctcatatgggtattgtttttggtctccgttagatctcaaatctttaactttgcatacccaaaataggaagaaagaagagtcaagtcactaaaataactttcacagtctttgattcgaagatctttgtcgccgagagatatccactctgatttgagttctggtaaaaagtttccagcttttgatttttgtttctctcaattgaatttctcttgcttgctctgtttaaaaggattaggattaaatcgaatctctctctgttatgtttttttgtagattattttggattttaggactcaaagattacagatttcttatcaatcattctctgttattgttatagaactattctctggaggaggttgaggtctgaaatcatggaacaacttggttagagtgtggaattttagctgatttgatctttgattcatctgtgatcataataactatg

SEQ ID NO: 22948 - DNA, 3003 bp, Unknown
  misc_feature (1)..( 3003): 2750-1469P.txt file - cDNA_ID_2126383; gDNA_ID_1621128; Annot_ID_56419
atgacggatgagttccctcacctagacatcatcaatgatctgctggaagacgaacagtgcagcaacatggtgtataacggaagcatattcaatccacaaccgcaagtgttcaacgggcagtactcatcataccatggtgagttattgtctggtggcaggaccaggagtttcggagaggaaggattgcattacatggcacgtggaccatatggtacagacggaatgatgccgagacagtggcaaatgacgaacatggacttgtcgttgccagcaatgaggagcaatggaatggaagatggaacatcatcagcagctaattaccatcacagttactttggtttggacgcttcgaatccaagttttacgtctggtattaatggctacaccgagttcaggccatcgaatggtcattgatcagcaaatggagagaggggatttgtaatgtttttattttttttaaaaaggaaaaaaaatcatgaatatacaatttgtgtaaagagagttgtcttcttgtcatcctctacgtttcaaatggtttttttttttttaaatatagtataagatagttttcgcatagaaaaactcttccctgaaagtccctgaatagtttttataaataaattatactcctctttatctttaatcaaaagaaactgaaatctgtctaatataaaatgtgtgtgtgtgtgtgtttttttgtctaatttatttttttctttctttgtctaatttgattagatcacttctttatttgaatgagtaaaaactagaaaaaaatgtgagccatttaaatctgattcatatcaaaaaattttcgatttaaaaaaaaaaccctcaaaaggtgttgatacggaaaaagaaaagggaaagaagaagagaatggatctagaatcggtgaaaaagtatctggaaggagatgaagacgaaaaggccaaggaaccaatggtggcgaaattaccacacagattcctcgaacgattcgtaaccaatggtcttaaagtggatctcatcgaacctggccgtatcgtctgctccatgaaaatccctcctcatctcctggtaacaaccacatgaacaacaaatccctaatttcgagaaaaaaagaatccctaatgacttttgtgaatttgttgaggaaagaacgcagggaaattcttacacggaggagcaacggcgacgctggtggatttgataggatcagcagtgatctacacagccggagcttcacattccggagtttcagtggagatcaatgtttcataccttgatgctgcttttctcgatgtaacttcctttccttctttcttaaatttattagatgtctttctttgcaaaattgattgacatatatataaaaaaaaacacaggaagagatagagatagaatcaaaggcattgcgtgttggtaaagctgtagcagtagtgagtgtggagctgaggaagaagacgactggtaagattattgctcaaggtcgtcataccaagtactttgctcctcgttccaacctttgatcgttcaaccaacctttcttcttttttacattcaataaacaacatcaaggtgtttttagtctttgtcccatttgcttcttattattattgatactaataaaactacattactatatgtttttctaataatacaaacaaccttactttttctctatatgtgtttacctcgatgttgaactaagctttttttttaatatacagatagatcctgtttaaaaaatttggcttatatatttgttactgtgaatatgatgatcatttcaaggtgatgatgcatttgtaaagtattgatgaggtttgtggtggtaacttattagaattgtttatgtttcactatttttagtttcgcattatgattactttaagttttgatacaaagttggtaccatccaattatttcaatcaagttgttcattcctgccttttcttttactgttttctcacatccaacagatatgtagatcttctgttactacttttgttaatgtatgtgaagcaaaattcaaattaacatagacacatgaattcattaatcaaatttaatcagtgttcatgtatattatcaaactttgtagctcttatttgaaccaaaattcatgtatttttatcatcaaaatactccctttctttcttcttaaacttttatcaaatatatgagccacacgagtatatgacctttgattcaaaagaaaaggggaatagaatactgaacaaaggaaaatgacgcaggtgatgtgatcagttttgtcgaaaaagaatattagttgagatatgttggtttcatacttttgatctttttttgttagtttatgttattactgtatctattagacgatgaattacattatgcatagataaacaattaaatcactagtcattttggcaatcatactttgaaaaaccaccccatccgcaataagtcaagtcatcattaaattaccacatcatgcatgatatcaaatttcatataatattaatatctagtagtagctagtagtactatataataaacattaaataaatcccactagatgcattcttaagagaaatcttccaagaaaaattcagacatattagatgagaaaagaaaaatccaaactagaaatcaatgttgtgttgagttagtgcttaccctcgcagtctcaatctccttcccaaaaagacttttcaaaccaaagaatggtgaaacccttaggaggtaatggtcttcctctctgcatctctctcttcgtttaccagtaaacaaacaacaaaaacgtatttgaaataataaatactattgttttttatttctttttctctctctctctctctcttattgagttttgttgatttctttgctatagaaggaacaagagatgtctctaatgttggttgtaaatcagttgatctcctcctagcttctcttggtggtcttgccgccgctgtagcagctgcttacgccggagaattactccttcgacgccggaaacttgatcaaggtgcttccatg

SEQ ID NO: 22949 - DNA, 3003 bp, Unknown
  misc_feature (1)..( 3003): 2750-1469P.txt file - cDNA_ID_2126383; gDNA_ID_1621128; Annot_ID_172405
cactcctcaatcctataaaaacgctatagtcggtaactctcttggttcatcatcatctagtttcaaccaccacccaagctctcatggagttgtcccgaccacattgccatcatcatcttactcgcaagcaccaacatcatcttatcagtcaagcttcccttacagtcaagatgggctcttgtggacaggaagaagtcccagttctgtaaacatgggcatgtacaacaacacttactcacccgccgttactagcaacagatcgctgaaccacatggacgttcagatagcgcagcaacaagcacaaagcatgatgacggatgagttccctcacctagacatcatcaatgatctgctggaagacgaacagtgcagcaacatggtgtataacggaagcatattcaatccacaaccgcaagtgttcaacgggcagtactcatcataccatggtgagttattgtctggtggcaggaccaggagtttcggagaggaaggattgcattacatggcacgtggaccatatggtacagacggaatgatgccgagacagtggcaaatgacgaacatggacttgtcgttgccagcaatgaggagcaatggaatggaagatggaacatcatcagcagctaattaccatcacagttactttggtttggacgcttcgaatccaagttttacgtctggtattaatggctacaccgagttcaggccatcgaatggtcattgatcagcaaatggagagaggggatttgtaatgtttttattttttttaaaaaggaaaaaaaatcatgaatatacaatttgtgtaaagagagttgtcttcttgtcatcctctacgtttcaaatggtttttttttttttaaatatagtataagatagttttcgcatagaaaaactcttccctgaaagtccctgaatagtttttataaataaattatactcctctttatctttaatcaaaagaaactgaaatctgtctaatataaaatgtgtgtgtgtgtgtgtttttttgtctaatttatttttttctttctttgtctaatttgattagatcacttctttatttgaatgagtaaaaactagaaaaaaatgtgagccatttaaatctgattcatatcaaaaaattttcgatttaaaaaaaaaaccctcaaaaggtgttgatacggaaaaagaaaagggaaagaagaagagaatggatctagaatcggtgaaaaagtatctggaaggagatgaagacgaaaaggccaaggaaccaatggtggcgaaattaccacacagattcctcgaacgattcgtaaccaatggtcttaaagtggatctcatcgaacctggccgtatcgtctgctccatgaaaatccctcctcatctcctggtaacaaccacatgaacaacaaatccctaatttcgagaaaaaaagaatccctaatgacttttgtgaatttgttgaggaaagaacgcagggaaattcttacacggaggagcaacggcgacgctggtggatttgataggatcagcagtgatctacacagccggagcttcacattccggagtttcagtggagatcaatgtttcataccttgatgctgcttttctcgatgtaacttcctttccttctttcttaaatttattagatgtctttctttgcaaaattgattgacatatatataaaaaaaaacacaggaagagatagagatagaatcaaaggcattgcgtgttggtaaagctgtagcagtagtgagtgtggagctgaggaagaagacgactggtaagattattgctcaaggtcgtcataccaagtactttgctcctcgttccaacctttgatcgttcaaccaacctttcttcttttttacattcaataaacaacatcaaggtgtttttagtctttgtcccatttgcttcttattattattgatactaataaaactacattactatatgtttttctaataatacaaacaaccttactttttctctatatgtgtttacctcgatgttgaactaagctttttttttaatatacagatagatcctgtttaaaaaatttggcttatatatttgttactgtgaatatgatgatcatttcaaggtgatgatgcatttgtaaagtattgatgaggtttgtggtggtaacttattagaattgtttatgtttcactatttttagtttcgcattatgattactttaagttttgatacaaagttggtaccatccaattatttcaatcaagttgttcattcctgccttttcttttactgttttctcacatccaacagatatgtagatcttctgttactacttttgttaatgtatgtgaagcaaaattcaaattaacatagacacatgaattcattaatcaaatttaatcagtgttcatgtatattatcaaactttgtagctcttatttgaaccaaaattcatgtatttttatcatcaaaatactccctttctttcttcttaaacttttatcaaatatatgagccacacgagtatatgacctttgattcaaaagaaaaggggaatagaatactgaacaaaggaaaatgacgcaggtgatgtgatcagttttgtcgaaaaagaatattagttgagatatgttggtttcatacttttgatctttttttgttagtttatgttattactgtatctattagacgatgaattacattatgcatagataaacaattaaatcactagtcattttggcaatcatactttgaaaaaccaccccatccgcaataagtcaagtcatcattaaattaccacatcatgcatgatatcaaatttcatataatattaatatctagtagtagctagtagtactatataataaacattaaataaatcccactagatgcattcttaagagaaatcttccaagaaaaattcagacatattagatgagaaaagaaaaatccaaactagaaatcaatgttgtgttgagttagtgcttaccctcgcagtctcaatctccttcccaaaaagacttttcaaaccaaagaatg

SEQ ID NO: 22950 - DNA, 3000 bp, Unknown
  misc_feature (1)..( 3000): 2750-1469P.txt file - cDNA_ID_2126471; gDNA_ID_1620321; Annot_ID_153327
gggattaaacggtttctcattcaacgcataacgaatgtatttccgcaatatctcctccatgttaaactctgtctggattgtagaaaaacaaaattcagcatcctcatgtcaaattctgaactggaaatgattaagagatcaaaccaaaagattagtgacatgttatatatattctcaccttttgttcaagtgccttaagctcagagctatgcactgttccagctttccttaatagctcatctatagatctgcaaagcatagcattctgattcacctgaagagattcaaaaaaccaaaattgaattagtttttttttttttaagtaaggatcacaaaagagagagtggaatcagagaccagtttcttgcgctgagctttaggagaagagaacttctgaacggttttgacgaaagcagtgacgaaagtgacgccggcgtaagctaacggaacggcgagcatccacggcaatttgctacttccaactcgaggaccaggaatcgcctgactcaccgatccagtgaactcgactaggtctaacgccttctcttgaatccacggcatatcttcctctacttcctcttctgtttcctcctccacgctcgaattcttcttcgctgccggtgtcggcgccgtgacagtctccgattttttcttcggcgctgcggcggaaatagagatgtgtttcggtctcaactgacggagagaaggtagtggtgcgaacagtggtgttagagggagaaggaatggttggccattgttttgggttcgagtctggagaaattgagatgaaggaaggagaagagacgtcattgttgaagctcgacgatttgaaaagtcggcttcggatgcggcggggctcaacagtagttagcttgtcggggaactacgacggaaggtgaaggaagaagatataacaatttctatttatttgaaggggtcattaatgggccttttttactcggcccatttattttaactataaacgatcatcaaatggtttttaacaagaagaaaaagtgaattcagcagacagcagacataataacaaatggattaattacccacacaagctagaattttttgttactcccatgttaaatcggattattatcccaaatttagttcacaatataaagtgatttggtcatgctaaatgcatgggtaccaatgcaaggcacatgaacatacactttagaaacttgctaacaaaaacctttacttgaagtgtctgcattaacttcattttcttttcccattttctaaaggtataaggttgagcgcatgattctataactatttttcttcattgataaggcaatagaacagagttattctaaatttgcagtaaatacagaagcttttggaacattcaggtcaataagaagtaaaagaataaaacctagttatacattatcgggccagaactccctaaagaaggctcgttcaaattctttttcctgtaaatgtttttcgtgctccatcatcttccgcattttcttcgaaagtttcttactctgctttgagacttcttcatcctgaaaattttagtaaagaaaagataagtttcgatgcctaacttgaaaacaaatgaaacataaaagctaatggcaacgtgataagccaaaaatcaagtccagcactattgagatatgaagtgtcgctgatgcagactttcaaaaaataaaatcagatgagactctttatcaatgcctgaacacttcttcatcattagctattttcagatttaaaggctatcgcatgtaagggttttaagaaacaagaccttagcctgaggctgagccacttttctcttagctggttgtttagctcccactcctcgtttgttatgttttggctctgcttgtagaggcaccaatataccctgttcagcgattccaagaccagtgccttccttccagccatgcttctttaggagctgaaacccaatgttggacgaatttatagcagccaatgaactgcttgatccagaggactcacccataacgctcgacacctgaacatgttaactcacaattgtcaataaaaacaaaaggaatgcacattcagttctgcttacttcttgtagtctattcaattcacaactagaaacagacccaaaagtttcctaccactgaacagtaaacaaaatgttaataggttaaatgcagcacaaaatagaagagatgcatccagaaatgagttatacctgaaacctattagcagattcaatgacagcccatgaacttgtcgaaaccgaggaatctcccataagaaatcgaaacctaaatacaatgaaccaaccatcagaaatattgttatcatctaaattcagggttcaattaaagccaaacacaagaattcgcttatgttgattatttcctggaataaattagagcaaatttcacaaaccatgagcctgaatcatcaaaatattaagataataatagatagacggaactcaccaaaaacgtgaaactcaagcagtcaccgaacaaaacgagaccaatgaaccctagaatcaccgagacgatctgatgaaaactgagtgaaaatcgcttcaatctcttcctctctctatcgaaccaccgcctttgctaatcgccggcctgtagcagttggatcgtcttacgggaactgagaaaattataaaaagacgcctcttatgtttctaaatgctaattgttcccaatactttataattatttcatattcgacccacatattttacgtttatcgaagtttaggatagtttcataccggaccagaatatttgggcctggaccaagagaggcccataaaatagagagaagcttaacgtcaagaagacgcggagtaatctaaaccaaacagcttatctcgagttcgtcggtctcaggtgggcagtgattataacttcgtctccgtgtctgttcaagctcccattcttgtggccttcacgcttcaggaacaaagaccagtatctctctgaaagactacttctcggaaattttcgtctccatg

SEQ ID NO: 22951 - DNA, 3000 bp, Unknown; identical to SEQ ID NO: 791
  misc_feature (1)..( 3000): 2750-1469P.txt file - cDNA_ID_2126482; gDNA_ID_1620321; Annot_ID_153330

SEQ ID NO: 22952 - DNA, 3003 bp, Unknown
  misc_feature (1)..( 3003): 2750-1469P.txt file - cDNA_ID_2126494; gDNA_ID_1620321; Annot_ID_153335
aagctttgcttataaaagattaagcttcaaaggtgttaaattaaacatacagaaatggagaaagccatctataattgattgaacaagatccaaagaaaagtatgtttcttttagctgttcagaatcataaatactcttctaacttctaaatcaccagatgatctacgtgagagagattcgtgctggactctgcagtgtaagaaaagccgcaagtaagtcaataacgaaggtatagaagattaacaatggtgccagatattctcgagatcacctgttttgtgaggaatgttccttgaggatatattgaactgagcctgatgttgtttattcctctgtgttgtgtattgaagaataacgattagtgttataagttaagttgggacatatttcgacaaactgaataagaatagtttgtggcagatgcttacaaattataaaactagcggaattcatcgtggaaaccataatcatcatcagtgtcatcttcatcgaaaatggcactgtagaagacgtatggatgctcaatcatctctgccaaagtcaaacgtctatctttgtctgaatccgcctggacgattagaaaaagaagagataaatcataaatgtaacatggaacaattcagcagctaaatacaccatttatttggaaagttatgtacctgtgatattatataatcagcttgttgctttgcataataatgctcagtaggatggattttactgataatgggaagcaattcaacgtctgataagtacctgtagataagtggcaattatgttaagggatgtatggtattaatggaaatgctaatcatggtgtgtactcgtatattacgaacccgtcatcatttttgtcaagctgagaaaacaactgctttgctgggccttcaggcaagtcatggtaaggatgcgtagaattgtgattgtcttcttcgtagttccttacagtgtcaaagaggccgtggaaaaactcttcgaaactgatcttcccatctttatctgaatccctttctctgggagagggaaggaggggaatccgttgataaacattaagctaaaagaaaggttcctcggaaataatcatatgacaaccgtacattaccttacttcctccttgcataaccataacagtaactttgggttcttggtgtcagcaggatgcagaaagctaagggaattaaccagcaaaaacattgtgagaaatagaaagaaaaaataactgatagtactaaaaacctgaaatagctcggttgatttctatctacactagaagaaaacgcttactcgttaaactctgttaaattcagaagaccatcaccatttgcatctgatgcattaaaatgctcctccttccaccagcccatatcatagccaaacgaattattatctgttaaatttataaccaagtcagctagcagtcctaagagacaaaagtgagatcatttgcttaaaatcgcaatcaaactgtggtccagaataaggaaaggattattatataggtcataggcagaagagctagaagtgaaacacagattaaagcaaatctacttacaagactgtcatcaaatatttctacatggtcatattaagtagcaaacattttagtcaatgaaactcaaagacgaacaggaaacagcagctcacccgacttacggacccaagacggtggttcatattcagagaaagaaataaaaccatctttgtttctatcatgaacatccaggtctcgttgagttctgtgcacaacttccttggcagaagactgcatagtccactcagtcaattcactctccgtcataaacccatcagcaggagaaacatcaatcttcggaaacaacaatatcagcctgcaaagtaccatagcaatcaaactcattccttacaaaaatgacatctttagtaaatgctaaactaaaatcttcaaagatccaaactttgaaggaaattgaagtacacattgttgcaattagcgctcaaaatcaaagattgggaactgaagatatatataagtataaccaaacctatcagtgacattgaacttctcctcatcatttaagtaatcctcagcatccatgaattcttcccactcaggctgcgactcgtgaccaggtgcatgttcatgtccaccaccggttgtttctttctgagaatgagagacaagctccgggtgagaatgctcaatgtactgtcgctcccactccttatcctcgcggcggcgctccatgtcggcgacaagaggatcaaacggaactggatcgtgacgagtgggtttgaaattgaaagaagaccggagttttaagcggtgatgttgattgtgaccaccatggtggtgatcgtggtcacccttcttcttcggtgaataagagacgaggaagagcaccaggattcctaccgtaatgtataggatcaccgaagctttactcattgggtatttttgtgtaacagaagtagaaaatctcagcttgaaaccctaattttgttggctgaaagttgaggtttttacacttgggaagtgaagaagattagatctgttggaaagatggagtcttgcgaatatatatctatagaagattttgactctagatctgttacgaccaaattagtcaaatggtttgtagtatttaagagagagcccacaacacacatcaatattgtacatttatttctctaaacgcaatttaaatgattaaacgaatttctgctaattttgtcatttcgagaagaattgaaacaaccgttggattcactttcaatcaaagcttaataattgaaaaatctagcagattacactccacgtggtccagtccaccatcttcttcgtttactccttcctacatcgatattatacacacatgcgtgtgtattggatctcacgatttcttatcaatggaactcgcttctctttctcagatccccatccaaatcgttttataggtagattagatagataaactacggatatactcgaactctatccatttacggtattgatttggaaatatg

SEQ ID NO: 22953 - DNA, 3000 bp, Unknown; identical to SEQ ID NO: 790
  misc_feature (1)..( 3000): 2750-1469P.txt file - cDNA_ID_2126506; gDNA_ID_1620321; Annot_ID_153337

SEQ ID NO: 22954 - DNA, 3003 bp, Unknown
  misc_feature (1)..( 3003): 2750-1469P.txt file - cDNA_ID_2126510; gDNA_ID_1620321; Annot_ID_153339
ctgaaagacatatttgttctgaagttccttgggaatctttctcgtgatttcatgtgctttagccaggtaatcatttactacccaaggtatactgtggcatgtggaatctcgaatgaaggacttcagaaaatttctactaaatggaaacttcttccatgacagatcctccccaaagagcactgtgttatcatctacttccttgtttttgtcaaggaagcctacctcatactgaggtttactatccccatctgatactatcctcaagattttgcaaggatgcagttccccatccctttccccatacaactctgcgccagggaaaaagcaatcttgcaactctgtcgctattttgtcagcaagatctttcaatgaaagcgtaccttttcaaaatggaggaaaaagagtcagaaataatgctcataaaccagagatttcaagtattaagaaaattatcttacacaaacaaattcaaaacggtaaaaaggtagtcctgatttgcaaaacttatagagagaaaccgagaaaggtaaaatcaagacttggacactctgcaaatcaagacttcgacacacttatatcacataaaaataatcaatgaaggagttaaaaacttactgaattggatgatgcgtaaagcaggtgcaactagctctctgggcagagtttgaaccttcttgcctgccagtttttctgaatctaaggcctcctcgtagctcaagctagttttaccagtagacttacaagtccaaactcggttgcgatacagatttaacctcttcaagtacaatctattttatgttaagcaaacaaatagttctgacacggcatgtgcactgataaacatgaacaaccaagcctttgaagaataatatgaataaaggttgtcccagaatgaaacaggcaaacagaattacaagttttaagcttatttctctttcctctaactgcacacagaaggagaaggcaaatattcaaaacataagtcttaaaattgtaacagttacagaataaggatactgataatctcgaaagatctcatttgttagacgaacttgatagacaagttcttgaggctccaagttctttgggggctccagtagtttatgtgacttcttttttagtagaggcatccttcaaatggcaaaaccaacctgcagtgtagacaaaaatgaatggtctatataagtgattctcatattcactaatgtgaaatcctagtaaatgtagaaccaggtcatccaagcaagaagggaattgtatacaaaagcaagacgtcacagttgttccaaagcggaaaatgtaaaccatggagaacagaaaatcaacccataaggcgtttaaggtgacacaacggtcaagtaaaacttagcaaacgtacaaatttgtggcacagaatgcaaatgattgcatgcaagcctagagctgattctaatttctactgaattcgacagagcctatggaaaagcaagtggtacttgtgagatcatgtgcaaaaaagaaaagccaatgaaaaatgttaagaaaagcaatgcagaagaaaccgagatagcactaaaccctagaaaaatcgcaatcccaatcgaaattagaaaagatctgaaaccatgggacaaaattgacacttgagagcaaaggaaccaaaacgaaaccgaggaatcaaaacacatacccaagagagatcgagaaaaagaaagcactatcatgcgccactttcggagaatccagaaggcgaaacggacaagtaaaacacacaaaaagcagtcaaaaaagcataacaacacatgtaacaaagaagagacgaacacaatcatcaataacaaacaaaacggaacgaaaattcgaagctaatgcaacgaaatcacaacgaagaaagcaaaatcgcagaagaaaagaggatcgatgttcccgccacaacaaagaaaacgattggagagaattataaacaacgaaattagagagactcaatcaaaaatcttacggagaatgtatgaaattgggaatgcgcgtcgtcgagagagagaggtggtctctcaaggaaagaatacaagtgttgagatctcaccgtctctcttcgtttttctcttcgctctctctctctctctctcgctctcagctctttttggtcgtcgtccttccttatgggaaagacgggaaaaaaaacttaatatgcgaattagcctctcaccttttttttgttattttatatcttaagtagcactcggtttcctttttttgtttatacaggtgttgctgttttagagccctatactgtagtttttcctttttctatagtagcccaataactgggccttgtcttgttatatgggccttgaatctttagctttaaatggggttggatttgaaaccagtattttattcattgcttacgatttaaaatggtaaagccttaactctccaccattattatttgattaaattccaaatgatgtttgaccaaaaaaagaaaacttcaaataacccactctagaaaccaagtcattaaataatgtttcctgtgtaaaattcatggaccaatcgaaatgcagaagaaaatctttacagtaattagaatggccaaccaaagtttgttgtttttgtttttgtttttgtcaacgactcaagatgatatttatttgtgtttacatgaacacccgccaaaaatatgtactaaaatatctatttcaaatatggtattttatggcctaaaatataataacatcacttttttccttttcttaaaactaccaccacaaaacaacaaatcaaattaattaaattcttcatccataaatctatcaaaacttggtaccaaactcgtgagtgacgaagcctcgacgacttacacatatcaacacgtactttatgtggtagttgtctctatccagcggccaagatttcgccacgtcctcacttcctccctccttaaaaccactcgtaacaccatcccccaaattacatatccgccattgtttccggcaacgcaaactaccaaaaaaaataatg

SEQ ID NO: 22955 - DNA, 233 bp, Unknown; identical to SEQ ID NO: 789
  misc_feature (1)..( 233): 2750-1469P.txt file - cDNA_ID_2126513; gDNA_ID_1620321; Annot_ID_153340

SEQ ID NO: 22956 - DNA, 3003 bp, Unknown
  misc_feature (1)..( 3003): 2750-1469P.txt file - cDNA_ID_2126569; gDNA_ID_1620323; Annot_ID_153407
aaaagtataatcatccatctggtcgtgtatatacgtactatgccaacttccatgaattttcactgattagtttattaaagttctcaactatcttcaggaaattcagttcgagttgctaaagaattgggcatataatttccacgaaactttgcatttgatagataatttaacatgacttgactatttatactagatatgtgtaatttcccacctatcttttagggtctaaacatttttgcatgccaaaagagttaggtgtggtggaagctaccatatgctcttaacatccatcttctagaattataatcttcgattgtaagcctgaacattttcatttttatgagatatttaaatttttagcaaaacaaaaaattggcatatgagtttctttgtacatgtttcttaagctgtacttttaaagttgtagacaatgttacaatatttcatgtacagtttctttatcttcatgccgtggagttatgtttttactttttaggttgtgcaacactgaaaaataagggttctaatataaatggattcatattttaaaatcaatttttgtagcatgtagagcggtaagaactattaatcaagctcaaaattatgaaaatttgtatttgctgcaatgttgaaaatatgatcatcatattaaaatattattattaagaggttcttattaattcacatttccacaagtaatgtttattgttttggcacaatggtgtcagatcttgcgtggtgtcctggtgtcctaatatcgtacatgtataaactataaaagtcttccaccgtactaattaattaatgtttaacttgttaatgagaagacaaagttgccaactaaaaggtaaccaataactaatttaaaagagagtagtcttggtcataagtcataactcataaaaatgaagatcacgaactgatttgagcatttagtgggtccttgatggttatcatcgagatgaagtgaatcttgtcatggcgggttattatactcataaacactaatgatatatttgaaatagtagttaaattacatttcatgagggacaaatatgatgacggtataattatgtcaattgaccgtaaagagtttggtggcagatagaactggtcggaaatctaacataccaaaggattattacaacctcgtcatgtttttgttacaaccttttaattaatgttcttagtttataccctaagttattacaacctcgtcatgtttttagtggtcgtatagactttgttcttagcattttaggtttcatattagtttgatgtaagcttgcattatcatttctcaactacaactcgaaattagatctagttacattggggaaacaaaattctacctgtaaattatttaaacctattcttggattttgacgaaaccagcattaatgttgtcgtctcttaagatattagaaataggattaaacacttccatcgtcatattgtttgaaagcaacttgataatgatcacagacaaagatgattaaaaacacttacattatcacatatactaaattgatgttattataattaattatagaagggttgattaattaagagaaatggcgaaatcaggagtggggtggtaggtgggagaaagagaggtcgagcacactgtggtagttggtgagtgtgtgggggagccttgtacttaggttttgccgacttctttagattccggttaagcttttggttttggttccggtttaagttagagatcttaaattagtgattatacaagaaatctcatgtagtaatattattctatttgtggtccaagatatggcataagatttaacgaaagaattgaatgttataatgtgttgcaagtagaagctttttacgcttttaattaatgttcttagtttataccctaaagttatgaagacaaatagcagcctagccctcgatggctcgatcaatttttatcttatatttctcattgttcattgttattccgttatatttctagtatcgcgaaactggtttcaggtgacaaattgaaagtcaagtgatcaatgaagaaatatttggcttcaatatgtattttctacgattttattttcttaagatgtagcttatctaactactgcagaaaaatgtatacacgtaaatcatgtgatgagctttgttttcaacgtgaaatatctcgttccaaaaaataagaattttatttttccattatgttgtagttgttttcagacagcattttccactccacttaaagagttctcgaacttattcaatgattggtcatgtgaggctgtggcatatggtgattgaccaattaatttaagcagtcaggtcaagtaaaataagtaaattaagcactcctaaacacactaatattgaatcatttgcgttagtttttgtcgtaaattgtgtacatttaaaatatgtttagataaattattaattgatatcatccaagtggtaaatctttcagatagaaatgctgagttcgacgataattgagacggatcttttcttcaaacgagataatcaatctaatactattgatttttgtttatgagacatctaaatctttcagacttgaattttcaaatattatttataaaaaataataattggttggtgatcaattggatccagtataaagctgaagcctgaaagtagacttttgtaacgcaattactaaatatcaaacattgtatgcattggtttcttgaaacggcccatgttcttcaaagtatttgatgttcggcccatataagatttgaaaggtatgggccaatgataattcagataatctacaagacgcatttttaagccttcttaaacttacggggcaaaaataagaaaaaccaaaacaacaggggcgaaatacaaattatctgcaaatgtttttgtttcttctcagtgtctctagtttacacaaaaaccccaaaacctctctcacaacgcttatctgctcaacaacactcttcacctatccacttctcatctcttcgttatcccctctctctaatg

SEQ ID NO: 22957 - DNA, 3000 bp, Unknown
  misc_feature (1)..( 3000): 2750-1469P.txt file - cDNA_ID_2126639; gDNA_ID_1620324; Annot_ID_153429
aagaagaagaagaagaagaagatgaggctgtgattgcgttggagaaggagatgtggagcagattttacagtggtggtttctggcgaagcctttctcaagctgaaacggcgtcgtctcccaaaaacaattaggcgatgatttttttttaagtgtagatttgattcaatgtgtaatgtaaaaccaatgtgaattggagatcaatgttgataaaatgtgtgttttgtgcaatggtcaagtgtgacctttcgatttttctgtggctttcaatcaaatcttttgaattgtgactatacaatgtgacataaacagtaaagaattgatgatagctaaaaactagagactatgtattctcttagtcgaataagctaagcaagcatttggaatctattgggatgatgattgagattgagaagctcagaaaccaactttgttggaggaatcgtttccttgaactaggtagttatgtttagccgtacaagtagacgtccactaggtgaagatctctactccaacaacacttgtacaccactttttcggagatacgaaaacaaatcattttacaagtcaaataatactcaaaagcaaatttaaagtgagtatgattaacatttaaagtgaatatgatttataaggcatataaatcatgtgcatgaatcatatagattcatggactaagttaactgtattggatcaaaacttatggtaacgtacgtaatcttatgtgcatatctaggttacacaataatctatgaattcacatcacatgtatgataatattgaactgaaaaaaaagaaaaagacatttgtttgagtttgaacgtggcatacatgccatattgaacagtctaagtaggatcaatcactgtgaagaaaaacagtggtttgataccgtataccattataatgtattgagattagctagttttgtactataataagtctataacatttgaaaatgtattgattaagacgtgctttagttgggatcatataaagagcaggatccagtaaatagattcggaagaagcgtgggatatggaatatagctggtataagctatctataataggtgtgacagtctagggcttgagagagagagagagagagagagagagagagagagagagtcaggtcaggtggtaaaataataaaggacattgagtgaaaaaaagtgaataaagttaagtaattagggtttcatgtgaggccagagtacagtgtgactcttcgtgtaaactgtccttttctttctttaccttttgattttatgtgggggaccttttgatttgtttttccctttacattgatttcacagagttcctaccacaaccattactttcctctccatatttattgactcttcttttatttcctcttttatctctttttataaatacagatttgtttagtttcaattgtcatacacatgaaatggagctgtgataagacaattctccatggattttgctatgcgttgaatcccatgcaatttttttttgtcttaaaatgtctttccacaacattaaggtaaagaaaaattaaatactcctatacatttaaattcctttttactcctccctcatatcacataagcaaacctaacccaatcgaaatatgtggtcgctgtatatccttcatttaagacatataaagagttaaaatcttcatgccaaactaatatcacatgaataaataaagtgttcccggagattgattcaacaatgaatgaactatgctagtaattaattaattataaaaagttgaaaaactatttttttgtttggaggcgtgagcgagcagcaaccaacctgtgctattaaggcaaggcttggattactttactggtcgtgaaatggaaaaagcaggagaaactataaaaatgttgaattctaggtcagtttgaggatagtccatgagaccatgacctaatctgcaatagtgtgagctatggagatggagaagtattaaagacggagagattccagggacgttcactgaaaacctctatatattgaagattgaactagttgtttttaattagaaaggtggacttgtgatttttgaatatttccggatctcttttgttgtggaaagcgagaagatatttataggatttacgtgatccatatatttttgaagtgccacttttttttcattcaattgtaatttgcgtcactaagaaaatgtttattttgcaaaacccattaactgtacgactacaatctactatatgtgctaaataagacaaacaggccaaaagcccaatttgagcccacaaaaggttatacttgtgtctgtgtggggttataataaacaagatattcgctcttttagtaaaaatgctagacgacagaatagatgcttgtttagtagcgtggcctttacgcacaaatatggcgcgtggaagtaagttttccgacgagggtcatttactcaattcacaaactctacagatggatgtttacgtcccaaaccgacagagccacgcgttcctctctcagcttctttcttttgcttccatcataactcacatgcctcttttcacctttttccttgtcctaatttcactttcaagttaagtatcatcacacttattcattcagtcattcacacattatttcctctcaccaaaattacataattcttgtgaacattggcttaaaaccaaaaaagaaataaagaaagagtaataagaggaagtagaagccaaggccgagccgagtcgagtcgagaggtgaaaacatgcaaagtcagcaacaattataaaatttggtgtggtccccataaccagcctggttcgaaaagtcggaaaacccaaaactacacaacatagacaacacaaccaaactcatctctttttctttaacacttccacttgccatcgccgacacttcaagaaaaattaaagaaaagaaagtaaactctttcaccaaaaaaaataaagaaaatttattgttccatctttctgataatcggatcttacagagagagagctccatg

SEQ ID NO: 22958 - DNA, 513 bp, Unknown; identical to SEQ ID NO: 286
  misc_feature (1)..( 513): 2750-1469P.txt file - cDNA_ID_2126653; gDNA_ID_1563366; Annot_ID_147550
  misc_feature (50)..(50): n is a, c, g, or t
  misc_feature (52)..(52): n is a, c, g, or t
  misc_feature (61)..(61): n is a, c, g, or t
  misc_feature (63)..(63): n is a, c, g, or t
  misc_feature (70)..(70): n is a, c, g, or t
  misc_feature (73)..(73): n is a, c, g, or t
  misc_feature (82)..(82): n is a, c, g, or t
  misc_feature (85)..(85): n is a, c, g, or t
  misc_feature (91)..(91): n is a, c, g, or t
  misc_feature (93)..(93): n is a, c, g, or t
  misc_feature (98)..(98): n is a, c, g, or t
  misc_feature (100)..(100): n is a, c, g, or t
  misc_feature (105)..(105): n is a, c, g, or t
  misc_feature (108)..(108): n is a, c, g, or t
  misc_feature (130)..(130): n is a, c, g, or t
  misc_feature (132)..(132): n is a, c, g, or t
  misc_feature (145)..(145): n is a, c, g, or t
  misc_feature (154)..(154): n is a, c, g, or t
  misc_feature (157)..(157): n is a, c, g, or t

SEQ ID NO: 22959 - DNA, 3000 bp, Unknown; identical to SEQ ID NO: 822
  misc_feature (1)..( 3000): 2750-1469P.txt file - cDNA_ID_2126711; gDNA_ID_1620325; Annot_ID_153466

SEQ ID NO: 22960 - DNA, 3000 bp, Unknown; identical to SEQ ID NO: 817
  misc_feature (1)..( 3000): 2750-1469P.txt file - cDNA_ID_2126715; gDNA_ID_1620325; Annot_ID_153467

SEQ ID NO: 22961 - DNA, 3003 bp, Unknown
  misc_feature (1)..( 3003): 2750-1469P.txt file - cDNA_ID_2126738; gDNA_ID_1620325; Annot_ID_153472
aattaaattaaagttttaatgaattcagtctagaagcaatacaagtttctgaatttgtgaaattatatatatatttgtttagcagatcacatcctaaaataactaaccattttaaaaaaacttaaaaagttcagaattacagtagagatgattaaaacaatgtgactgcaagtttccaacctactggctgggttataaataatatttacttataatggattcttaatatacatagttttgatatgtttatgtagtttaacgacaatgcgacacatattaatattataatttaacttcttacatatgtttgaaatcagtaaaaccaaaacatgtcttaaaaaaaaaaagagatatatatatatataaaaggttaccaagaacataaagagaaaataaaatataagaaatttaatagtaagtacggaaccctatataaaaataatgaaggaagtctctttagcgatgacgcatcaatatctcttgattaattaattttattctcttcatagaaaaataaatactaagataatacagttttacaaggataacacatcattatctcttagttaattaattttatttctcttgataaataaataaataaataccaaaataataaagtttaaaaattcctttcatcttttatatattggatttgatagccattatgagaaaagtaccaatcagaaatggtgaattaataagttaataatgatgatttcatttcataccagaattggtgggcttaattccttaaaaacaaataatttgatcaagattaatgatagatgtgaatgagtaggagagcagtaacacacaaatgaatgaaacgtgaaatataattaagtccattagacgtgcttaccatattcatatgaatcatacaaactaatctgtcatcgataaaaagaataaataattattctctttttgtttatttttataataatgtttagttgaaatgaaaacgttatcgttagagccacgcacgatcctaaattctctactataagaatatgtatgaatactatatttgtagttcacattcgctttcctaaggtttaccaaccagtttacactgaaaatgtgtacatgacaaattgacaatgattgtttcgttttgtttacgctgtttttttttattattgaaattcaggaggttctaggccgaaaacgtaatccccaaaaacccgaaattatattatgtaatattagtttcgtctcaaacatcactcgaaccgacgacctttaaacttctcctagagtttttaccaattgaattaacgacattataatttatttttcttagaagataaaagtaataatcaataccaaaagccaaataattattcttcgataaaaaaattaatttgaaatgaaaacaacaccaaacgcctaataattattggatgaaaaaacagtattcatacattaattaataagtgaatcatcttacatgtcaaaaaatgttaatggtgtttgtatctatctattcttttcggtgattgattacatcaacaaccatttgaaaattttgacatctttttttctgacatattggatactgccctatttattttgtccaaaacaaaaaaaaaggatactgcccttttttcttctcatagacaaaattaagtatataatttatcaaattttgttagatgattttttttgaataaaagatgatttggttttgaaaaaaaattcaactccatgttaactaacaattcatacaagatgaccaaaaaaaaaaaaaaaatcaaatgaggatttttttttttttttttctgttttttcttggtctttttttatgtcagcactcaattatgtttagagttgacatgtttgaatatatatatttaaaaaatctaaaatagtttaatttgagaaaaagaaagaaataatgaacaaaaaaaaaagagcgagcgttcgttgctccggaaatgatgggcaaaagtgggtaagtgagtgggaaatagaggtctgtgaataccaaacgcttccctttttcttcactttcttccctctaattactctcttgtctctctccctttcctctttcgtctcctacgtgtttaaaccttgcaaaaaatcaagtcttttttggtgtttaaatcacccatttttgtcaatctgtttttcgagcaaaacaccaggaggaaaccaaaaagctagaggctttgtggagtgagaagaagagtctcaggttagtttcttgtattcttctgtgtattctcattatctgtttttttgttctcattcgtcttgtctgcaaaattcagttcacaaaggttgagactttacacgacttggttctctttaaaaccgttttgaggtcataattggtaaacatttgaattgggttttaagagctctgtttatatagtagaagaagttggaacctttcaatgttcttgattaagggttttaggttgaatgtttatagggtttgattttggatgactagtccctttttagattatttacttgaaatggccctttgtctctgtttatatgctatggaacaaaatttgcaattcttgatctcggttggttggaaaatgctaattctttaatcttttatttgtagattttgttaattctttgttgtcttaaaaatagtattgttgaagattcagacaaaaatgtgtttttgtttcagatcaaattgtctggtttctttagagctgtggattctacttcttgtctgtttgttattctttattaagatttagttggcgtgttgttgtttaccttaaacatccacagaatcatatactctttggtttaaattccttaaaatggatttaaaacactctagaccaatattagttgctttagtttcattttgctagcagcttgaaattttcgagtattcttacaaataccatcgctgaagatttgactatttgttttcttcattcttgtttgatcatttcatttccacagtgaaaacagaaagcagcatttgagattccactgttaatctttgaattaaaaatg

SEQ ID NO: 22962 - DNA, 3003 bp, Unknown
  misc_feature (1)..( 3003): 2750-1469P.txt file - cDNA_ID_2126804; gDNA_ID_1620327; Annot_ID_153520
ccaggtgctgttttctgccttagggaaccattggttttcattttcataaactcgttagtggttcttatagtttctcaatctcttattatcttacagattttggtggcacacaaaaatgaagtgtggtttgtgcaattctctaatagtggcaaatatctggccactgcatcaagcgattgtacagctataatatggaaggtaaatatcttagaccatttggtttctcttatttttccctaaagtcattgagaaagagaccagatgaattagctctgatgtgtaagagaaccttatgaggtttcttcttgtataactcttcacgctgtgaggtggaaaaaaatattaaggaaataacatttggatgtcttgtcttgaagcttggtatataaggtagaaagccattttgtgacaacaaaaaaggacaagaacttttatgttgtaattcatagtgatttgtcgttttgagccatgtaatgtaactagttcttagtacttcagggttgataaaatttctgtgtatttttctatggtagttttgagaccgtttctttaaggattaaacatggtaatttctaattgataaaatttggtattggactaaaacttcttgtttcaggtactggatgacaacaaagtcgaactgaagcacacacttgagagccaccaaaatccagtttcttttgtctcgtggagtcctgacgatactaaactgcttacatgcggaaacgctgaggttcttaagctatgggatgttgacacaggtgtgttgagacacacatttggaaacaacaatactggattcactgtcagctcttgcgcatggttccctgactcaactcggcttgtctgtggcagttctgacccagaaagagggattgtaatgtgggacactgatggaaacgagatcaaagcctggagaggaacgagaattccaaaggttagtaaaggttaaaagatttgcttatccgttttggtattcaaatacttgaaattcgaaatgcacaatttcctaataggtggtggatttggctgtgacgccggatggcgagagtatgattacagtgttttcggataaagagatccggatcttgaatttggagacaaaagtcgaacgtgttatctctgaggaacagccaattacttccctttcaatttctggtgatggtaagttttttatagtcaacttgagctgccaagagatacatctttgggatcttgctggagagtggaaacaaccattgaagttctcgggtcacaggcagagcaaatacgtgatacggtcatgttttggtgggttggatagttcgttcatcgccagtggaagtgaggattcacaggtaagcacattattttcgaccaagacagttgttttttggttgctgttgactgacattgatctgttgttcacaggtttacatatggaatctaaagaacacaaagccgcttgaagtgttatcaggtcattcgatgaccgtaaactgtgtaagctggaacccgaaaaatcctcggatgctagcctctgctagtgatgaccaaaccatccgtatttggggaccgggcaaaccgaacaaaccactgaactgattagataaccagaaaccgtagtagctttaaaccaggacctagttctagtagttccacatttgtgtatagttcatttctggttttttcttttttggtggtccttattggctttgcagaacaatctcttgctttttgagttttggtacactggttttggagaacttgatttgagatgagccatgaattgaaaccaaaccggtttaggcggtaaactgaaccaagctgtgttgaggagttaggtggcaattgtttggtgttcagagcaaaacttagctaactacttgtttcgttggtcatttgctaccatgtgggttccccgttattttaaacagaaaatttaattataatataaacttcggaaacgcccctaaacttatgatatttaagaatctgccaatattgttactttttttccttagtacagagacattattttttctaacaaacctgtttagaccaaaacttctgaaataattggcaatgcgtagattacaccaaaaaaaaagtttgaaagaaaatgtgttgcaatgattctaatatcttgaaaaggtatatgagtttcaattatagaactcaagaagattaataagtaattgcgagttcgaacatttgtgggtttcaattatataattaacaaaaaaatctactaagtgcatacataagaagtatttcacctaatacgattaagaatatacatgatttcagttttagtatctactatataaatatgaataccaacgtaatttaatcatatatttaaactacatatacatctatttgaaacatggaatttacatctttctatatttaaaaatatttgaaatgaagtttcaaaattttcatatgtaaagtatacgttatacaatctaaactagtattcaaaagatgataacatctacacaaaacaatcacatgaataggttaaatcaaaattaaaaatagaactgatataccctcttagatctcgaaatatttatcagtatgggccagaagggctatagttattcttagaaaaaaaatggaggtaatgtcgaaattgacgaaattaataggcgtatttttaaaaataaaggttgtttaagataatcatgaaaaattagcagccactgagtaacataattacataaacagagacacacttacttgaaatagaaaacaaaataagatccttttaacaacaacaacaacaacatctcacaggtctcgctaagacggtcctaaacaaaaaccaaactgtttaggtttcgtcgtcgacgcgctctcatcaacaaagtcccatacgaaatttaaccaaaactatatatcgagggacgaagcgcgtgacgttagatcggagatctcaccgagatcgccggtgaattagggtttctacttcctttgttcttgttaacgttatatgaaagtttggaattcaagatg

SEQ ID NO: 22963 - DNA, 3000 bp, Unknown; identical to SEQ ID NO: 841
  misc_feature (1)..( 3000): 2750-1469P.txt file - cDNA_ID_2126813; gDNA_ID_1620327; Annot_ID_153523

SEQ ID NO: 22964 - DNA, 3000 bp, Unknown; identical to SEQ ID NO: 842
  misc_feature (1)..( 3000): 2750-1469P.txt file - cDNA_ID_2126817; gDNA_ID_1620327; Annot_ID_153524

SEQ ID NO: 22965 - DNA, 3000 bp, Unknown; identical to SEQ ID NO: 838
  misc_feature (1)..( 3000): 2750-1469P.txt file - cDNA_ID_2126839; gDNA_ID_1620327; Annot_ID_153531

SEQ ID NO: 22966 - DNA, 3003 bp, Unknown
  misc_feature (1)..( 3003): 2750-1469P.txt file - cDNA_ID_2126849; gDNA_ID_1620327; Annot_ID_153534
ttaaatagcatgagctggaatggatgtttctcaacttatttctccaagttgcctatttcacatcaagacatggtgcccactttcctccaactctagatttattgtatatctatgtgaaaatgtgctgtcgttcacattcatccccaaagtattttaatgtatattgtatttgatcacatgaacatgacaaaatttatctgtaaatgtcttataataattgaactaaaaatgttatatttttaatctttttgtttgtttctattggataaaatgcaaataattatttggtagctatagacaaaactaacgtcgtgcaacaaaagttaaaaccatctttaacaaaagaaaaaaattgatgacaagatatgtataacaatatcaatgtctaatgacattctatctttaaatgtaagaaacaaaactagtattttggagaaaatattttaaaccttactttgtgtttttgttgacatttcacaaattatttaaggtgatttgttaattaacaatatcaaaaaaatcttcctaaaaaaaattaacccatacatgtgatgctatagttagtagtactagaactaaacccatccagtagtaaatctaataaacttcatttttttttgtattttgttgacttgcacttcgacatactctatataaacacaaccatattagagatcagatcccaacaccactaataaactcaacatggctagatccttgttgctctcgctaaccctcacattcctcttcgccggaattgtctcagctcgtgactggaacatcctgagccagctcaaaggaaccacaaccaccacgaagactagccaaaccggcgtcacatctttgaaagctcccaacctaaacggatactgtgagagctggagagtcaacgtggagcttaacaacataagggactttaaggtggttccacaggaatgtgtatggttcgtccaaaagtacatgacctcatctcaatacgaagatgacgtggagagagccgtcgatgaagccatcctctacctcggaaaaacttgttgcgagaagaagacatgcgatggcatggatgcttggatctttgacattgatgacactcttctctcaaccattccttaccacaagagcaacggttgtttcgggtaaataaactaaacttaaccatatacattagccttgattcggtttttggtttgatttatggatattaaagatccgaattatatttgaacaaaaaaaaatgattatgtcacataaaaaaaaattggcttgaattttggtttagatgggtttaaatgtctacctctaatcatttcatttgttttctggttagctttaattcggtttagaatgaaaccgggattgacatgttacattgatttgaaacagtggtgagcaactgaacacgaccaagttcgaggaatggcaaaattcgggcaaggcaccagcggttccacacatggtgaagttgtaccatgagatcagagagagaggtttcaagatctttttgatctcttctcgtaaagagtatctcagatctgccaccgtcgaaaatcttattgaagccggttaccacagctggtctaacctccttctgaggttcgaatcatatttaataaccgcattaaaccgaaatttaaattctaatttcaccaaatcaaaaagtaaaactagaacacttcagataaattttgtcgttctgttgacttcatttattctctaaacacaaagaactatagaccataatcgaaataaaaaccctaaaaaccaaatttatctatttaaaacaaacattagctatttgagtttcttttaggtaagttatttaaggttttggagactttaagatgttttcagcatttatggttgtgtcattaatttgtttagtttagtaaagaaagaaaagatagtaattaaagagttggttgtgaaatcatatttaaaacattaataggtatttatgtctaatttggggacaaaatagtggaattctttatcatatctagctagttcttatcgagtttgaactcgggttatgattatgttacatgcattggtccatataaatctatgagcaatcaatataattcgagcattttggtataacataatgagccaagtataacaaaagtatcaaacctatgcaggggagaagatgatgaaaagaagagtgtgagccaatacaaagcagatttgaggacatggcttacaagtcttgggtacagagtttggggagtgatgggtgcacaatggaacagcttctctggttgtccagttcccaagagaaccttcaagctccctaactccatctactatgtcgcctgattaaatcttatttactaacaaaacaataagatcagagtttcattctgattcttgagtcttttttttctctctccctcttttcatttctggtttatataaccaattcaaatgcttatgatccatgcatgaaccatgatcatctttgtgtttttttttccttctgtattaccattttgggcctttgtgaaattgattttgggcttttgttatataatctcctctttctctttctctacctgattggattcaagaacatagccagatttggtaaagtttataagatacaaaatattaagtaagactaaagtagaaatacataataacttgaaagctactctaagttatacaaattctaaagaactcaaaagaataacaaacagtagaagttggaagctcaagcaattaaattatataaaaacactaactacactgagctgtctccttcttccaccaaatcttgttgctgtctcttgaagctttcttatgacacaaaccttagacccaatttcactcacagtttggtacaacctcagttttcttcacaacaaattcaaacatcttacccttatattacctctttatctcttcaatcatcaaaacacatagtcacatacatttctctaccccaccttctgctctgcttccgagagctcagtgtacctcgccatggaaccaaacaccatg

SEQ ID NO: 22967 - DNA, 3000 bp, Unknown; identical to SEQ ID NO: 835
  misc_feature (1)..( 3000): 2750-1469P.txt file - cDNA_ID_2126856; gDNA_ID_1620327; Annot_ID_153535

SEQ ID NO: 22968 - DNA, 3003 bp, Unknown
  misc_feature (1)..( 3003): 2750-1469P.txt file - cDNA_ID_2126859; gDNA_ID_1620327; Annot_ID_153536
tctttggtttgggttcggattgatccgttcttgccgaaacagactggtccgttactgaagcaatgtggcgtcgactgttaaatgaggaaccgcattttcgttttggaccgctattttgagccattttgcttggcctatttttccgatttgggtgttctttgttggattatatggatttgtaaggaggaaaaaaaatacaaaactttgattcacttgtgaaataaagtagacaaatttctgtaaaatacaaacaaatagaatgaatattactaaatcaaatcacacacaaaacacaacgattttgttatcaaccacacacacacaaacaaacagagtgataaaaataatttcacaaaggcaatgtagtaaccaaacatgtgtggaattctttctctgttgtggaattggagttctaagaacttcgactgtacttgttcgttgccattgagtgactgttccagtaaccaccaactgttccaattatcggtgattcagggcttctacttggcgatttccttggcgaattcgtagctgagaactgctttatctcctctgcagttaacgcgcccaatataggtctttcatcatggcattgaaccagtttcgagtatttcttcttctcggacattgtggtttcaacactgctacaaccgctggtcgtggtttgtgatgtggataaccaagttgaaagactagcatcaacagctatttcttgagttctctgtttctcagtttcatctcttgatttccggttcaagctgaatgttgatgataaatcatcaacctgagactccaagctgaaggaagcaattatcacattctccttccgaggctgtgtttgagttgttgttcttcctttggctttcacagctttccattgggaaagattctcaatcgggttcagtactgcattgacatatccacttctgtctctaacactcacactacccttttcttcaaccctctctatatccataacattatccgcaatctcctccgtataaactactttatcccagttgtgcagcttgtcctcataattgtcatcattataatagtcatcatctagcagcccacaatcatcatcatcagtatcctcaagatcgctatcgtcacaatccgttacatcctcctcttcatcatcactctctctgcaattctgatatctatggttagaaggataagaccctgacgagttagaagtaacatcgctcccttcagacgaacatcgagcctgcctcgacttcacctcttctttcttctcttcaaagagctcaacagattcatctactgcaatgtgttcatatgttttaacattggtgtcaaaagttactctcttacgatttggacttggactcggactctgtttctcctcaaccttgtcactgcagtttaaagaaaagaatcaaataagtcaaatctgttgagctaaaacacaaaacatgaatctaagtagaaagaacaaaaccacaacacttaccagatatcagtgatcggagttacagaaactgtagggactttctcaacaacgttcacatgattatcctttggagacacctccgagattttagggacttccataacagttgaatcttttgcatactttgggacttcttcaacagtaggaaccctaagattcaaaagaacatcctttgcagcttcctcagagattctctacataaaacgaaacaaaattacttcagataaagcaaaacccaacaaaaaattgaagctgaaattagcttaattgcagcaaatcaacactaagaagaagaacttacgtttaaacgtggctgaaaagattctctgcgtctctgacggcgacgattcttccgacgaccgaagcaaccaagtaagcaacccattctcttctacaattcaaagagctaacaacgagagagattgaaggtaatagattccttcgagagcttataaatcgaagattaaagagtcaacattgcaaagagatgatttttaactggacttagagagaagaagaagaagtgttgtactcatggatttgggggtttagggtttccttttttatttgtctcttcagatttccttttttatttgtctctttagatttccttttttctctttctaatttcaggttataatttattaattttggcggagtaaaagtagatgaccgttacaagtctgatttattagactgtgaaattggaccgttgttatgtgggccatggcttttattaaaaaaagaagagaaggtatattatttaaattggagataatgggccgttttaaacccaattattattggtccactaaagtttttatatcctctaacttcgacgagcttgatatagttttggaccttttggtgtgaacggtcacattcaactaaattaaaaagtccaacaaacaaaatctggtcatgaaaagcttggtgtgatgtttctaataagtaaatttactgaggttaattggttggtttaacttaaatgtaatccaaactcctctccctttagagattttcagttgggaatgaaaacctttaaagcttgcaccctaaaatgacattaatggttatagatatagtttgttttcatgtttcttttttttttatattttcctttagttttttctagggttgggactaaataatcggactcggatccgagatccgatttgaaaagctggatacccaattgggatggatccgcttccggatcctgaatttttagattcagatgaatatttttttttaaactaaagaaagcatatcagcatcacatttttgtggtgatactgcttcaagaatctgtcacatatctgtccaaaagaaaagaatttgtcacatattgtataattttaatatatttattgttttagtttgaaaacaaacgtggaaaaaaacatcttacaggtgtcaggtgtgccgcgtcgtcccactcaaagcctatatcatcaattttctggctgttctaatctactcaatttatttttttattgttaatttactgaagatcggcgatg

SEQ ID NO: 22969 - DNA, 3003 bp, Unknown
  misc_feature (1)..( 3003): 2750-1469P.txt file - cDNA_ID_2126896; gDNA_ID_1620326; Annot_ID_153490
tattcataaacatagaaggagtatttaacaacagtaggtaaaatggtaacattctgattcgggtaaactgggtttaccttttttcattctttggtacaagggatggtttggcatcctagttaagagataagaaaataatcatagttatccataattgaaatcgtaatgagaagacttaaattctgatcttttattcaaaatgaatcagtcatccactagaccaccattaattattttgtaagaataaagtttgttacgcatgatttatagtggattcttgggatttcctaacatgatattaggcagttacacttacacatatctactggttaaatcccttatgtaataaaaaaaaatctcgagttcaaaaacttgaggtcttttccaaacattgatttttgggtgatttgcagaaatgatcatgtttgataatctatttaagaatataacactttaatatgtaaaactaagtaaataacagtagaaagggatgaaaagtcaagtaactccttgttaaaatatgagaatacgctcgtgaaaagagaagaaaagtgacgtgatctttcacactcttttcggttaatggacattcataaaaagacaaaagtgttggctagcgtgatggtggcgaagatggcgatgatggtaatagtaacaatgacagtaccgatggtgatggtgacgacaacagtggcggtgccgatggtaatagtgatgataacagtggcggtgccggtgacgatagtgagacaacagtggcggtgccggtggcgatggtgacgacaacagtggcggtgctggtggtgatggtgacggcaacaatggcggtgtcagtggcgatggtgacgacaatggcggtgccggtaacgaaaagataagtacaaatatatattgatctaagaaaactaaaccttaagatactatacatggaactcaaacaaaaatcattaaacgaaatgaaatcatctcaagtttcaattttcaaaaatctagcagcaaaatagaatagtacaatggtgacgatggcttcggtgacgattttccggtgatgatggctccggtgacgatttttcggcggtggtggcttcggatacgattttccggcgacaatggctttaaaggtagtggtggttgtggtggtagtggaagaaaaaaagaaagaagagagaagatgttcatgcagaagaaagaagaagaagatggtataattgtatttattacatataatatacataatatcaccttatggtttttgaagtgttagtttccaaattactaaatttttttaggttatacttacaaatttcccttgattttatccaacgtcggtgccatatacaatcgttgttaccagatgatgtatgttagtaacttactaacgtttgagcacaaaaatatcatctaagaaatatatggatatttaaagataaagttgttatatataattaggggtgtcaaaataggtaacccaactcaactcaactcataatcaaatgagtttagggttaaatgagttatgggttaatccaactcattttgttaaatgggttgggtcaacccataactcatttaatttgataggttgagttgttaaatgggttaacccatttaaataataatttaattaattattattataaaacaataataaaaattatcattattaataattattaattcattatcatcaaacttagaatatttacagattctaccgtttacggatttacgtttttggcggaaaaattacgggtttacgtttttagcgagaaaatcacgggtttacgtttttggcgggaaaatcacaggttttcgtttttggcagaaaaatcacgggttttcgtttttagcgggaaaatcacgggtttacgtttttggcgggaaaatcacgggttttcgtttttggcggaaaaatcacgggttttcgtttttgactggaaaattacatgtttttcgtttttggcgggaaaatcacgggtttacgtttttggcgagaaaataacgggtttttgtttttggctggaaaattacatgtttttcgtttttggcgggaaaatcacaggttttcgtttttggcgggaaaatcacgggttttcatttttggcgggaaaatcacgggttttcgtttttgacggaaaaatcatggttttcatttttggcgggaacatcacgggtttacgttttttgcggaaaaatcaaggatttacgtttttggcgggaaaatcacgggtttatgttttttggtggaaaaattacgagtttactttttctcaattcatcgcttgtatatttaagaaatttggaaaaatattgattttattagattggtttagatgtgttggttaaacttaaattggcattggtttaaagattttagttggtttaattcaattttacaaaacttgataggttaattgggtaaaccattgaaaacattaaccattataactcaactcattttattcatcaaaccaattgatccaataattcatttgacccatcaactcatttgagtcaaaaaatttaactcattagtgttcaggggttaagtaaagttgagttgacccataaattttgatccattttgacacccctatatataatacgtacaattcaaaaatataaagtctagtttttttttttttcgtatatggatacttcaatagtagttttttttttaataattattacttgaatagttttagattttaaatcatttactttatcactatttgtcgaagtgtgtattttcctagctatcttcccaaaaagaattaattaataaattacgagcacaataccaattttttcgcagttctgaaaatactgtaacccaaatattcgaatctacacagtctcaaaaaacgaaaaggttcatataaaatattaattccttaacggctatatttttctccttcttccattttttttctttctcaattgatatatccaacgacaacaaaaacaaccaacaagaattagttcgtcgagttcacaaaaatg

SEQ ID NO: 22970 - DNA, 3003 bp, Unknown
  misc_feature (1)..( 3003): 2750-1469P.txt file - cDNA_ID_2126916; gDNA_ID_1620326; Annot_ID_153497
ttaattacaaaaataactcataaaatgtaaaggccagttttttttttttcatgtctaaaatatcatttttactttgcttctttttccagactgctctgtttcttagcaaagctcttatcttatctcttttttcgaagatatcatttgcttattctatatctgtggtttatttgatctcaaaaaaatgagattatgacagtagatgtagttattaaaacaatgctcgttcgcaccacgaaacattttgctaatgtacatggtaacgcatcaagtgtaagagatataaaagagaagggttcttttatagtcagggaaattataatgacattccatatatttttaattcacaacagccaaactcatcgcaaataccaagatcttacacataaaatatacacaacaatcacctgtcacaccatacacttttacgagacacggaaacactcaggaattgggtaaaagctctaaccatagagtaatcattatctatcacgtgatctacgccttacacatgtcaattttctactttagggtttcggttcaatatgcatcatgcctactttgaatcttgaacgttattgttatgttttcacacaataatctcactgagtttttgacttagtgttgatggatctttttttttgttttgatggattttagtggataaagggggaacaatttggccaatgggtgtaaataactctctccccacgggctagcaggattggtgcgttactgtgacttattatttggaagaggagcacattgactaacctttcttgctgagaacagaaaaagctctcaagaatagtgtgcattttgattgacggggatgcgagtgtggacgtggactggaaacagtagtaagtgaagaaatttttgaaaggagaaatgaggattagtcttgtagactctccaacactgatcatgcatatggtcatatagctagaaattttggggagaaaaatatggtaaaattttagaaagggtcaggattaaactgcttattagtgcgcttagtagatagctagaatttcggattagttttgttggaacaaacaagagttttttttaagaggcatttactataaatttgcagaatgactttgcatagaggtgaacataatagaaagagagagagaacctttaatatgatcaggtttagatcttttaagtatcatagatgtgtgtgtgggtgtgagagtgggacttaagtccaccaactcatcctcttttactagatatatatgaattgaattggtattcagagagaatacatgttcgtagaccccattgtcgaatagctgaggccatcggctgcatagtgcttttgacagatggaacataacactgatattcatggtatgacaagttagcttctttgacacataacattcaccgaaataagcatgtatggcaatggcatgatcaaacaacaaaaaggtttctccgtccaattttgcttaatatagtttccactctcttgagagcctgatatgtattcatgtgtcatgcatggtttgatgagcagttagaaaattttcctaaattaaaataatatattgtatgtattgatttacaaaacttataccaaacccaagcatactataaactttaggtatataaaaaggtactcaattgtagtaccatttgagtaacttaaaataatactaatacaaattttaacctaactgttcatgaaaattttgaaataaaaatctaaaatatgaaagatttaaaattgttattttgtatataaaatatatctcacaaaattaatcgactattttaattaaagatatatagtagtttaaataacataaaacaacgacaataggagggttataaataaatgttctaaaatgatgtctaggaagtcgtttagtctccgcctagaatagacagtggaagttaccttacacacattgggattatgtatttttttttaataaatggatttaagttgtttcaagagatcttaagctctcttaggtggtcttaggcggttttacaatttaacggttttagtttattttccaatatttaagtacaataatttaaatttataatttttaactccatatacatgattataaacgttcatatgttatttgatatgaattaaataaactaatttttgtttatgatttactatttttatttttaatagatttttgtatattgtgtatctaaaatatcatatttataatattgtatgttggaaatgcttaaaccacctaaaattgcatatgttttgattagacgttatatgttttaagtattgtgtcagtgcttgcttcgtgcctaacgctttcttaaacacaaacaagtcaatattttatactacacaaactcattaatagatattagtgctaaacttaataaagcatatataactattcaagtccacaaaatcttttaccaaaataaacttttaaaatataaacttttttacatgtctagcacgtatccgaacatttccaaaaagatactccatcttttgaaatagttgtcgtttaacgtttttgcacataaattaagaaaacaattaaatttatagttgtcgtttaaacgtttttgcacataaattaagaaaacaattaaatttatccttaaaagacattgttgctaatattcataaagaatatctaattgtttgagtccaaaaaagatttacccaaaaaaacctttgaccattaaaaacttgcttacatgtctaatacgtgtcttaaaagttttcatatcaaagctcaaaattcctaaatttcaagattcttaacttttgttttatttacaagtaatgatgatactactttaaaatcctaatttgtaagagacaatatattgtgtttaattaaatattttcttattgcaaatgttttcttatttatataaggagttgttgaagaacatctacaataaaatctccttctaaactctcacttatttcgtactgataaacaaaaagagcatcttaaatctcttgatcggttttcgaagatg

SEQ ID NO: 22971 - DNA, 3003 bp, Unknown
  misc_feature (1)..( 3003): 2750-1469P.txt file - cDNA_ID_2126961; gDNA_ID_1620326; Annot_ID_153511
agtaacgttcgtattttcagaaataacatattttatattcctttaaaaaacaaagattatagtaaagaacattaaattaactaataactactctacttttccatagaatactaaattcctacgctttctattaatctttagtgtttttaccgctaaagatatcactatatcactttgtcaaaaaatctcaattttccatacatacaaaaagattatgtttagaagtcatcaaatccataatttggttcacttaaatacaagttggtgattatttgattttgttcgatttaatgtcattttggtttcattttgttttctaaaatcagttcagtgttggttaaaataatataaaatacttctaaataataattcaaccataattatataaaagcaagaaaaaaaattctgaaattaaatttcaaattattctaggcatgttctccaatgtggctgcatccgtcttgttggttcaagatgagtgctcttctgttaggtcctctatctaaacatcttcaactccatttcgtggatcgatcacccaatccttcccagctgatccgtattttagtggtccttgtcgccgacgagaagtttagtctagtttctccatggtttgtgtagctattgagatgttaactctcatgctttcagcctccttttcgctgtctctatttgagctgctcatgtctccacactacctatgaagtccgatctctacgactttggtgtgagctaccccctcagacctccagatccgccccctcaggccccaagttgaccattcgttccaatttgtgggagttttctccggtgttatgacctatggtccttccttttctaccacctcacctagcagcatctcctccattcacccttgtttggataatgatctttgtgtcttccacttgcctccttgcgatctattattgttgtgtgcagttcatggtactaaatctttcctctagcgcatatgtgcaattaactggatacttctctggtttatctttgtttgcatttcaggctagtctactttgtttctaatctagaatcacctttgttagtttattttctgtccaaatttggcagagtttgttcaccgaatacttctttagaatcttcgtgtctagggttaagaaaaatcaaacttttgcctagatccatcaaaatttgctcaccctatacatctccagcgtctccatgcatatgtctacggttgatccttcttgggtgcatcatcagagatcctttcatggtgcaacgaccacctccgcctcactgttgaatgaatgggagagaatgagtattattttcgtccttcatctatggtggagaaatatctctgattttgaaaacaaattagaaccgaagagactttgcacaagttttaaacagttttggacactaacgattatatgctaacaaaatatataattagtaaattttaagttttgaatataatttacgaatattttttaatccatgaaaaactttaaagaaaatatcttatgttgacttgacactttatgagtctaattaaaaatgtacatacaagtaacatcataagtaatttgattccagaacatcaagaaccaggtttcaggtttcacactttcgcccatcatgaaaagtggacaaaaatcaaatattttatttggcatgttttgctttgattctttttgaatgaatgttattcatcctaaaacatattttgtataataaatgtaaccttatacttttttccgccaatgtaaccttatgctaaaagttcagaacgtttataaataaaaagacaccaaagacaaacagtagggccttcaagcaccaaagacaaacactagggccttcaccaaaccaaattcttaagacatcctcgaatttggttgtggtttccttttgacttgaaagtctgttctagagttcggacgatacgctcaatgaaagaagacatgagtgaaggagacaagttttgttccccatgtctacgtctaggtttatttctttcggaccatatggaatgcacacaaacttggaacacataccgtacgaggtagtaaactgacttttatgttaaagatggtttatgtaattatgttactttaattgttaaatagtttttacgtttccatgaattggatcaaacgtaatcaagtaaaaaaaaaaacctatacttataatccttccttgtttcatttgatttccttgcctttaaaccacaatattatttcttttgagtttcattgatggtgtctcaattgtaaattggggtttagggacattatacagatggttgtaaattcctggaactgactgagaaaaaataaacttatgggcctggaggagatagttgttgggccacttcttaatatatattggcccacgaaaacacaattaactcttcgtttcaaatttacaaactaaacttcgtgctatctaatacttttaaaacggcacgtaatttagttttcaaaacatagaacgacacagggttattgtcggagttgcttcttcagagagaaacattagagaggggtgttcatcttccacatctcaaggagacacccaaaaagaaaaaccaaacctttgaagaacgaaaagggttattaaaaaagcaacaaactttgagagtaacaaaggtaagtttttatctgtaattctaagagttatatcattttggttttgtatgatttttttgaatttgtgaatttgatccgttgatttaattctgaattttctacgattagttcactgttatgttttgtgaattataactgttttattgactaatcacgactttgaatccaattctattgaagggctataagaaaaactgaaattaatttatagaaacttgaaaattttggggacttttcatgttttgttaagtaagaaatcttcttttttagctaaattagtttcttctaaatagaaagttttcgaatttagaaaaaggttggggttttttcattgactcttgtctgtgttacagaaaaagtagttatcatg

SEQ ID NO: 22972 - DNA, 3000 bp, Unknown; identical to SEQ ID NO: 827
  misc_feature (1)..( 3000): 2750-1469P.txt file - cDNA_ID_2126979; gDNA_ID_1620326; Annot_ID_153496

SEQ ID NO: 22973 - DNA, 3000 bp, Unknown; identical to SEQ ID NO: 847
  misc_feature (1)..( 3000): 2750-1469P.txt file - cDNA_ID_2126983; gDNA_ID_1620328; Annot_ID_153557

SEQ ID NO: 22974 - DNA, 3000 bp, Unknown; identical to SEQ ID NO: 860
  misc_feature (1)..( 3000): 2750-1469P.txt file - cDNA_ID_2126987; gDNA_ID_1620328; Annot_ID_153558

SEQ ID NO: 22975 - DNA, 3003 bp, Unknown
  misc_feature (1)..( 3003): 2750-1469P.txt file - cDNA_ID_2126991; gDNA_ID_1620328; Annot_ID_153559
aaatcagaagcttcagcatcaattctgaaaacatgaattcaatcaacagtgaggcaagatgagtagtgccctatgactcattattcattaataaagagaaacaagagcaaaaagcacatcattatcttcatttatcacctcagcatttcagcattaatcttcaaccctgtgatggcattttgggcaaactgaagcaattcgtcctgcttaacctgtccaaaagcagccaaagcaacacagaagaatagaaaagttaggaggagatccaaacgcccataaattaacatatgctgacttttttactgatcaagcgcttaccaaaacttcatccttgtaacttgaaaagactgtagcaagatcctgcatactgctaactatggcatcatgaacttcctttcctccattcaaacaaaggctgaaaacaatgttaagttctatgaataattgcagtacgaatgaaaatagcaatgaattgtgttgactttccaagaaacagtttaagactccttttggaatccaaattttggcaatgcaatatggaatgccagcagactcacccaaacatctccaggagtagcgtgatttcttcgtcatgtggtggttcaataatctgtaataaaacagtcaaacctttaacccccatagacggcacatatgttttcacatcacccaaatataaaggtaaaatggtactacgtatctgttatcacttatcagatagccaccaaaagatcaaatttaggttgcaaaagaataccatggacagaacgatcccctccagagcttgactttgcagaaaaacatcacggaagttaagtggctcaccgcctatatctggatcgtaatacaaaacctacacatgcaaagggatcttcagaaagaattctgttggaaaaaggtcataaatacaacatatgaaattcgacgcagaatagtaatgcaaaagtcactgttaatgaaaaaccctttagcagaaaaagttaccctatactactacagattagcaatcttatctacttaagtaatacttttttttttatattctaaaatgcaggaggatgatatgatgacatcttcctctttctctttgacaaaaccagttaaggaacatataagattctaacgcagcaacactaaggatcacaatcatctctacttaattactagtcttgatattttacgatgtgggagaattgttaacttcttcttttcctcttatccaaaaaaaaaaaaagaataaaaataatacccattcacgtttctttgcttcatcagaagcaagttgttcctctgaactcaattgtttatcctttagagaactgtcagtagctctatcaatctccttaagcacacttagccatctagtaatcagcaatgccctttcttgacctctatatgagactgcagcttcttccaatctctgaattgtctgatgaacactcttataagccccaacaccctgcaaagttacagtccggattattcactctagtcctaaagtaatgcaactgttgtgtcataattacaactgtattgtaataaaagcccttaataccaaaatcaaaactggaatctagaaaaataagacccaaatactaattagaaatgggaataattaaaaggaaaggagaaattacaatgcggtcttggaacaatttggctccttcagcgacggcttggccagcgtgctggacgacggagtcggcatagtttttgacggttcgtgtgatgtttttgcggtttccgacctccacagccttattcacggccgttcgcagccacgacatattctcagcgatcttatggtctactagggaagaaacctcctcggggaacgaaaaccaattttagagacgactaattactgaaatgagagaactcggccaccgtccatcaaagtttttttttactcggtttaagtttgacgatttgcaggcgactaatatattatttcttttctgaaatgtagcttatttttactatgtaacgtttgtatattaaaccgatttaaataacgagtttatgtataagtattttgttaaaaatgtaaaaaaaataagatcaaaaacctaaactatttttgtgaatactataaaacctctaaaacatttaagtcgttttcttcttcacataacaaataaccataaaatgaagttaaaaaaacaatatgtgaaaaatatggaatttggtggcaaagaaatgaatagtggagttgagaaaaaaaatgatcttctaaagaattttctaactattgaaattaaacttctaattttcgtagtagattacatgatcgagaatatataccaaaaaaattgaagaaatcatagctttcatgacatgaaagatccttgatgagaattaaaattctaatttaaaattaatttaccaatgaaaaaaattaattaattagtttgtcatagttgtgaaatgcaatctcaattatagatagtaaacacaagttttttcttataataattttcttatgaagatactatataaataattaattatttttaaaaataaataatattaatttagattatatattttatagttggtaaatgttaaaataaaatcttcatatctatttttttggtaaaaaaaacaaaacatgtaaatgtttttaaacgttgcccaaaaaaaaaaaaggtaaatgttttgactaaaaaatatccaatcgaaacttgggtcggatctcggatagttttatccaccctaaacagagacggcagctcataactcaatcagccataaaggccaaagaagggcccaccttttagatacacacaatcgtcgcactctcagattcttctccggagcgatcagatttcaccgacgacggttgtttttgcctcctctttcaatcagaggaagccaaagcttagagcaacagttgtaaatctatatatagagagggagagagagagagagagctcctctcgtccagtattagggttttaaaggcaagaactactagaacaagagaaggtacaaaaaaaaatg

SEQ ID NO: 22976 - DNA, 3000 bp, Unknown; identical to SEQ ID NO: 857
  misc_feature (1)..( 3000): 2750-1469P.txt file - cDNA_ID_2126997; gDNA_ID_1620328; Annot_ID_153561

SEQ ID NO: 22977 - DNA, 3000 bp, Unknown; identical to SEQ ID NO: 858
  misc_feature (1)..( 3000): 2750-1469P.txt file - cDNA_ID_2127013; gDNA_ID_1620328; Annot_ID_153565

SEQ ID NO: 22978 - DNA, 3003 bp, Unknown
  misc_feature (1)..( 3003): 2750-1469P.txt file - cDNA_ID_2127019; gDNA_ID_1620328; Annot_ID_153567
gaatcgctctgatgcagagttgctccactctcttgtggagagcatgtgacttccctgcagcaattggtaaaccacctccataagaaaacattcccactcttgcgtaatgacaatcatgaaaaatgcaatatggtcataagtggactaacctgttctagggtcacgaccagcgaaaacgattggctccatcgctccatcaagctcagggagggcaacctgcagagccacctggatgggatgcagaccaagtgtgctgtttagccattcctctgtcgtctggaacaccagtggtactgccacaaggtaaggaacatcgagctttttcagggcttcgatagccctgggatgatcctgccttgcaggtccaccaacaagagcaaaaccagtcaaggagacagcagagtttacgatgggctgtttcgacaccgggtctacgaaatatttctctactggaccagagaaatccaaccctcctgcgaatataggaacgaccttagcacctctagcctcaagctccatgataacagccacatagtgactatcatcaccagtcacaatgtgactcctctgcaagactaaaccgacaaccgttgcatctttcctcttgagtgagtcattggtgtcccttctagtgtcataccagttccagtactccttcacatcatcgtacatggttggagcaagtggatgccaaattccagtatccaagaacaaaaccggatccgaatactcgattttgacacctttcaaagccggaacataagatccagaaatcatcttaacaaaattctgaagattatcaggagagcctccaagccaaaactgtaaactcaagatgtagagacgagcatcttgagccttgtcactaggtaagtacttcaaaaccttaggcaaagtcctaacaagcttcaacatactatcggcaaaaccagcagagccttgtttcttcctcttgaagagttggaaaaacggagactttgactgacccaattgagacatactaaaagatccaagcttgttcagtctcattacctcaggcattgaagggaagacaagaactgcgtccatcctgtctctctccttctccaccgcatccttaactttaatcgccaattcctcgacgaagatcagagaaccaatgaagatgttggcgtctttaaggtcttcgcagaagttgttgtaagtgttcttgtctctaagctcctcgaccaagtatccaaccacttcgtaggatgcgaatctcgaagtcttgttgagagattgcacggcttcactgagagaagactggtactgagcctcgaggacgacgtagacgattttcaccgtcggaacgttgtctctcttgatcggaactatacgacggacctccgggttcgtctgtgtgaagaggccgtttccagatacagcagatttcaccttgaagaaagatttggctggtttggttgatctgtgtttcttccggaggaaagaatgtttggtactgttagtgagcgaagagagatgctctgctttagaagtggatagagtgaatggagaatacacaagcgaagccattttgcggctgctggattctccaaacgttgaattcgaagaggagaggataggagaagagatgaatcgttttttgttggttgtctcttacactttttgagctccaagtgggagtttatgattctctcatcggtaaacgcttcggaccaaggaactaaaaaagaagcgttggttttgaaggtaagtggtgagagggaaggacacgtggacgaatagttacggaagaagggagagtctacttgtgaggttgagttttgtcggatgtatatccgcttgggacaatgagatggactttgctggcctctgattggctcattgagatttctattcatattttcatggtttgggagtgtggatattgagtgtcttattttctttacttatttgacaagtatttttatgttgctctcttgaagatcgtatttgcggtttcagccatgtaaaagattcttttccgatgacgacacttttactaggcatattcgtcgggtagccggtttaatccggtctagattttgtataatttttggttcagctaggtctggtttgatatttttctacttatttcttaaaaactggctttaatcttttaaggtaaactcaggatttttctttgaaaacgaaatttgaaatatcagactcataacaattgtaacaacaaatgtaaaagttaaaacactctaaaatgtactcaaaattttgatcatcatcatcactattttttttataataaatggatgtaaaaacttatcatgtttcaatatttaaaacttttttttttttcaatatttaaaacttacataaaatatataattaaaagaaagtttatgaattagaatattaagttatatgtaattaaatggagcaatacatgtagcctactagtattgttgttgcatgagttgcatcatattcgaagatatacaatatgtttttttgatataagagtaccgcttcattctcttttttttttttgtcatttcccaagtgtaatattgttattaatacatgggctatactaaaagccccacgaaaagtttactgaactatttgaggcccaacaagagcctatcggattaacgcctactgcagaagaaaatctgtctgcactccacccaagaaaacgcagactaattaatgaaatcaacgaaacggataggtcgggtctaaggttgaccatgaaccgcaacctgaaccaggagcaaagtggtcaagttttgccatccggtccgagtcccttggaggaataataccagaacagaaaaaaacagaaaagtcgacaataaacaaaagagacaaatttgatttgattggttccagaaattcgcagagaaacagctctttgtctctctcgactgatctaacaatccctaatctgtgttctaaattcctggacgagatttgacaaagtccgtatagcttaacctggtttaatttcaagtgacagatatg

SEQ ID NO: 22979 - DNA, 3000 bp, Unknown; identical to SEQ ID NO: 850
  misc_feature (1)..( 3000): 2750-1469P.txt file - cDNA_ID_2127027; gDNA_ID_1620328; Annot_ID_153570

SEQ ID NO: 22980 - DNA, 3003 bp, Unknown
  misc_feature (1)..( 3003): 2750-1469P.txt file - cDNA_ID_2127039; gDNA_ID_1620328; Annot_ID_153575
acacaacaagctaaaacgatgtattcactaattacttcacttcccagaacaacattgcattttatttttctatgtaacaatagaagatgacttggttcacatatagttaacatctatatatggtagcaactatacaatgtaacacatattcatctcaaactgtaagaattggaggctcaccggcaatttgacaagtctagatttatgcgctatagcccttaagatggcctgtttgatccaccagtagacataagttgatagtttgtatcctcggtcgggatcaaatctctcagctccacgaagcagccctatgcttccttcctgaataaggtcttgcaaattcaaacctttgccttggtaccctgttgcaatagaaacaaccaacctacggtaacaacgagtaatcttttctctcgcttcttttctacggcatagtatttcatttgcactacgcttcttcttccctctgccactggctaacaaaactgataccatttcattctcttcaacacttgttcccaaattttcaagttttgctccttcctattaattaccagcaaaggtattattaccaacaaggatacacaatgtttgaatctttccattaatgggccatgagagatattggataagaaagaaatgatataccttgaggtacaagcaaagctgaacctcctctaaacgactcaaaaacccagatcgtgaagctccaacaacaggaacactaattgtctctgcttctgcttctacgccagcattttcctcttcttcaggctccaaacgttcgtaacctactcttcttcttcttctcctcttccttctcttttctgactgaattccccatttctcaggtttgatcatcacggagctatcaaccactctatccactgtagtgtcaccgcaaaccagagccgtactaagctttatagaaaatggggatgataaagaaggagatggttgacattggtgagtcgttctgagtaagggagagattgtagggacaggaggagacggacacatagttgcggtagctgtagtgggaatcgtcgtcgccatggatggatgagctgcagagcttcccacaccttagatttttctatttttgttatctatcttctttttggtccaataaaaatggaagaagaagataattctctcttgtgttacttacttatatcatagagcctctctctgtgtcatatcagttatccgcaattaaatttgggtggagttgctttctttttttgtaattaaaaaaaaaaaaaaatcttttcgatatgcaacaattttggaaaaggaaaccaaaaatgagaaattacagcttataaatgttttcggattgcagtatatacaaacccaaagctccatagttttcggacccttaattattaatgcaaacccaaaattcgagtggtttcggacccataaaaaggcccaataaaattggattcctagtaaattgacgcatatgatgtcacatgtacagtgatggctgaacgagagataatggaccaagtgtcacggtctagaccccacgtgcttgagggtgggagcaacgcgctgttccaaagcttgtctgtggtgaacacgcgtacctctctgaatcctcgtgatcttacggtgggctccactaatttcgctgacgtggaattgtccacacacagtactcttcttggcactgtacgctcaacacaagaggagtcaattatgccaccactaactatatattaagattagactttaacaacaaaaaacctatttaaaattagatttttatatggaattagtaaaagcagtatattcgtacgagttccaaagcactcagagcctcaaccattggacgtcattcatagatgtacgaattaataatcattgtctttagaaatagtctgtaaagccgtctagatggtaagtgtttgagtcaatcgtttttgtagacggtttcatacgaaaatgtaattcaaaaagctgttttgtaaaaagattatggattaagtttggacgtagtttaattagacgtgtaaagtatacgaatacgcaaaactaatgatagagaatcaaaggtaaaacacattttgattccgaagcgggaatcaatccacctttatccatacgcatatgaataacaaagtctatcttcttttttgttctgatgatttaaagtttcaatactattttgttttttggatcaaaatattttttaattcactttttaaacaataaagtcttttttgggtatatagtattcttaaagtatctgctgctttaattttggtgatgcatctgtacctaacaagacaaatgaataattgttgatataatttcattaaaatagacacacgtgaagcaattggatttgctaaatgagataaccattccaagtcttaaaagatagatcactagacaacattgtttagtccttattctattctctccccactttcaaatcaattgtctctttcttcctgtatgcattatcccatgtgccctcaaaaaacattcctcctaagattgattagtctctcggactatacaattaatatcttaaataccagtttttaattacaaattactttctcactaactaaactttgaatcttttttaaaaaaaatatgtaaccacatttggatggattggtgaaaaacaaaattgcgggtggaggaggtccgtgaacatgtgacgagattaaaatgacacttgggtgaccacctttttggccctctttagctccaaggctatatatatatatatgcatacatccatccatttgtacatatatacgtgactcatcgtctttttcactcccacacgttctgctccagcgatactgtgagagaatctctgtgtggtactctttcatttttcctttcccattttcaaatattccgttacgatttcgaatatttcccccattgattatttcctttaattctcacgcttattagcttaatattggaatttttaggttctgaattcttaggctggaattgaattctgaaatg

SEQ ID NO: 22981 - DNA, 3003 bp, Unknown
  misc_feature (1)..( 3003): 2750-1469P.txt file - cDNA_ID_2127056; gDNA_ID_1620329; Annot_ID_153582
atctccttttttgttcttctttatttgccttttataagcttctacagtgatatttaaattaacctttaataaagtcaagagacacactgcaatcataaactcaccaaaagagtagaaaactaaatgtctagagccttctctccctcacacacacacgtttatgtatgtttcttccacattgttaaaactaaaacgatataagaaaactgcaatgataggttttacattattttctcttctggtttgatatttggatgctgttgatatttcactgacacgagagatagtgcaaatgaaactattgggacatgccaaaagaaaatataagaaagtgttcttattgcaacacaaaaagacaaaagaaaaggcagaattaatgggtgtgttacatcaaacgccctattaacgatcatttccatattttttatatgctctaatggcttgatggcatcacaaaacaatagaccccacattatcaacagcataatctctccccatatggacggtaaagattagaaaacaaaaaacaaaaagaaaatcattagagaattttaataatgtgagtgttatatcgcgtagacacaacacagtattcaagttggcttatataaatattggtaagaggaatgccataggttcccataaaccagctgagaagtaaaattttctattgcagagagaaagagagttagagaaagagagagagagagagagagagagagagatgaaacttgtgcaagaagaataccgtaaaggaccgtggacagaacaggaggacatcctcttggtcaactttgtccacttgttcggagatcgaagatgggattttgtagcgaaagtttcaggtttgaaggtggagggagaaacataagaataggtataggtttgttttggaaaaatgggcggtctttggaaaggaccttccatttaaagaaatgacctggttttggttgtaggtttaaacagaacaggaaagagttgcaggttaaggtgggttaattacctgcatcctggtctcaaacgtggtaagatgactccacaagaagagcgtttagtccttgagcttcacgccaaatggggaaacaggtcagaagaatcttcaagaaacagagaaaccctaaaaatgtttttttttttaaccctaaaaatgttctttgtttgttgtttgagcttttggatactttcatatgcaggtggtcaaaaattgcccggaaattaccggggagaacagataatgagataaagaactactggaggactcatatgaggaagaaggctcaagagaagaagcgacctatgtctcctacttcctcatcttcaaactgttgctcatcatctatgaccactactactagtcaagacactggaggctccaacgggaaaatgaatcaagaatgcgaagacgggtactactccatggatgacatatggagagagattgatcagtctggagcaaacgttattaaaccggtaaaagacaactactactcagagcaaagctgttacttgaatttccctcctctggcttctccaacatgggaaagttccttggaatctatatggaacatggatgcagatgaaagtaagatgtcttcttttgctattgatcagtttcctctaagttttgaacatggtagtggtcgcctttagtctaggatttgattcatttggaatgtttatatgtgcagcatatatatgttatcaaacgacgactgtagtagtttcctatgacttacatcaaaaatcaccacccactgtactaatctcataagtagtcatcatcttatgcctttgtttagtttgtagagtgagtgaaaagatgtgtaatacaagtcagaactctatttccaaaataaatagacttttgaagtttctgtgaaagtttgtaagaaaacatatataatgagttagaaattaatgttgatccatcagaaaggcatggatgagaaaagtctttgagtattcattcattattaaaaccatgaagagtgaaggaagaaaaatggaataagcaagtaacaacatgcatgagtgaacaaggcatattcatttgctaaataatcaagagaataggtttgacttgtaaagcttaagccaactttgtgaaaaaagaatgtattcttctactttatcatcttattgatcaaatcgagtatgattttttttctgtttaagaaatgaatccatgataaaagatcagttcccactctttagtctttatggtaagatatcttttttttttctttgttatatgatgaacaagtaccactaactacaacttcaactttttgtctttaaaatttcaataaaaaaaaaaaaacaaaaaagaagaaaaggatggctgcttaaagtaaccgagaaactatttatcaattaaaagtgtagaagaagggagcctaattgataatcagctcaattcaataaaagaagtattttttacaaaaaaaatgagatcacaaattcgtaggtttttactgccaatcgagcaaactctttaaccgaattggaatgtatgtcaaaaattaagtccttaaaatcttgtcaataaaatgaaaattttcggtatatttttaaatcactatttcaataacattgaatttcattataacttttaaaatttatgattaaataacattagatttgttactttaacacaaatcactcaaaatacatgattaaatacaccccttaatctttaaaacgcataattatttttgaaacatttttcattttatttaactaaattactgtaattgtaaaaaataataatacaaaatataaaaatgtgtcatagattttaatatttagctttgaaataataataattgtttttatttaattggcctaaccatatgtagttactactgtacgagtgactcatggccacacaaagttgttacgtcactcgaaatcttaaatccgccgtcaaaaatgctattcagacgaagcagccaccaaccactactcgagccgccgtagatccagattccttaacagtagatg

SEQ ID NO: 22982 - DNA, 3000 bp, Unknown
  misc_feature (1)..( 3000): 2750-1469P.txt file - cDNA_ID_2127077; gDNA_ID_1620329; Annot_ID_153589
gctagattcaagggatatacgacatgagcaaatcaacggttttgttttaccaaagatgacaactttataacgacagataaaaataaaatcataacggataaaattaagtaacaaaaaaaacaaattttttgtaccttaaagagtaaattgttccatgaaaggtacaaaagttgaggatcagctgatagattgatctccagattttggcttttgtgtaataaaatttgggtttggaaattggaacagagtagtaacaaacaagagatgggtttttttgtgaactctgcaaacatgaatatataaaaagttattaatttaatatttgtgtattagatgcaacgacaaataaattgacgtgagcaaatataggagacgaagggattgaattgaattgtcagtctgattttttctgatggctatgaaagttaggaagaagacgaaaatttcccagattttaccataaaaaactgcacaaacgttagtgggtatgttacattaccactttttaatctgtaaagaaatagcgataatttaactttttctctacaacaatactatatatttttcttgttaattataattataattataatatcatttttgtatgcaatcgtcggttcgtcactcacagtcacatatgctaaatctcaaatatatactttctttattccaaaaaattaaggatggtagtggaggttggaaaaaaagtcaacatatgtaggttgtgtaattttttttaaggatataccaaacttccgaccatatttatgaagaaagcacgggacacatgatttttttcggcatctgttcatgcattataaatagattatcatgagtttactattccatgttcgttctgttggaagttcatttcaagtttttttttttttgtcacaatagtctcatttcaagtttttgttactagttaattgagctattaagttttatacttaaagtatcatacactacttagccttgagatttttcataaatcaaaacgaaacagaagcttaaagattttaaatgaaatgaggtggtcacatacatatatgtgtcaaagatctagaagttctagattggatataaatgaagaatgacgacattaaccgcccctacttttcatctaaatggaacatgacatacaatagagtttatctgaaaggatcgataagatgtcgctatatttactaaaattatctataatatgatgagcccactatgtttttcttgacaattgggaacttataatataattcttggatatcaacgtataaatgatcatttacataatctagtgcttgtgttagtgtcgtgtgtaatatccaagttcaagcatgtatcatatgttgtacaaaatagtttcagcctaaaatgatatttgtggacctgtgttgtctaccgacacatttgtttggacagtggaaacaacaattctatactatgttaaagcataatcaagaagaataaaataaaaattggttgagatgtcgcaaggagaatgacttttagatttgtttatattgattcacttaaaacaaatacaacataaaattcaaatttacacatattaacataaattgagttgtatgttgtgctaagattacttagtgatattttaaagcccatgcaaaaataacttatcttctaaagaaacggcctttttcttattttttgtaaactttgacaagcttagatcatatgattgaattgcattaatggacgttattttaattatcttgaaagatctaacgtcattttcatgttaactaaatacaaaacatcttagcattcatagctgaataagaggcatagttactattcaacacttttagctttaactacaaccttcaaaacacacaattttgtcgttttgtttgatttaggcttcgtaatcttgtaaacagaattcacctacttcagtatttcttcttttacactacgatttcatgattccacaaagtaaaacatcaacatcattcttgatttggaagtaaaattgtgaatcgtgtatctaatgggcctggtcaaataggcccaaacatggatccgcaaataaggaatttttctccttacaaaagacactctttctgagtaagaaggtttcgtggggcctgtcgtgacctctgaaagttccctccatcaccaatcattcggcacaaaactaatatttatattttgtttcctttatttattttatttaataaaatatttatcgatcccaattttctaaatcttgcttcttctctcgttcctatatccgttttccgatttagggcaccaaattgaatcaaaatctccgcttcttcccaatttacgaaacttcacgaaaaatcttcttcggattcttcttaaccctttctctcaatttttcttccagagttttctaattgggcactgtttctcttcttcttcttcttcttcctccgtacgcatccttctcctttttactgttgagtgtgaacagatttaaacaacgtcatttctagggttttcggagttcaattttgttatcttactattgaatttgcatcgcgatagctgaatttaggatcctgtgttgttgctcagtcgtattattacaactgttgaattacgcttgcgtttgattgtttttttctttattggatcctcgtgaggtttttttttcttgttctgaatcgtttcctggacttctgatttcctgctagaagtttatttcatggttgctgattcattatcttcttgtttctagatgaaagtttactgtgtataaaccttcaaaggatgagaatttcaatcttactttgaacaatatgtagtttatacagtagcttcgtctgttgttgcaccatggttgataagatttatgtctcctttgtttggtttattgaattcttccttttttccaggctattcatttctgagtaatcgtttattccatctcagattgtaggcggtttcgcgtcttgtcaccgaatgatacattgtctcacgtgagattgtcagtcagttagtgcaatg

SEQ ID NO: 22983 - DNA, 3000 bp, Unknown
  misc_feature (1)..( 3000): 2750-1469P.txt file - cDNA_ID_2127085; gDNA_ID_1620329; Annot_ID_153592
acaacccttattttattgtagccttgaaggaaacccaaggcttataaaaccacctaagaaggaatttcctgtggcaattgttacattagttgtttttgtcacagtcattgtggttctttttcttgttttcagaaagaaaatgtccacgattgtaaaaggtacttgcaagagaggcattaaataagaaaaacttataaatcttgggaatgccgttcgttgctccgttgcatgacaagaagagatgcacattaaaaaaagaaatatcataacatccttattctgatgtacaggtctacgcctgccaccaaggacatcaatggtggatgttacattttctaataaaaaaagcaaaaggttcacatattcagaggtcgtccaagtgacaaagaacttccaaagagttttaggtaaaggagggttcggcatggtctatcacggtactgtaaagggttctgaacaggtggccgttaaggttctctctcaatcgtcaactcaaggctctaaggagttcaaagcagaggtgcccatatttctgtaatcttcccaactatactatgatctgtttctccaaaggttacggatttcaacattttcttaacacgtagtcttttttaggttgatctccttctgagagtgcaccatacaaatttggtgagcctggttgggtattgctgtgaaggagattacttggccctcgtctatgagtttcttcccaatggagacttaaaacaacatttgtcaggtgatatattttcttaattatgtcacgtctaatagttgctcatgaaactcagaagacctgaatggatctaacaatctaatatacaggaaaaggaggtaattccatcatcaactggagtattcgactgcgaatagctttggaagcagcactaggttcgtactatgttaaaaaactgtaggacaagatatcaattccgttcatattagtttgatgataggtttgatgatatttgtactcaattgcataggtttggagtacttgcatattggatgcacaccaccgatggttcatagagatgtcaaaactgccaacatattgctcgacgagaattttaaggccaaactcgctgattttggtctttcaagatctttccaaggtgaaggcgaatctcaggaatcgacaacaattgctggtactcttggataccttgatcccgagtaagtattattagtttccagatacacacactcaaacacttgttctgaaactttttattccttcttcgatgattaaagagtatatattatgttgttgtcttgcagatgttaccattcaggtcgattgggtgagaagagtgatgtctacagtttcgggatcgtgttattggagatgatcacaaaccaaccagtgatcaatcaaacctcgggagattctcacataacacaatgggttggctttcagatgaaccgaggtgatattcttgagattatggatccaaaccttcgcaaggattataacattaattctgcctggagagctttggaactggcaatgtcatgcgcgtatccttcttcctcaaaacgaccatccatgtctcaggttatacacgagctgaaagagtgtattgcgtgtgaaaacacagggataagtaagaatcgaagcttggaatatcaagaaatgaacgttagcttggacactacggcggttcccatggcaagatagttctgaatgttttctactaataaggaatcaatactcaactagttacacatttagcaagatttgtaaacttgttaaagtaatgattgaagtgtgtaattgtgtatacgtcttgtagataaactcgaagtcgacaaatttccttctgcgttcattgattattaatatattcagatcaatattctctgctcttttggtttcttcatatgtcttgagtaccacgaaaaggtagttttgctttgaccatctacatttcaaagatcattttctctacaatcttggtttctttcaatgtggtttacttttgtctgtaattgttttctctcatgttaatccacttacccatttctaattttttttttttttttttttcctgcctatgaaacagaactaggtctctcaatcctagtcaactatcataatgttggtgactggtgagtctgcttgctattgatgccatcatgccactagccttttgtgtgacactaattaacgaccattgaccagttctcagaatttcttcatgttgtcatggtgttgagtgtctagtggcttattaaagccaatatctttgttgcgtgattgatacattctttggaagttatactaaaagcaagttgcatatttctgaccaggaaactaaaaactagactgatatacacaattttcatgatagtgatgttggaccattatctcccttttattcttcttattcctctcgtggtgaagttgcattagaatacaccttttggtcattatccatcatgtttaagcctaagggctaattgttataaaccttgtttatttcctgctgacctactttgctttgtaatatctagtcagcatatatagatcattgtgtgcctaaataatgctgaatattgttgtggtttctcactttttattcatatgatttgaaacaaagtcaggtctactacatatataagtcaacgaccattagaatgtcaactctttttgaacatttcttcatgcatcattgtggtagtctggtggctattaaaccaatatcttttttgtgtacttgacaagttcttttgaagtaaattgcatattgtctgaccaagaaactatactgatgttcaatgccacaaatgaccccagtcaagttcataatagtgatgttggaacattgttatcctcttatccttcttcttcttcccatggtgaagttgtaaaagccatgacttgaaaaagtctttgcttttagtttccagtttgttttttgcttatatatcctcttgttatcttcctgagcttaggcaacgatttttgtcattggtgggtaagaagaaaatatg

SEQ ID NO: 22984 - DNA, 1508 bp, Unknown
  misc_feature (1)..( 1508): 2750-1469P.txt file - cDNA_ID_2127113; gDNA_ID_1620329; Annot_ID_153600
cctgtacttgttttgcatcaaaaggaacaaattttgtccaagatcagttaaccctgcgtggctgcaggctgtgaggatggccgtgaatgttaagtggtcgagtttctctcccgtggcttccatctgatcaaatagctcaactgctttgtctgcgagcccgtgattcgcataacagaagatcatcgagttgaaagtaactgttgtcttctttggcgtcttgcgaaacaagatcattgcttctgatatgaagccacatttgccgtacatgtcaagcaaagcacttctaacaaacccgtgatcttctagtccagtgactaccgagtaaccgtgaatctccttcccgtgcttcatatatgcaagtgtggtacaagcaggcaatagagttatgatcgtagcagagtttggatacaacccatgagttaacatctgtttaaaagcatcaaaagctttctcattctgaaaattatgtacaaggcctgatataatagaagtccaggacacaacgtcgggcttgtaaccatccaaacacatcaactcaagaatctcagatactttttcttcatttctcatatgcgagaaccctgaaattagagcattccaagtgataacatcaggttttattcccagtagtttcatatctttcaccaagttcaatgcttcatctgcttggctattattagcataaccagagatcatagcattgaacacgaccaaatcctgttcacccaaatcactgaacaccttcctcgcattccccacctccccaaacttcgagtacatatcaataagcgagctaactataaaagcatcagactcatacgaaaacttcagcacaagacaatgtatcatcttcccgaattctctatcaagcagattgcgactggctttaagaagactaggaacaatgaaagcatcaagttttaaaccgtctttgtacatttctctgaagaaatccaaagactcctggtaatacccatttcgagcacaagccccaatcatgacaacacatccactaatatctctcttgggcatttcatcgaacaccttcctcgcatctagaactttcccacattcaacataaaaagttacaagcttagctgcaattctcgtcaagcgagcaataccagatgtcactaaatgagcatgaagcactcttcctctacaaaacagtcgatctcgaccgttggcttcgatgagttcaacataagaaccgattgataataaccgaaaagaactaggaacgatggtaagtttcttcatggataagaatcaaagcttcaaactttatcaaaacccgcattactgatggtagatttcagtgacggaagtaataaaagctcccaattttatctgacagagaacgaacaaggaagaacagagttagcgattataccagattaaacggtacggttaatactgaaccggaaatcgaaggagcggttaaacaaaaaccggattcgattgtccaaaaagggggaattcaatccaatgaagcagagcaaattatg

SEQ ID NO: 22985 - DNA, 3003 bp, Unknown
  misc_feature (1)..( 3003): 2750-1469P.txt file - cDNA_ID_2127140; gDNA_ID_1620330; Annot_ID_153609
tgctctaacagaacaaagtgcattttaatgtaaaacaacagaaagattctcatatcacaagattgaatgctattcaacacacaaaacctagaaaaaaaaatacgactctaaacaaaagattaaagatttgtgtaccacaagcttaagggtttttgattctttctttctgattcccgctaattcgactctgcgacggtctttaacaacgagaactgatttgatttcgaaattctcagagtgggataacgctaagaaagatgacaaagagtcgtctgaacatatatagttctgccttcgtcgaagcagaggaaacgcctgagacgctgctaatcgagccgtagtttccacgctacgcgtttgcttttattcttcaagataatatatagtattaattacagtatcttcagaaatgaaaacatatgtcttctattgtttatatgaggaaagaaaaattcgaataagttctagatattgaaaaatgttattacgataggatctgattccagtcaaattaatacacctaatccattacagattttactaccattttaaagtcacgtgacttttacataatctaaaatcaaaagagcgaaaaataaaacaagaggtcggtacggttcggtttagcattattagaaagtagaaaccaaaccaaactgaattggataacgttcattgatcagaataggtaataggtcatgtttctggtaatagctgacgtttctggtaaagtcttctgtagattcttgcaccttcgaactctgcgtggatctctcgttctgttcttatacccatcgggttttccgttaaccacccatcctctgtgtcaactgtgtccatgtgttgaagaacatttgattcctcgtccaactgatctctcatgtcttgagccacatccagcacatcggattgcacaaatatctgtgcacaaccagtaacaaagaaaatgtatatagttaagtttaaactgtaaaagaaccagtagtgttggtaggcagtaagcaaaacacttacttttccaccgggttttaggttttgaagaatggaattcaccaaaggcttttgaacaacacgtctcttttgatgacgtttcttgaaatgaggatccggacactgcatttttacacgtcaaaacaaataagttggattatcatcaccacctgaagaaagagccggtaaatatagctttctcggatgcttacaactttcttttatcacttaccaagattgagacaatctccaatggtccaggatagctcgatataagatgttcaaaagaaaccatggcgtttgcaaatatgaagtgtctgaaacccatccatcaaagaagttatcaacagagtatataacataggtgtattcaaaaaatctttcctaaggttttgggatgcagagattacacgtttgaaagtccgagctcattcacccaaaagttggcgcgcttgaccagctgcaaagaaatgtgacaaattaaacttcattaggccaaagataccgaaagatacatcagcttaagtagatgaatgatcagctggaaaacatcaaaacagtcaaaaggagatagatccttactttctgacgtatttccagccccaagtaatttcttgattcaacattcttattggcttgccataggagaaatctgccactacctaaaatataatgacgtagccacaggttagtagaagaatccaagttcaaaaaccaattacaaggcagagaggcaagaacggaaatcaaatgggaaacttttggcctttaaaagttgaaacacattcaagcatgaaagaggcgcaagaccaggaacgatataaaggagagctatttgactactcaaaattcaaattcagattccagggaattataccaattacgcaaccaaaagtctccaacaactagtgtataatgtaacttaactaagaaaacaggatctgcataagtatatatcaattttcagaagaagatataaatagatttgagttgagacaaagcataagtcccacaagtctaagcaagctcacaagttaccacttccaatatccaccataagaggaagtgatggatccttataaacttcatcccaaacaggaactggagctggtttctatcagaaagaagaacagtataaatcagttttagtgtttcacatatcatttcaaaagtcacaaactttgcaacatcatcaacttacagagaaagaggaactgagaggattaacatgctgtctgattcttacatgacccacttcctgcaaataaaacagagagaaacacaaattatactcaaccactaattagagatactgatagaccagagtctatgaagatgaaaagctatctacttggaacaaaaagagaaaagaacactaatcgaaacaaaaacaatacccagaaagcaaagactggaaaaggaaacaaatttagggtaagcaaaaacagagggagagagaagaaaggaggatacttcagatatcttatgattgaggttaagttctgcatactccaattccaccaattcattgcttctcagatccttaaaatcgacacaaactgaggtagacgctgacgaagacgcagaaacggcattaaatgctctaaagctgttacaatggcgagggattttgtgttccctcatgaagataaacggagatgatgctaaggagaacacccttttcgccaggagcaatggtgtagctgaagacgaagagcaagcttgacatagagaagccatttttgttagagaaacagaggaggattggattcaattccagaccataaaaatgttttcttttagtgttcttctcctgcttcttaaacccaatgaaggaagaagaaagctgtgatctcaatctagaaaacgttcaagagttttgtacttaatgtgataagaatcgaaataaatggggtgtttgtgtaaatacattaaaatgcttaagaacttgtggattttaaaaactccagctttctccgcttgagctcatcatagccactaaccaaaaagatg

SEQ ID NO: 22986 - DNA, 3000 bp, Unknown; identical to SEQ ID NO: 870
  misc_feature (1)..( 3000): 2750-1469P.txt file - cDNA_ID_2127144; gDNA_ID_1620330; Annot_ID_153610

SEQ ID NO: 22987 - DNA, 3000 bp, Unknown; identical to SEQ ID NO: 868
  misc_feature (1)..( 3000): 2750-1469P.txt file - cDNA_ID_2127147; gDNA_ID_1620330; Annot_ID_153611

SEQ ID NO: 22988 - DNA, 3003 bp, Unknown
  misc_feature (1)..( 3003): 2750-1469P.txt file - cDNA_ID_2127200; gDNA_ID_1620330; Annot_ID_153629
agaaaaacacaattccattaactttaatcgtacaagtgagagtgttagaaattgtggttaaacaatgatcaataaccactaaccatttcgtaaaattcaccgacgactttatcaaatgacgaacatgatccgatggatccacgaactaccgaaagagaagtaacctcagaactatgtagaaaaagcaatcctattattcattcgaactaattcaatatgcagctagttttttggtctaacgacttcttatcgtaccatttttcatctcttatcatttttaccatattcaaccataccaccatttttatcactattttgtacagttacaaagctcttaccgtcttgcgctattaatcggaccattaaacaacttcacataaaattttatattagacgtttgaatttaagtcgaagttttgataatcttaaatgtaacccctaaaatacagtcgatagtatttgatgaaacaactccctcattaaaaatcgattacttttataaaatagctgtaaaataaatggcaacccaaacgaaacaaaaaatatctatcccccgaaacatattacatatactccacatctttcatatatgtttgtttatcggtatgtctttaatattatctcttcttaccccaaaattatacaacaatctttcaaattacagaccactttcatggtcgttggaaaaaaataattcttccatagtcgagaatatgatttgcaaaaatgttattaaataataatcattcaaagtatcttaataaaaaaacaaaagaaaagtggaattggtccataacggttcggggaacttttctatgaaccggaaactgaaattcgtgaggacggtacacgtgttaggtaagaacacgatccgctcgtgtgtaacagccaatgatgtcgtcattccacgtcggtacaagactttttttttgtcgtcaacagaagatttcaaaattaacgaaaccgttcccataaccgaaactcacataaaaacaagacacaataaataaaaaactttaggtacttttctgtcgtttctttggtttctaacgtctattcgtgttatatttgttttattcttcatttattattgttgaatttaattctagttcgagttcagttacatgatttctctctttaatctctagtattttaatccatcaaaattatgtggttgcatactcgatcgagtttagtacaattactaaaatatgtagctttgtttagtcatatcaagactatagtaagttgttacgcatgaaagataattattacattcaaacgaatgaccactcaattcttatatcaaaaagatacaaaaaactaaagtctacaacttataggttcaatgggagcataaatagtccatatcattgaataataatggtcttcaatagagttggttgttcaattattatttttggtttataagaaatgaattgaacttttgtttgtcaccattcacattttcttctcttttttgtacttttagttttcctaaaaattaaaaaaactatgttcccttcgtacctaaaacttactttaaaataaccaatttgatgatagttttttttaaaaaacttcaacaaagattatatatttcatcctgaaacaaaaattacagcaaaatttaaatttaaactagtagcaaaaaatataggatgtgcatatgttttctgtttgccacgtctgttttccattaaatgtacgcacaacattgtttgagttcaattaactatttaagtaataaacaaaaacaatgcttgaatttcactgaatatagtatataagtaaaaatgtatacaccccaaacgacgtcgaacccatcgttcaaaagatattgaagtacttgaactagttgttgagctaatcatcatattactttataatttaactacacaaaacgagttctttgaaagatgcgaatatatatatacacacttatacgttatggagagaacagaaagctcataaaagcaatttatttctctccctttaagatcttttcttgctttgtgtccgaaacagacaaaaattgattctgttgttttttcccataattaactcacacacacacacttaacgtacgtgcaatatctgtatgtgtgcatagtatatactatagccacacgagcggttcaaaaatgttttttggagtttccgagactgttgagactgtggggcctatggtcatcgaaccctcccacacgcacgagcgggtctcgttttgcatgcatctacactacacgtacccaccgacttttccaaatcccttacttttgcacgtgtagagagagagagctttgtactgaaagtatctcattattcgaaatttttcgtgtaagagtaaaaactaaatcgcaacgtacgtgaaggaaaacgtgaaccttgaatatttaatgttttcgtgcggtttcattttaactatttaattaacacaatattagtacaataacaagcagctcttatgaagatagtgatgaaaaattgttatagatctatcttggaattttaatgatcgaatttcgattttgtacgaccaccatcgaggcatcgactataaatatagttaaaatgtggttgctgaaaaaaaaaaaaaaatgataaataaaatgaaaccgcacgtaattgtataaaaccattagcatgggattattaggccacaatttggtaattaacacttgtaattcatttgaatatgcttttacaaaactttcccttcaatttcttttggtgtgtgaataaacagctatcaattttgtttttcatgtacattaaataaccactctgcactcatcatcattttctaaaatattcttctatatatattaactagcttgcaaataaatgtaaataaaaatataaatttcaataattttttttagagaatctctctttcctcttccaccatataaacagtgaaaagccattcaagtgctctctccctctatctctcttctatttttagtttctcttcccttaatccctaaacccagaaacatg

SEQ ID NO: 22989 - DNA, 3000 bp, Unknown; identical to SEQ ID NO: 866
  misc_feature (1)..( 3000): 2750-1469P.txt file - cDNA_ID_2127207; gDNA_ID_1620330; Annot_ID_153630

SEQ ID NO: 22990 - DNA, 3003 bp, Unknown
  misc_feature (1)..( 3003): 2750-1469P.txt file - cDNA_ID_2127224; gDNA_ID_1620332; Annot_ID_153667
attaaaattattaattataaaaatacataaatttattacccaaagttcccaacaatattttcccaacaaaaattttcgacaatagtttcccgccaaactattttgcaggaaatataaattccgtaaaaaatttcccgccaaaaacaaattacacccatattttcccgccaaacaaaaggaaagtcaggaagaatattaaaaattaaggaaagattctacgcaattcagtaagggttcacgaaattcagattttttttttttgtaacccttcctgaattttatagaatatttcttgaatttggtgaaatctttcaaataatcatttctgaaatttataaagaattttacaaaattcagtaaggatttcaatacagattttttgcgaaatctgtcctgaatttcgtagttaccttcttgaacttttttggtgggaaaaatttgacggatattttttggctggaatagttttacggatatttttggcgggaaatttgtttgcagaaaattttttggcgggaaaatttgacgaaattgttttgcgggaaaagtttgacaaaaaaaattggcggaaaataatttcttttatttacttttttaattaaattacttatttatttttgacatataattaaattttgtagtgatatttttgaaatatttcaaaagagatgatatttttggaagaaaaatttattagtgttatttttgtcaatcctcctagaatatatatactattttatatagatgtagttttcctaattctgaaaaatttaaaatttcttataaattaaaacggatggagtaattaaactatcatttgttgagattaattttaaatttttattactccatccagtttttcttctcctttttactttaacttagtatatattctaattgaggcagtaaaagtaataaacctaatttgttgagccaaaacagcttagataacttctaagctgtaattgaataatataatgaattttgtatttgggttagttattagtaaaatataaaaagcataacagtaaaaaaacaaggatatgatcaaaattcaaatgcttatggaaactgattcacacgtaaaaatatataaatgtatgaaaactagatgtatttaaaatagaaattaattgtttgatctaaaaataagaaattgattgatatatcttttaacatgtgttacgtagtttttaacaaaaacatatgtgttacgtaatcttaaaattctcttaactgcaaagattgattatagtcatttgatatgttataatgttaactatattttttttgtatgaatgtaaacctatattcaacacaaaaacgtttttctcattaaatgtaacatagagagtagaaattttgaataattgcaaagcagcttagaagttatcggtacgacgggagtgaaaccaaaaccgcagtccgtcgtcaagtttagagttgcttagttgttgaatggtgctgaatctgttccaaacattatttttctaatgatttttgtgacttttggagccgggatttgcaggctcaccgtggcgtctagcgttctctccacatgatatggatcaatgcttgaaagacatacctgagagtgaagacatagaggttggcttggaagaatcgagtagaagggaagtgattgatctccagctctcgaagtgttgactacatttatatcgtgcaacatggttactttgcaacggcactgcatcagggtccaatttctgcccccaaatacttttgttgaagtactgctaaggatttgtttcaccatcaacagacaaaaatatctgcattattatgaagctcgcttagcaaaattctctcgattcctctctcacgatcacaaaacaacaatcacgaacgcatactcaattgtacatctcttgaaatgttgtcacttctctattcgattggtttgtaactccattttcctcgtttgtgaaagcaaaaacaatatttatttacaaatgtatgcatatcgaataaataaaagtataatattaaatcatactaaactgaagaaataccatttgtgttaacgttttcatgctgagtttcaatggtttttgataatgtgatgagagtttagaactggaagaagttatacttactctcataagaataatgattaggattacataggtttatatagtaaagagatttcataaactagatgaatacaaatatgtaaaatatcttatatcataactatacaatatttgattatatattgagaatcttctagatacttccatacccttctatagttttaactcaaaaatcaattggcaattggatttaaagaatataatgtgggattccattacacttacgatggatttgctcaaaaaaagaaaaaagaaagaaagattccattacatttaggatgtgagattcgtaacacgattcaaaataatagctaagaccttttatcttaccgaattcccttttaaaactgcaatataccctacttggatcaccctaaactaaagtctaaactatcattttatggttataaacttaattaaaaccaactgacaatgaattgaaaaaataatgtgagattccaaacattatttaatttttggttgtaaaatcccaaaaggtatatttaccgcctttaaaaaaaactaatgaaagcaatttaaattgtttctgtgtattctcatcatttcccgtcacttttgtaacaattccaacgttagaacgatcattcactcgcgtaaattgtttttattttattttaaagcgttttaaaccataacataaaaaagtttaaggatattataattttttatcaaaaattaatgatattaggttatcaagtggtcgagtaaatcatctggttatataaaattggagaaaaagattttctacctatataaatatagatatcatctgtacatgcactccacctcattgcaaaacaatttccccactatctatcctccataatatagtattcttcttttctctcctactttctctatagtaatg

SEQ ID NO: 22991 - DNA, 3000 bp, Unknown; identical to SEQ ID NO: 877
  misc_feature (1)..( 3000): 2750-1469P.txt file - cDNA_ID_2127272; gDNA_ID_1620332; Annot_ID_153677

SEQ ID NO: 22992 - DNA, 3003 bp, Unknown
  misc_feature (1)..( 3003): 2750-1469P.txt file - cDNA_ID_2127299; gDNA_ID_1620332; Annot_ID_153684
tactacaaagaacattaacacttcaagaagaactcaaagactctaaagtcgcattcttacttgagcaggttcgatatacaattaaatcctccttacttaaaacacaaccatgatcataatgttgattagcaaaacatgtatgtctggttttcttgcaggagagagcagaggcttccatgaaggaagcagagacggcgaaatcacaatggctgtgtcagatatgtcagacgaaggaggtggaagttactattgtaccatgcggacatgtcttgtgtcggcattgttcaacatcagtctctagatgtcccttttgtcgtcttcaagtcaatagaaccatccgaatcttccgaccgtaactaacaccaaaagtcaaatattaattacccaattcatcaaaggttttgtcctctatacattacaacagtttctgctaattcatttgtaaatacgtttaggtgttttcacttttgtatatttaagtaaagaaattttttattttaagccgctatcaatctatcatcattttaagcattgagtagactgggtattcaccctatcaaatatcaatatctcaaatcaaatttgaaatgagccaaactaggcaaaatcttcagagaccatcacaatatcagctaacgagtacaaaccaaaaaagctttggcttatcaagttttttctgacacttttctttttctagatgacatcaattgtttcttgttgtttatctacttcttctttgaatttttcttcttaacaaccaacatttgagcttccactgtttcttctgcatcgttcattaggttattatcatcaacattcaattcattttggaaatgattcaaaaagttgtatgtctccgaaatataggtatcgctaaggattctttcttcacctagggacaagactctcaccctagacaaaccaggggagtctaaagcttggtggatttgaagctccagacaccatccatagctatttttggtttgtctacatcaatgcttgtaggaataatttttttttccggagaagctgatcaccgttgtgatagagagacttgccaatcatatgtaagcatatggtctcatcaatatcataaattaataaatttataaatttatcagaatatattatgtatatgtaagaaaagttagtgaaatatgattctagtattgtttgtttttcttaaataatattaagttttgatcaaatattcatttttaatatgtttactgtataaaaaaaagttgtgctttttttaaaaaaagagaatatgttcttttacttgtatttgtatctaaaaagatgttggttatgacaaataaaacttcttttcatataggaaagttaaaaaaaattacaaattaaccaaatctctctataaattaataattcaacaaattaatatctctataaattaataaaatttcacgttcccgacattattaatttatagaagttttactgtattcctttgtgaatttccttttcataatttaaaactaagttggcaaccttttcatatcataaataagtaaattatttcaaactatttttctggatttttaatctgttcattggagtcatatcaagtcttgcttcgtatgatttgttcttcctactcataagagctttgtagacatacttagatttactagactatgaattgtgcaaattttgtaatgattaattttaatcatcttattactttctcgattcaagatgaattacggacaaagatgaatgtctgaacctttagcgttcaatcttttatttcttatcttttcttagtgatgcatataatgctaaaagaaaaagatgttagcaaaggagagacttttggattatgtatgataatggaaaaaatgtcacatggattcatcacagtgaaaatgatgaagatgaaagtatgactcaaaaggattgagtagttaaaaatttgagaatgaccagggagaaaggaagaaaatcaaggaggaaaatattttagtaaatttagatgattacatttgagtttttttttttttgtcacaagtgtgttttattgatattatagagccaaaagtaacaggccaataattcacaaagactaaaataaacaagcccaaagaaaaaaaaaaaaaacagcccaaaagcccaaatgaataaaccctaaactgaaggaagagaacaaatgattgttgtgcgccgcatagaaaacacgtgtcagtgggaaacattttgaaggacacataggaactggaagagaagggagtcgccgtcagaagcttcaattccggccgaaacaccggaaaacttgtttaattggcatagctcactcgtcgctcaaaagattaatggcgaaatttcagttgtagcttggacgagaatttgactccacgaagtgcaaatcttcttcttcttctttttctttttcttcctcttcttcttcaatcaacatctttttaactcttagggttcatcaatctttgaactacaagcagaagataaaaaaaaaacaaatcaaatctaaatccggtcaaaaaaccggagaaaaaaccggctaaagacgccggagaaaagcccgacgaaacaagaaagagggtatcttgctctcgggagataagccagccaccaccgctaaaagtagccggtcgatgccggaagctgagccagccaacgcttctaaggaagccagcgatgccggagtagaagccgaccaaacactgctgataaagccagtcattgctggccaaaaaagctgaaactctctgaaagatgaggagagagaagagagagaaaaccctatcaacgtgaaaataattacatttgagtttatatactcaaaacttggaagtaaaggtaaattaaaatatgattgttagaaacaattacaccaataataaaacgacacgtgtacactacgtagacgttagataaccacagcaaaaggatatgtattctcgaggcgggagagagaaagagaagagagtgagagagatcgaagaacatttacacacatcaatg

SEQ ID NO: 22993 - DNA, 3003 bp, Unknown
  misc_feature (1)..( 3003): 2750-1469P.txt file - cDNA_ID_2127307; gDNA_ID_1620332; Annot_ID_153686
tttttatttactatttaaaaattgtcaattactacatataaataaatttggtatgcggtgggttgttgtccgtggaacggtgactgaaccgaacaatgcggtgcggttcaaatagtaacgaatgtttttgcatatatatgtttttgttattatttgaactgcactgcactttatccgcagttgaacctaattgaacctaatgaaacttaaactggtttagtttgctaatattatttttattttatttttgaataacttttttttcttttcttttttgtcatctgatcatttttcttttttgctttcgttatggataagctgtaacgcggtttttgttttgaacattaataataattaattctattcttcgaaaaaagaaaaatatataatagtgtgtcgttttccggtggcgacgagagggagaaccggagaagagatctctcgttcgtttttttcccggtaaatccggcgagaaaaagttcacattgaatctacgagaaaatttccttccatttcactccacgagttttcacctctcttgttcaatctctcaacgtctctccctcgtttctcgttttcgctttttccccttttcctcttctattttaccggaatccgagaatttttgatcagatctagtttcagaaataggttagttccaacaatgttgacggaacgaggaaggcgaatttctggtttcaatgggagtttcgaatttagcaatagaaaattccgtggttatggattcgtagatcgatctcaaggtttccatgaaaggagtccttcaagatcatgttctgtttcgaaaatccttcgtatcacgccaccaacctcgtctccaccgtcttcggcttctacatgcgctggttatatcgaacaccgggtctccaagttcgatactctcgccggcattgccattaagtatggcgttgaggtatgtattataatatatgagtgtatatgctttggatgctggattagttttttttccttgtgttcttagaaagtgctatttcaggttgcagatatcacgaagctgaatgggcttgtaactgatcttcagatgtttgctcttgagtctctccgaataccattacctggaagacatcctccttccccatgcttatctaatggctctctaaatcatgggtacttttaagcctctttatcctctcttcttagatgacaaggctgtagtctgttactttgatttttatcttcagtgatggatttattcatatgttacttgagttgtgctactgtgcatttcccaagttcattcaaagaaacatagaccaggttatagaaagaagtttacataagatggaaaatgcttagtgagagttgtttatgctggaaaatgcttaagggagacatgatagaaaaccaagtgggtacaacaggtccttgtaaaagagcagttttgacgtttcaaattctggtttcctgcacagccaaaactcgaaagtttctatgcgcaatagtttgtgcctaatgggctatgaaccttaagtttcttggttagtgcatacaacctacgtcctagaatttttttcacattgatataagaatgaggacgtaggtaaggggacgagtaaagatgtcgagaattgagacagttaagtagagccttgaatgatcatgatggtagtatactgatttgcattaaagggcatccacatatcaaagtgatcctatccccatgactgacatatgaaatctttttgcagagaggattggtccgagcaagcttcatcctcagctagcaatggcaaccaccaggacgtatttgactccttccagtctttgaggttgaaccattcagaaaagaagatttctccagccatgaactccttgcaaggttattatggactgaaaccaaaaaacagaagagcttctgaaggttttgggatggcagtctacaagaacgaagcttctcaactccaagacaatgatcagtatctcactcccttccccgccaccagtactcccttatcccaccacagaaaatcaagaagcttggtagatgcagttatcgccgaggttaaccaatcacccaacccttcaaaagcaggaggaggagaagtgaactctactgataagccaatgagaagacgccaaaaatctgaagccgattttagttcacgagctccagaattgctgttgaaggaagagaacagaagcagcagtggcgcgttttctgcaatagctggaaaaaatttagcactgagatccaaagcatcaagcagagctaacttatcagcagaaaccagacatctcaattccataccaatcaatttgatggatgctcctgtgggagacagcttctcaagcgtgaggaaatctgttagcgcatctagtctacaagaaccaaactgtaacagcaacggttcatcgctatggccaacctcaaagtggaccctgaaacctgagttactcacacaagtagccatggctagttctatttttgacggattgcctaagccattaactggtcggagaaacaaaaaggctgtggactaaggttagttaggtacttaggttccgtcggtctcgttatcgactgtccacttttggtttttgtaatccaaaagcaagaagtcaatggcttttataatagattgaggagtaaatagaaagtaaaaagtgtattgctgcatttcattcattcaaaacaataaggcaaaataggttgtgacattgagagtcaaaattaggcattaaggttttgttgaatttaatttgtacgttagatgaataatcgaatatcagaatactgtattcaaagtttcaaagtatttattggttaagtagtttgcaaaataatcaaaaaatacaaaaaacaaaattttgttgtctaactaattttccactccaataaacaattaaaaaaagaataaaaaagagagtaactctttaataaatctgaaatccctaagctcaagacgagttttcatttctcgagcaatttcactcttccgagaacaaccctagattccgatg

SEQ ID NO: 22994 - DNA, 3003 bp, Unknown
  misc_feature (1)..( 3003): 2750-1469P.txt file - cDNA_ID_2127366; gDNA_ID_1620331; Annot_ID_153658
tttggatattcttatcctgtacttccttgatagtttcagttaacagtttgtaattaacacatgtatttaatttggaaacaaaaaaatgaatgtatagatgattttttttttgaattgttggtaaatatatgaacttgacgtatatagcaatagtatactatatttaagcaactgaatgtgaatattctataacacaagtaatatcaattttttgtgatattgttggttataagttatattcgaatttgtcatttataagaaaactcactggtttatccatccaatgaaaagaagaaagctttttgggtgactctaataaatattagcggttaaataactacaaacacagtgttgtttttgtctcttctatgtatctttttatgtcctcttttacaacttggctttgatgttaactaatcaaagattatcctacttaaaaactatttaattaaataatttttaatttctttaaaattaattaatttcttgatatgtttttgtaacgccaattaattatacgtttttcataatgtggtgtttgacttatggtttgaatgttaagatgtcgtatatatctaaattctaaagaaagaaatttgcaaattttgtaataaacactatttttacaacaattaataatacatgtgccaagcagaagaacgactatattagttttctatgtcaacatttaagaaacatttatttaaaatttgaatatttgattttgtatgtcagcaatgtttaagaaaactttgattttttgttttccttcttttgcgtacatattaaatggaatttaatagaaaaccattaaatcttgatataattaacttcttcgcccttgcagttactaacaaggagacttttgttttggtactttctcgattagtttagtgaccgaccaacaacgtattttaaaactcaaaacacaatctctttcacgtactgtgcgaagtgcaagtcgaataatgacatcagtccatttgtgttgtattacacgggactacgatctctattctactatatataattactattaattaaaatgtttatatagttatgatatggttgatagtaatttaatagtaattgttaaacagtagagaagtgacactgagacatatctgagaaaagcctgaactcaactcctacttctggtttgatttcttgggattcgttctctttcatttacttacctctccatctatacaccaacatatatatatatatattggtatgttaattctccaaaaaaaaaaaaaactattttaggagcaaaactttttcacagttattcattttttaagttaacttaacttctcttctttgtttgaaaattcatttatcatcaaataattctgttataaattagacctgataataattctttaacaaagaaaatatattttaggagcaaaataggcagagccgcagaggcatacatgtattatatataacgattatttatgtatagaaagggacaccttttgtacaaaatactagttaaatttgtacattcacgtgactggttggctaaatttagaatattattattttcaattaaaaatcatcgtcaatgttcaaatattgcttgagatacgctatgcttcataaaaatgtttaaaaagtagttccaaaaaatattttcaccaaaaaaaaaagtagttccaaaaatattcatttaataacaaaatttgcctacataagcttagcaaacgacactaacaccaaaattgatatcattttcttagataacatattgtatacatatctacatacatactaaatacatatacacgtagattacacgtatggattcagcaataaaaatcaaaatactaaatacatatatacatatatatatatatatatgaacatttaaatactaaattatgtttaataaataattaaatcaacgtagagatatgtcatatgaagatggcttgtataattagtttgtgtaccgggcaaaggatctctaatttttgttttctttagttcagtttaattatttgttatctatccaatcaattttttttctaaactgtttggaccaatgtacgtacgtaccatcctttttgattttttttgtaaactaaattttcgaattagcaggttcttaataattgaacgaagaaaataaagaatagaggtagacacctgtagtattttcttggtcagaccaataatttataattcaacgtcaaagaagaagaaaaatataaaccattatttcattatgacttacgtataccaaaatacacaaattaaatgtataattgtgaggcattttatatgcgggaaaaaataaaataaaaagaatattaatatttcttttgaaaattgtaaagcattttgacccacttgtgatatatatatatatatagatatatatagagagagagattaaaacattgatggctagctatagagtctatggcagggtcatgatcacctgtcttctgatctctgaagagataccaatctgattttttctcttcctaggtttaattttattttaccattttataattctttatttttgcctgtagtacaatttacagacccatactaaaagaaaaattaaattttgtcaaagtacaaaacaaagagagaggtgaagccacacaatctcttttcttctctctctctctgttatatctcttctgtttaattcttttattcttcttcgtctatcttctcctataatctcttctctctccctcttcacctaaagaataagaagaaaaataattcacatctttatgcaaactactttcttgtagggttttaggagctatctctattgtcttggttctgatacaaagttttgtaattttcatggtatgagaagatttgcctttctattttgtttattggttctttttaactttttcttggagatgggttcttgtagatcttaatgaaacttctgtttttgtcccaaaaagagttttcttttttcttctcttctttttgggttttcaattcttgagagacatg

SEQ ID NO: 22995 - DNA, 3003 bp, Unknown
  misc_feature (1)..( 3003): 2750-1469P.txt file - cDNA_ID_2127506; gDNA_ID_1620744; Annot_ID_166571
ggagcataactatctatgtgttgaggaaacgtgaaaggactcaggagcttaccgaaatcggaacggggacgtttcataggaccaccaggaggatgatgttgctgtcgctgctggttccagtacccatccgccatggaaatcgaaggatcagaagctactagaagggaaaaattaagggaccaaaaaaaaaaccctaatttcgatgaataggttcgattgtagctggatttgatagatggaaaccctagctttgctcgttcttctgctccgaagcactctcgaaatcaaaagttttctcaaatctattgattccaatttcttgcttctcgatttcgaagtttctgattattttgtcttaaagatccgaaatctcgatgacccggcccgttttatggcaacagatctcaatttccgcgttggattaacgggctgctaaatcactattttaaggcccatttaactaaagttggatttacgtggatctaaaaaagtctaaagataagtgaatgtgtgaatcacggattatatgtgagtaacgagaaaatcataatgaatgaaaaactttgaataagtgaattaatagctgacaaaaataaaaacaaggtaaatatataaacgacaaaacaaaagcagaattatgtttttataactggttaagtggttagtataaatgtaggaaatgaggagatggacccaaacacaagaacaataaacaacaaaagtaagtaggtttccatgtttccttggagcttttctttttgttaaccaaaacttcatttgttctcaactcttaactcttaatcctttgccttaatcatcattcattttgtttctctaaagtctaatcatacaatctatcaccatcgcatcctcttagtatttccttaaattttatcaaatatttccgcttcagaactttcctattaaatcttatactgtcttgataataaaactttatagatactttcataaatatacatgtaatatggttttaacacacatatatatacataactatttatatgatctgtattagtttcttgaaacgatattgtcaagtgttattcatgagattttacgtttcagtaaaaatattgttcgtcttattcattaacatgttattcttaagtttacttacatagagataatataatactcatgtacatttgatttagacttagaactcaacatttcgaatatagtataatatcatctatgattctatatatgtatggaaaattgaactacaactttagtgtcttgatagttgggcatgcatcatccaatccaaggtttcgatttgcttttacaatgtcgagaagagctagatcctatgtaattatgtattggctaccaaacaaatcacattcatattcgctaaataaccagttaaccactaactattttgttttgtcggtgaatgtcaaggattacgcaaataaagaatcatataagaagaataagattaagggagacgcactattatagttttcaccaaaagtggatacattctcctcgactaactccccgaaaatgtggagagaagcacccagaccaaatgggcccacttacctctccttagggatacttttgtctttttcatagcaaacggcaaccaacattcaacgtagctgcgccaaaagaataaaccttccctactagtaaattaccattgcgtgacctcgtgttagcccggacaacctgaaccggccagctcagattctaatttatatgttagggagatttggaaattgattacaagtgaaattgtaatggcaaggaatctatacaatgatattaaaagtaatcaaaccaagaaagttataaagtcaatattattcatatctaaacaaatacctaatatcaaaaaacaaatgctgcacatagctaattgaataagaaatcaatattgatcataattaaacaattaccaatttggtcaacaaacaaatgatgcacttagttatctaatttttttatttgtgtttaatcataagtttttagataaagtggttcaaaccatatactgatatacgcacgtaaagatttgtatgttgattagccaataagcttacttttatataaagtataaattaaccaaacaaacaacttcttcacaatagagaattggaaatctaactatgcaatattgatcacaatgaaagtacgtacgacgaactaaaattagttctaaaacatagaatatgatgtaatccactcccataccatatagtagttttttaaaaagaatacaacaaaaacaatttaagttcgaatgtacaaacaactgcatggggaacgcctcttcactttttttttttatttttcttttttcctaagcatcaatagagttatagggatgcctcaatttttttattttaaagtataaattgttgttaaaaacaaggaaatagaataaagtataaagtatatatttattaataactccaagaaattaaagtgtttcctttatatttatatagatgtaattaatttgtggtaaaacaattttaccgtcgagtgtctgtgactccgtcttcttcttcttcttctccctctcacatcgtcgtcactttctttttggctattcttctctctgtcatcgctgtctctgacttcattgtcttcctccttcttcctttttgcttttccgtcgtttttctccgccggatttttctctctccaccaccactacctacctcctcctttgtctcgctggaaattgtttccgagctcaaaattaagttcctgaagatcgggttctagtccttttccatctcggagaagcgtctttagatctgggcaagcactgccatcttcaaattttttaccttttttctccttctctatctctcttcaccaactggggtttggttacgggttaaattgatggtttccgaggcggctagaacctcgtgggctcttgtttgtagatgatgaacggtccttcgtgtaaggatcgaagagggtggttctcttctgctctgtttttcacatggaatg

SEQ ID NO: 22996 - DNA, 3000 bp, Unknown; identical to SEQ ID NO: 4903
  misc_feature (1)..( 3000): 2750-1469P.txt file - cDNA_ID_2127517; gDNA_ID_1620744; Annot_ID_166574

SEQ ID NO: 22997 - DNA, 3000 bp, Unknown; identical to SEQ ID NO: 4899
  misc_feature (1)..( 3000): 2750-1469P.txt file - cDNA_ID_2127541; gDNA_ID_1620744; Annot_ID_166585

SEQ ID NO: 22998 - DNA, 3000 bp, Unknown; identical to SEQ ID NO: 4894
  misc_feature (1)..( 3000): 2750-1469P.txt file - cDNA_ID_2127560; gDNA_ID_1620744; Annot_ID_166590

SEQ ID NO: 22999 - DNA, 3003 bp, Unknown; identical to SEQ ID NO: 17710
  misc_feature (1)..( 3003): 2750-1469P.txt file - cDNA_ID_2127789; gDNA_ID_1621202; Annot_ID_174964

SEQ ID NO: 23000 - DNA, 3003 bp, Unknown
  misc_feature (1)..( 3003): 2750-1469P.txt file - cDNA_ID_2127795; gDNA_ID_1621202; Annot_ID_174966
agatttctctcttgtaaaggaatcgtttgagccgaagaacgagtctcggaaattgaacaacaaacggaaacgggagagtttgcctgaagaagctaagaatgttccggaaatagacatggttaagctcagcaagaaattgaaagagaactttactattcttcgggatataaaagaggacgagagagtgagaatggagttgttgcagtctgaagagaaaaaaccattgaagaaacagaacaacgtggtgaagaagaaacttaagaaccctaaatccaaaaagcaaatttgaaaggctttttgttttcccgctttaacggttatatactttgcttaaattaaacgcttcaatgaaatttttcgagtacaattttgttaaagagtgaaatcaacaagaagagtatttttcattttattcacatccaccctggtaatcctaaaaacttgtgtttataagttatgatgttctcgtatattttcaggattatttattcgaactgattcttataaagtggtaccaacatcgtataaaaatccatcgtttatacaaaacaacgtagtcttacatgtgccatagagttgaaagatacgcaaatcatcctctaatccactaacagttcgccacaaaccgtttactttgttataaaaatagagatggagatctcagctaatgtatgttgtacgctgtgaacagcaaattgttccccacaaaaaaaaaaagtccagccgtacaacggtacaagaagatacggccatgttgagaccttttgttctagaccccattttaatacacctataactataagtctctcgtcgttactacaagatatttgctactttatactatatttttttcgaattatcataggtcttcaattaataagtacaaaaattcaataaaaaatatgtgtaatcattatagtggatttacatcttttcatagtgtattatccacgcaagactcacatcgcatcatatatctgaacttttcaatcaattaaatgttaggtgttgggacgatatcatggatatataattcatattgacttcaaatttaaaataattattattattatatagttgatgatgatccgtagtacggtacgtgaaataacttgtattttgtcacttcaattttatttcacagtacaaattaaattgataattttgagataaaatcgaaaaaacaattttcatatccaaatcatcaagacgaatttctccgatcactcaaataaaaaaggagaagatcgaagaacaaaaaaaaaacagaatcatcatcatctactctgtagatacatcttcaccagataacgatgcaatgagctccgatgtatcatcagcgatgccagatcggagagactctacaacctgctcgaacacgaatacgttacaaggaatatgaagaactcctttctgagtgtatccgtattcttgagctgatcgattcagcaatccaacgaaaacaggatgattcagcagctctgcactcaccacgaacctctccttatcttcgcctacgttgacgggaacgtgaccggaaggaacactcgacgcgacggttgctcgcttgaccaagaaaactgaagaggagtacgttgacgtcgggtgatggatatcgccgctgcgatttcggttgcaggaggatgagtctgcgattcgtgacagacgtcgaatcagaggcttcatctttgatcctagacagccaaaaatgctagagacagagagacataaatatgggagagaggtgtggactcacattaagcttatcagaaatgtgtatattaagtattattatattttgagatgacacaaaaatggtatttaatttatttcatacatatatgtgttaacataatgagtcatggtcaatttaacaattgaaagaactacctaattttgattatgcaatatgagaaattctctaaatttggtttattttcaaaactttcctcacttacattagtcaaattacaaataagaatagtaagggtaattgttaacaaatgtggattgctaaaatcaaattttgattattgtacaaattaattttagacttttttatgtatgatgaaatgtacagaataaaccaagagactatgtagataaaaatccgttgtatttattaatctatttcttaccatgaatacgtaattttcccgtttgatggtaaattaacatataaatacacagagacgagtggataagaaaaagacgtagtatttattaatttactttttatttgctttccatgtatatatattttcatatatatataaaagaaaaagagtataatttagcaaaataacaaaaatataaatattgatagatggtttttgtatcataatttatttaattgtatttctggaattaatattcttctttgactagatttcataagaaagtaaacgaacacaaaattaatgttcatctttgactttttttggagggaaaagagtgtttaaacgtgggagaacaagaaacaaagcttgtagccaaattaaatagaagacaaataatcattagtgagaaaaattcttagattcctaatcttctttgtgtcttttccatcaaaccctaaaaagattcacgtaagagatgtcgagatttttggaatagtcaaagaaggtcgatcggattttgagctccctattgagattctatcgataattccgacggattctttcgagcaactggatctcgcgaagaggcgattatctgtaaagtgtcgaatttggaggaagaggtggtcgaattgaggaagaaactccatgagatggaaatgagtattcacgagcttgaaagggatgtctaggcgtggttagttttcgacgttttcaaaattaacacttaaacttatttttaaaaagtaaactgtaaaattaacatggttttagttaaaatttatcagttattttaaaattgttctaattttttttagtgaaaattattattattttttaaaaatgagtttaagtgttaaatctatattacgtgaaaaccatg

SEQ ID NO: 23001 - DNA, 3000 bp, Unknown; identical to SEQ ID NO: 8250
  misc_feature (1)..( 3000): 2750-1469P.txt file - cDNA_ID_2127813; gDNA_ID_1621202; Annot_ID_57714

SEQ ID NO: 23002 - DNA, 3000 bp, Unknown; identical to SEQ ID NO: 8250
  misc_feature (1)..( 3000): 2750-1469P.txt file - cDNA_ID_2127813; gDNA_ID_1621202; Annot_ID_174980

SEQ ID NO: 23003 - DNA, 3003 bp, Unknown
  misc_feature (1)..( 3003): 2750-1469P.txt file - cDNA_ID_2128001; gDNA_ID_1620334; Annot_ID_153733
gactcccaagaagaagactcgataatccccaagttacacgttctctcgacttattgacaaatctatccctgcgcttatttaccattcacatatactgccacttcttattctgacgtggcgtaatagtattggataaaacggtattatctacccctaagtcgattatagtatatatataaagcaacaaagcagttgcaaatttcaagatagtcgtcactttagtcgcagcaccaccaccaatttcgaatttagcatttctgaattccgactctgagaatcggcggttaccgggaaatatgtcggagactgatagagagcgtccgttattagcatcggaggagagagcttatgaagaaaccgagaaagttctcatagtcggaatcgacgaagaagaagacgctgattacgacgatgaccccggaaactctcctaaattctcatggaagaagctttggctattcactggacctggttttctgatgagtatcgctttcctcgatccaggtaatctcgagagcgatcttcaagctggagccatcgctggttactctttgatttggctattgatgtgggctacggcgattgggcttctgattcaacttctatctgcccgtctcggtgtggcgacgggtagacatctggcggagttgtgtcgagaagagtatccgacttgggcaaggatggtgctttggattatggcggagattgctttgatcggagctgatattcaggaagttattggtagtgctatagctatcaagatcttgtctaatggattggttcctctttgggctggtgttgttatcactgctcttgattggtaagtgtttttttttttctcaatttggttattgatttaggaaaaaccctaatttttggaatttagggttctttattattgtttgtttggtatctttagttttgatcctaacattgtgtgtgatgggttaattgcagtttcatctttctatttttggagaattatggaataaggaaactagaagctgtgtttgctattttgattgcaacaatggctcttgcatttgcttggatgtttggtcagacgaaacccagtggaactgagctccttgttggtgagactctaaatattcctttcttttgtctagtgtgtggagatgggagtacaaaaatggtaactgttcatgttttttaacaggagcattggtccctaagcttagctccaggactatcaaacaagctgttggtattgtgggatgtattatcatgcctcacaatgtgttcttgcattcagcacttgtgcaatccagagaagtcgatccgaaaaagagattccgggtcaaagaagctctcaagtactactccattgaatccactggtgctcttgcggtttctttcattatcaacgtctttgtgaccacggtgtttgccaagtcgttttacgggacagagatagcggacaccatcggtcttgcaaatgctggacagtacttacaggacaaatacgggggtgggtttttcccgatactgtatatatgggcgattggagtcttagctgctggtcagagtagtaccatcacaggtacgtacgccggacagtttataatgggagggttcttgaatctcaagatgaagaaatgggttagagccttgatcacaagaagctgtgcaatcataccaacaatgatcgtggcgcttgtctttgattcatcggattctatgcttgatgagctcaacgaatggctaaacgttcttcaatcggttcagatccctttcgctgtgatcccactcctttgcttggtctccaatgagcaaatcatgggcagtttcaaaattcaacctttagtccaaacaatctcatggatagtagctgctcttgtgatagccattaatgggtatctaatggtggatttcttctcaggagctgcaacgaatttgattttgcttgtgccagtgatcatattcgcaattgcttatgttgtgtttgtactttaccttatctcacgaggactcacgtacactccttggcaactagtggcttcttcacataaagaaccacagagggatgatgagtgagtaaaggaaaagcaaagagaccttttcattgaagaataagaataagagagattgctctttttagtgaaacaaacaatagaaagttgagtttcagtatggtaacaaaacaatgtcctgatgtatttgtattatagtgttttatggtttttagagtatagctttggaagaatccgaatcgtatcgtttgtgtaaaacttccggcgtttcttagaattttggcagaaataaaacgtaaacatgaagttccttcttcagatgtgcgttatttcattttcttttagatagattttttttttttgggtttaagtatataagttaaaaaaaaaatcttaatatttatacatttagatatcttgatgtttttcaaagtaataacgtgaactctggttttgaatttcttagagaaaaaaaaaatggtcaaaaatggggaagaaatggtcaaagattaatggaaacgcgctcgcatttaatttgatgtttaaaggtcacaaacaatgtttagtcgtttaggggaaattcatgcacaatttctttgatgccacgataagctttgattgcaaatttaagttaaaaaaaattctggaagctagttttatcatttgataatgaaaatttcctggcaaacgagagtcgagtcgagtcgaggtatttaaatacatcacgtaagtttcgttaactgccccaaattaaattaaaaacacaggagcagcttctcctaatccaaaatccaaaaaaacaaacatcaaaaagtcaaaaattaaaatatttaaatacataacctacctaacaaggtttgacgcaaaacccgccacgagtctaacgcatttattaagagaaagtatgcaccaaaaatatcgttattaattgactaagtagaccgataaaactttatttaagagattaatggagctcataataaatagcaacaaaaatctttgacgatgaatg

SEQ ID NO: 23004 - DNA, 3000 bp, Unknown; identical to SEQ ID NO: 896
  misc_feature (1)..( 3000): 2750-1469P.txt file - cDNA_ID_2128005; gDNA_ID_1620334; Annot_ID_153734

SEQ ID NO: 23005 - DNA, 3000 bp, Unknown; identical to SEQ ID NO: 893
  misc_feature (1)..( 3000): 2750-1469P.txt file - cDNA_ID_2128013; gDNA_ID_1620334; Annot_ID_153738

SEQ ID NO: 23006 - DNA, 3003 bp, Unknown
  misc_feature (1)..( 3003): 2750-1469P.txt file - cDNA_ID_2128017; gDNA_ID_1620334; Annot_ID_153739
ttatggcaacgaaaatataaaacaaagatttcattaacgaaaatacaaaccaaagtttttatttaattaaggttttaattaacgtattattaaacatggaaatttattttccaaaattactggtactttaatgtaaaagattctaattttattttaataatgaaaaaatattttcttataaaatcatttaaatattcaaaaaatagttaaataatattagtacgttttttgtttattttggtaaaaacaattgcgatagtagtaatacgaatgagcagaaaaacattaaaaataattaaataaaactagtacgtttttttgttttattgtaattctgtttttttttttttggtttgatacaacatacatgaaaaatatatttaaaatataagacgtttcagacattcgaattcaggacaaattgtttaataagttggacagaagaaacatcaccttgatttaaaaaaaatactttgaagaaaagatgaacattaccatcatcatcatcagtaagtttatagacagagagatctctgtgtttcattgacttctcattctgctggtttctgctgccctaacttgggcgaagtaagcgtgcgcctgtcaacaaatcaacaaaccatattaatttacctaatatgtgatttatatacaaatacaaaggcttctaatttgttttctgaagcatgcgtaccatggcttcttttgcagttaatctgtcttgatgatcataccgaagtagcttgtcgaggaaatcaatcgcctacaccgttttaaacaaaacccttaagaacccaactaaaccattttctatacaaggagttaaggactcaaggaaaggagtaaacctcgggtgaaactaagtgctgattgtctgcgttgatgaatttggaccaaggtttcctgctatgcctgtaggttgtgttccattgaaccagagaatgatacaacactaattctcagcttcagctcattacatggcaatgccaagctcggagattacaatataatgtttaagtttcacataccgcccaacaagtgcttccagttgtggatcaagttctaactggtacttgttcagataagcattcaattcgtcagtcccaagcacctggtgaataagaaggagagttcatgacgacaatggaacggagatctcccatattctaatactgaattacaagtaatataccttggcgattttcactagctgatcctggttgtcatggccgtagaagaaaggttccttacggaatatctaatatgggtaatgaggaaaaattaggtcaaaattagatcaccacaagttcatttctcagaaaagaaaggaaagccgttcaaatgttatatcatgaacttaccatccctgcaaacatacagccaagactccacatatccaatgaatagtcatagtcttgcaagtccacaagaagttcaggtcccttgaaatatctgatacacattaggagagataaacattagagtgaagctaggcaacagcgaaaaaaataaaataaagggtatgaagtaaaaccataccttgaggcaacacggacattatactcttttccagggtggtaaaactcagcaagaccccaatctataagacgaagcttacgcagctcatggtcaatcataacattatgaggcttgacgtctctgtgcattattccttgtgaatggcagaagtctagtgcctgcaacaagtagtcttaccaaatgtgagtatgaagtcaaatggaatacttatataatccaaccaataccagaatttataccttcaacagctcatagatgtagtaacgaatgtcgtaatcagtcaacgtaggatacaaaactttaaagtctgtgctgttaacatattcaaatatcaagcttggagttttcgaatgttgatctctaacaacatcaagcagcttgacaatatttggcccaccgcataggttctgaagtattttaatctctcttcttatctacgaaaaaaagatcatagagagattcaagaaacaaccccaatcatccaaaacaatgtaaaacaattcaccttctttttcttaacaggtttgaggattttgataatgcacttctccttgctgttcacatttataccctcgaaaacttcactatattttccacgccctaccttccttactacctcataatcatcttgctccctgagagagcaaataacaagatcaaaatgttaaactaaaaaatcattgctttacaatagaagaactaaaaggcaaaataagcacaactaaaaaatcaaattcatcaatagagataaaagtaaagttttttacattagcagcatcaatttgattagattagcttcatcaagaagcaaatccagagcaagctgaattcaaattcaatacaaacactacaaaaatcgattaaattactttagcaactaccaattcagctaattctagggtttaacaatcttacccccattgaacaatgagtgactcgtaatcccaataatccttgggtcgaatcacattgacttcggtgtacacacgagctttcgacatcgcccgcgtctggttagaatcagagatctctacgagaaaatctggatcgatcgtagtacaaccggaaacttccgagacagctctcgctgtgggagtgacgatagatgagcgtaggataggagagtgcgccgttggcgcacgtaaggctaagacggcgcacagtaacaagagacgtcgaagaggagaatcgaagaagaggaagaacaagaagaaaagcgtatctatcattcactacgctcttccgcaccagattaactttttgttttccttttttcgtttgcgttatttttgcgccaactaaatttgccataaaggcctgacatagtataatgggctttatttatggcccaatatatttggacccaaatagtccacccgcttatatacatgttagggttcttatttttgggaagcttttgaaatttcggatttgcattaagcgaggattcgatcagtgataatg

SEQ ID NO: 23007 - DNA, 3000 bp, Unknown; identical to SEQ ID NO: 888
  misc_feature (1)..( 3000): 2750-1469P.txt file - cDNA_ID_2128059; gDNA_ID_1620333; Annot_ID_153697

SEQ ID NO: 23008 - DNA, 3000 bp, Unknown; identical to SEQ ID NO: 884
  misc_feature (1)..( 3000): 2750-1469P.txt file - cDNA_ID_2128077; gDNA_ID_1620333; Annot_ID_153702

SEQ ID NO: 23009 - DNA, 3003 bp, Unknown
  misc_feature (1)..( 3003): 2750-1469P.txt file - cDNA_ID_2128097; gDNA_ID_1620333; Annot_ID_153710
ctgctcttccttgcgtgagatctacactttctcagactcgatccctaccatggctgcctctacatcgcaactggaagatactacccgtgagattatagaaggtacttccatactcaacatcgacgatacttccatactcaacatcgacgatgtgatgacatcgcaactggaagatacgatcgagaagttaaagaaaggtacgcgaatatttgtttattctgttattcctagtttctaaaaatattaaaactctgattctgttcaattttccgttttagtggtgaggagtttggaagagataaatagaaattcaaccatggcctcactcacatataagctttaccgttttatactggagaaagaagatgaggctgccgccgaactcaacgctgtggacacagactctatcgagacaaaggttgtgaaaagtctaaaatttattgtcgacatattattgattgagacaacagtttaactttaaactgtctggtgcagctggtgaaactagaaaacaaacagagatatatccgtgaagttgaagacaacccgatcgacatccgtagtttgtacaggcctaaacttgttaagcttttaaaggagagagggtttacaccattcccatctgaagataagcctttctcacactatgactacctagatgttgctttacatatggaattacctattcaaaaatacgaggagctatgcgatcaaaaaaatgtgttgcaagacatagtttctattttgaagaggattattgatgcctatcaacattaactaatctgcggatttggttcaagattggtcaactagttttttttttcttttatgaaagctgcagtctctcaattgctatggaaagatcaaaatagtagttacaattctgcattgtaacacgaatgttttcttcttttagctttcagtttttgtgtgttgcaaactcttttgttaaatttttatggtttcttaactcgtttgtcatcattttcttcagccttgagccgtagaaactaaaatatacatagagtttatgtataaatcaaggcttccgcctatcgtcaatgagctcatgcttaatgggctaatgccgtattttccctttcattaggtccagtggcccattgaccggtttgattgtccgtccatatgtttacagagaaactatatacttttatgaatttatctaatatataagatctacttgtaaaatacacctataatgattagttgccagagaactcctggatctgtacaagcagattcacattcttcgtatagacacaatggttataggacttctttaacatggagaaacaataacctgctggaagtacacttagattctcctaggtcttgccattttcatatttacacgcatttagtttctttctaggtgtaatcatacagatagtgtttagttaaaatcgtgaagtcagcccttaccatattatatatatatatatatatatatatatattgtctatcaaaatgtttgagtataactttctttataattttcacaaaaatcattcttcaattaccacttttagttttttaaaaatttgaatcttgaattgaaaactttcgaaatacacagatgtcctctagtagaaaggaatgcgttaaaaactatgaaacaaataaaaaatcattatgagaaaacagtgattcaatgagttgtggtctcttctccatttggacagcgatagtgagacgacgaatacgatgaaaaataattttcttttttccgttgtgttagtttaggagagggagagggagaagagaggacaaatggaagcagcttgcgtaccaaaagtgcgacacgtatgtaaagagtcggaaggagacgtacggtgtaagtcatctcgtcttcacaaatatgttttggttttatcttatgctttgtcttatcctacgtggccattaaatcgttccattcgtctaaaccataatatcaaatcaaacaatcgtataatatcttatcaaccgtaaagatggtgtggtccgtttctctttaaaggtttttggtttggatgattctaaaacgtcacatgaattcttttttagattaccaaaaagttatgggctgaagtccataatgttttcggattagggattagaacattcaaacatgggatatatattgtgtcctttgtgtgttgtatcaaatttgctattgtttgctgcatatatttatctgaaattcgtaagtaaacctcacataaatttcaaactcatgcgtgtgtgcttctcatttctcatttggtttaaaaacaaattcaccctcattaccaaaattgttttgactttattaatatcattaacaaaccatcatcagtcaaatatgattatttagacatatacattgcctcggattttgaactatggccacgcattttttcatggctatgcaaatttcttttgatagctaattattaattattagttattataatatataattgttttttaatttagttttaaacgatgatatcggtaatgaaacaaatatttatgggctaaaatcgtaatttcaaccatttcctagtttggtatatttgtttgggtagaatatataaaatcttaacccatctcctagttgggttaaaatgtataaaattataagaaatttagtgcaattcgtacttaaaccaaaattttttgggttaaatccaaatttcactcctaataaaacaaatccatatataaacaaggttattttctggtcaataataatgttatttttttgggtcaaaataaaataatgttatatgaaggagaaaaaacgagtggctggaaagtaaacaatattttcttagttttcttctccaatctggcaaataaatctcactctctcaatcaaaaacacacatcaaaatcaaaaccttctcttcttcttcttcttgcgagttgcaccgaaacactcaacaaaaccaaatcatccaaattgggtaaaacaaaagaaactaacaagaagaagatcgaattcaagaagaagagatg

SEQ ID NO: 23010 - DNA, 592 bp, Unknown; identical to SEQ ID NO: 898
  misc_feature (1)..( 592): 2750-1469P.txt file - cDNA_ID_2128149; gDNA_ID_1620335; Annot_ID_153757

SEQ ID NO: 23011 - DNA, 3003 bp, Unknown
  misc_feature (1)..( 3003): 2750-1469P.txt file - cDNA_ID_2128157; gDNA_ID_1620335; Annot_ID_153759
ctgggaaaagtataatacgtctacgggcactgcttacattgataactacatcactttggaggcaatggatccgtcctgcaactctgtcttctcttttcagactgtgttcagtgctgctggatgttataaccaagatacttatcatgtacaagactggagggtcttggcctgcagaccaacatgtacgtatgcttttcttctttaccactgtcttttctttcgagatcaatcaccagagaggactaactgtttatagagatcaggtggcaagtctgtgaatgaatattttgaccggcatgaggcaatggatcccttctacacaggtaaaatgcccaaatggttgtctgatgacgccttggcctttgacaacaaaaagtattacgtggtaagatgtccagaactggagtttaatcttcttttttagtttgagaagcagttagaggtgaatgcatttttgtcacaggtgcaagaatcagacttgcatgagaatgactggctgcttgtattcatggaaatggtattcttacaagaaaaatcctgtaagtccttgaatttcttcttcttctttttcttcatgtttcttttctcttacgcttgcttgccagtgtgactttaggaattgaaggtttccccacccttggagatcaacaaggtagttgtagaaactaaagaagattacataactgaggcgcgtgagaagctccacgcagagaatgcaatcttctacataagttacaagtatacaggtgtttcttcaagtgatcacaaagctatcataaggaaaaccatggatggggtaccagaacacatgagtcttgaaattgctttggtaaagtaagtcgagaacaagaagaagaagaagaagaagaaggagaatagacagacacctcttgtatgcatctggtctgttgcaatcaattattaagcgctattcaacttttatcttgttatatgactatgcacgatgtgtaaagataatgctgggatctatatgactatagcgagttgggatctatatgtattttaaccttcgctaactgctggatatctgtttgcaatgcataatagtactttgtatgataagttgataaccaataacacaagctgtaccaaaccgtggaggttattgatatgatcagtatgtggaaaggcaaggcatagttaaatggtaaagagattggcccaggagttctccaaatgacgaatatgttaaaaaatccgattagaggcaagcaaattcgtgccactggtcactggatgtggagagccatctctgagatggtaaactagaaagccattagagttctcagatttttcattgtttttttggctaaggtatcgtcaagttccaggtacgatcatgaagatttgggattcatatgctaccaagggaaaccaagcaagatatatatatatatatatcgtttgcctagttaacacaccttacattttttaattaggaacaccacaagatattcatttgttaacataccttacatcatcaagctatgtaactacgacatcagaactcattctatctcctcaatcaccacgccaccaccttttcgaaattgatctttcttcttcatttctggaaaccctctgtaatcgttgagctcaaccaccgagttcttctctgcccttacagatggttccagagcttcccatacttcagaattctgctcattgacccaacacatcatgtagaacactttcctctctgcaagctttagtttcttcttcagatcacgccctgatgatgattttacttcctttattgcaccaagaatcaacctttggagatcaccgagcagacataccatagctccagagccaagagaaagaaaacaaatcacatcatccaccagattcaatccgaacttcagaccaccaccaaggtttttataagctgaagagcatgtctgttccaagcaaaaggacaacacttcctttatggtctctggttgtccattgtgacccaaaactgatgaaacagtcaacaccattgttgctgcaccaagcgaatcagattgccactctccattatagatacggagcgtaaagcaataactatatgcaatgtcaatcaaatggattggtaagagaggagatggattcgtggaggtaagcttgcttagtgagatcaaaggtgtatcaggccctcgtgggatttcactcacaactgtggtctcttcttcgtcttcaacgcattgaacaagttgtgtacctccgagtccaagattgatcgttcgagctgaagcaagtaaccaccaaggatcccatggttggatcattttgcttaattctccagaagctaaggctctttggaatccttttctctcttctaagctcaaatcatcaagactcacttcatctccgttcattatcttctgaataatctcctccggtaagctcaaaccttcatcatccgtgatgctatcaattcccccatcatcttcctcttcttcttcgtgaaaccttttcaaaatttcgagcatcttccttttcgtttgatcatcagatcgaacttgcttcaattcatcgtttacattatctctcatgaatgattcagtacattggacactgtgagatttgtaacaaggaagggaacagtaccggaagttgcagcgaggacaagtgtactgcgagaactgcttattacatacatggcagataatccgcgtagaagaagggtttaacggagacgaatttgaactctccgacgaaataatcgtcttctccggcatcatcttcagaaagctattccaaattagggttttgacttttgattgaagaagacaggtctagaaacttacatacaccaattttaaaatcgagtttgggccgaattatggaccgtactttgggctatgggccttcattttaataaacaggtcggatatatccaccggacccggaatgatcgtcttcctcagtgttgtattttggctttcctcattgcttcctcaatctaaggatttccatgaacaaggaactaaaatg

SEQ ID NO: 23012 - DNA, 3000 bp, Unknown; identical to SEQ ID NO: 901
  misc_feature (1)..( 3000): 2750-1469P.txt file - cDNA_ID_2128163; gDNA_ID_1620335; Annot_ID_153763

SEQ ID NO: 23013 - DNA, 2374 bp, Unknown; identical to SEQ ID NO: 900
  misc_feature (1)..( 2374): 2750-1469P.txt file - cDNA_ID_2128177; gDNA_ID_1620335; Annot_ID_153767

SEQ ID NO: 23014 - DNA, 3000 bp, Unknown; identical to SEQ ID NO: 912
  misc_feature (1)..( 3000): 2750-1469P.txt file - cDNA_ID_2128239; gDNA_ID_1620337; Annot_ID_153819

SEQ ID NO: 23015 - DNA, 3003 bp, Unknown
  misc_feature (1)..( 3003): 2750-1469P.txt file - cDNA_ID_2128243; gDNA_ID_1620337; Annot_ID_153820
tattctggttactgattaggtcacctgtattagaaaccaacccgaaataggattttaattaaaatttatcgttgaaaggctgttttttttccagtttatacgatcctatgttaccaaggctactatatctttataaaaaaaatactataaccagaaagttgtttctatatttaattgttagaaatttaatcaaattgggtttcttggaaagcaattaaaaaaaaaaataggttaaaaacagggcacatttagctaaaacttactactgtacctctttgtgatccacgggaactgaaggatacaatctaagagcttcagacaaagcagcttgtagataatccatcttcttgatctcttctggtccaaacacaggttcataatcactcttctctgcatttccatggtcatctctctgcctcagaatcttacacatctccaccatgatcttctcttcgacctctgggttcttctctagcaaccagaaaaaccagctcaaagccacagaagaagtatctctcccagcaagtatgaagttcacacagatatcacgaagaaacttgtctgaaaaactctctcccttctcatctctcagacccataaacacagttaagagatccgatctttttgtagtttcgccctcaagagacagttctttcttcctcgtcctgataacttcatcagcgaaatcatccacaccctttattgattccttaagcttcttctctgttcctatatcaagatacctcatgaacttccacacgcaagtaggcatgacgaatctcacaaccgcagcttcagtcgcatcctcaaaggctttcgcaaaaggaatcactggttgatctggaccgagacatcctggatcgactccaaaagcaatcatacatacgttatcaaacgttagcctcaacaagacgtcttgtagatcgataggagatgagctcttaaccgatgtctcaagaacaggtaagagcctcttgtgcacgagctcaaacaaagattgagtggttaattgtctgaatttggctgaatgaaactcaatgctcgctgttttcctctgcctctgccaagtttcatcatccgcgttgaatattccatctcctaggaggtctcggagattgtctcgaaagtaagaacctttagggaagacagaaaaccggttcttaaggagatgctcaacgtttcttgggtcacaagtgatagtgctgttgaggctgctaaaccagggacctctgaattggaaagttccgttctggagacatagaacatcggatagccactcgtatatgtttcctctgaggccaaaagctagagaaggaagcatcccaagaaacggccacacgggaagaccttggtatttcttctgacgcaaggcatgtattgcgacaaagacgaaaattgcaataaggagctcaagaatctgaacatctctcaagagaaacagcctccgtgaaaccagagggtcactggaggaagaagaagagaagaaaacgtcattgaaagtgagattgtaagaagaattgaaattcattgtgacaaagagaagagagagcgatgaatctcagaaatgaagaattgagagagattaataagaatggaagtcgttagttagctagtgggtgaagaatgttgcatgagtttcttgttggggacaaaaactttggctatcaggagaaattggtttgatttggtgagcagacaaaaactgtgaactttatattcaagtggctcttggttctcgtgtatatatattattatgttacttttctttcactataagtagggttcttttgggggttttgcttctggttttgggaatttcaaaggtcgaatcttttttggggttagattgtgtttttgaccaaaattgtgaaatagtttaggaaaggaaatgagaggttgttggcgatgggtaacctaagttaataatacaatttctctccattctatatttagtttttttgcttccgtccacatttgctttatatttttatgagggaatttatgaatcgtatattcccaataaaccaaataaattgtaggtatctaatacctatagtatataaaatgataattcgttgttgggtgtctgtcatcttatcgattttgaaattttcataatgggataataagggtagatggctaaattttgacgtaggtaatatgaattggaagatttatttgcaagataatcaaaaggtataattgatgaatatatctgtgaatttttttaagcatttgtaatttgcaatatactaatttgtggcaagaccgttggctttttcgcttcttttttcgtgaaatgagctcatgttgttgattactttttcatttgtgcagtaattgtttgtttagtaaaatttggtattttgtgttattcgttgtatctctatgttcggtaagaaaaaactaaaaaatgtcataaaatttaaaatattatgaggattgtcctaagtttggaatggtaagctcttttttagagattttgaaaactggcctaggtttggattgctagtggcaacaactataagtatttgagatcttttaagttgaggaaaccacacaaatatttgagctttgtggtttggaatctaagtttcttttaaggtctctacttgtagagttttcgattgagttttctttccgttttctgtttgtgttgtaatttttggtggtttatgtagtttttggtctttcatattttttgtactatctttctgtcaaaatttgcaaaaattgtataaatacttagtattgatacaaaaaaaacttagaatatatattagaatagaaaattggtacataaataatagcatgaataacataatttacgtacaaaggacgtggcattggccgctcaacagttctaaagttaactaactataattcacattcatatacgtaagaaagttagcaaaacgcctaaacggaagagaaaagacaaaatatatagaggccctagaagctctattttaggcccattaataagaaatgggcccaaccatg

SEQ ID NO: 23016 - DNA, 3003 bp, Unknown
  misc_feature (1)..( 3003): 2750-1469P.txt file - cDNA_ID_2128276; gDNA_ID_1620337; Annot_ID_153830
gaacacagctcaacaaaaaagtactttaaaaagactctctttctccctctatctctctatatatatttctcactagctctttcacacacacacacactttttctctctctatctcctctctaattcacacatcaagattcaagaatcaacaacatccttgaaatgaatattgtaattaactaattctagggttttcagattcttgttttttttggttagttaattagggtttcttttaagttgatctagctttcatatacacttgaatcaggaggaagagggagccactcataagaggaagaagagagagatgggtagagggaagatagagataaagaagatagagaatcagacggcgaggcaagtgaccttctccaagagaagaactggtcttataaagaagactcgtgagctctctattctctgtgacgctcacatcggtctcatcgtcttctcagccaccggaaagctttccgagttctgctccgaacagaacaggttaacttcttcttctttcttgaattagggtttcagagatctatacatacatgtgtatgtatccatctaattaatgaggaaatgagctagatatatgactcgtgcttgagaacagacagttttcatcattagtttctgaagtagcaggtgtcatgagtcgttttttggattttcatttggcccagaagttaagaatctttgatccaatatttttgttcttgcagtatttaatttgtattttcatgtatcttatcatatttaatacgtatgggtcaaattctatatttaatttgtatttgacatttcttgatccagctttttcgtaataagaccctaattttttttacttatttttgtcacaaaaaagaccctaatttatgtagtatattaatgtgtcatatttacaacataaacatacataccgatatatatgtataagtctcatgttaatgattcaatttagtacaattataagttttagttctaagtcatgaaccagataaataagaaaattattcacatatagccataataggagaagaagggtgtgctaatagtttaagcgttgattacacaaaaaatgggtaaaacaccttttaaatttgttttctcctaaccaatgtttaggccaaaatatggattctacccttcagaacattattagttattttgatttttgtgttcctccagtgattattgaagtcttgacgtgtagcattaaagatactaaactgatcacattttcatattgaataggatgcctcaactcattgaccgatacttgcataccaacggattgcgacttcctgatcatcatgacgaccaggtatatatatgcacgcatactttttcctttgtgttaccaattgacaacgaaggaaatcacacattttcttaagaaacatatgatatattcatttgtatttttgtgtataggagcaattgcaccatgagatggaactactaagaagagagacatgtaaccttgagcttcgtctgcgtccattccatggacatgacttagcctccattcctcctaatgagcttgacggactcgagagacagctagaacattctgtcctcaaagtccgtgagcgtaaggtaatgcaaatatatgtccatatctatacatattcttttaaaactatattggttacacttttgtttgatctctgctattaatatattgaagaatgagttaatgcagcaacagttggagaatctaagcagaaaggtcactctctaatcactctttttaaactctaatttcatctaataatctgattataccgcgtgtttaattatcattaccgtgttatgcatatgatcagaggaggatgctagaagaagataacaacaacatgtaccgttgggtgagtttggttactagcgaatgtcaatacgttttcacatttacgttggtataacatttttctacatataccgatgtttctcgcagcttcatgagcatcgtgcagcgatggagtttcaacaagctgggatagataccaaaccaggggagtatcaacagtttatagagcagcttcagtgctataaaccaggggagtatcagcagtttctagagcagcagcaacaacaaccaaacagcgttcttcagcttgctacacttccttctgagattgatcctacttacaatctccagcttgctcagcctaatcttcaaaacgatccaacggcccagaatgattaatacaattctcaatagatatctactctttctttatggagacagattcatgaacttttattacctatattttgataagccagtgtcttcttttgtgtggctatggaaaccttgtttaaagcacaatgcacttgagttcttggttatataattaatcatcattattacatattttccaactaaagatcatctgtttatgtaatgaaacacccttgttctccaagttatgtttgtgaaaaaaaaaagctgttgctttgatgttttgaagtgaagattggccattacctggagacagagtgcaagagataagcaaaactattcttagactattagccgcaagaaatacaaaaaatccggcaaatgtcttatagactattagccgcaaaaaaataaaaaataaaaaatcccggaaatgtcttatagattacaagccgcaaaactattcttagattattagctgccaaaaaaaaacatgaggatctttgtaatgtctggtggattcagacagagtggatcataatcccgaaaaaagctcttataaaaaactaagccatgattgaaaacattccaataacttttacagaggactgcaagaacgatcaagaagcaagaaagacgtttcagaagaacaaacgtcttcttcttgttcttcttcttcctcctcttcttttttttgttttcattacgacgagaaaatttgagttcgtgatcgcttgaacaaccatcatcatcatctagagccccaaaaaagaagaagctgcgggccggttattttggttaattagtctaaatccatg

SEQ ID NO: 23017 - DNA, 3003 bp, Unknown
  misc_feature (1)..( 3003): 2750-1469P.txt file - cDNA_ID_2128357; gDNA_ID_1620336; Annot_ID_153791
acactctttaatataaaaaaatgaaaaagtccaaggagattacataagtttctacagaaaaacctcaagaactacactttttaaaaaatcgctttcaagatcagtggaaaaaaatacaaaatctagatttacaattttgttataaaattaacaattgaagaacaccaagaggaaaatatcatcattaataaaaaaaacagagagatcaaaacgattgagattcctcactcacaatgttagtatttgtagatgatggagttttaacgcatcttgtataactactactaccattactactgctactgctgctactcatcatcataattgtcttccgaatcaaaagctgtataatacaaaactacagaggagaaaaaaacattaagaaacatatgaagaagttgtaaaagcgaaaattcacaactaaaacctggtttggatcagtgatcttgtgtcatcaaccatggtgatcattcttgaaagtttgaaattacagaaaggtacatgtgtaatgttgaatcactttctttgtaatattatatatgtagagagaaatgaataatttagtacgtatagatggagacagttgcagaagaggaagatttggtgatgtttcgtcttcagcttcggtgagttttttttttttccttgatttgttttgtgtattcattagagcaaaaaataaaaataagtgagggatatcaaaaggagcggtgaaacggtcggtcgtcttcatttttatttttaaattgtttctttttgtcttatatctttaaattgctttttttttgtgtggatcaaatgatatttttaagttttaatatatatactatttctatttctgtacacaaaaataaaatattttaaccattgtcgaatatattaaaagtatagaaaatttattatgtcctttatcaatagactaataagatttgtttttctaattagtaaactaaaataataaaattaaaattgagatttggtttaaaaatatttttgtgaaatcaaaaaagtattttttcggttaataaaataataagtgcttgcaataccaataaaatagttatggtttgattggtaggtaatcacagtttttgtcaaggtgattatgagagttttttggctgttaaagagaacggttaaagaaaaaagagacgattataattggtaattagattctaacccacgttattattgctttttagaatatatttattgtaaaaatgatagtatttaattacatttgtcatttgataatcacagttttgttaaagcgagtatgtgatgtttgaaggttaaagagatatgattataattagttatagactataacttatagtcttatagataatgattaaagaatagacgatacggattaatgcgtcaatctcttggtgcagtgaatttgaaactggtttagggtgaactgaaaaaggagagagcaaggtgcttgagccttgaggtgttgagatgaacacaagttacacttgcccaaaaaaaagggaaaacgaaaaagaaaaaagaacgcaagttacgacttgacatagtataagcacatgtgtgacgtggagaacagaagggaagcataaaactaacgaagatcatatctaattattgaacattgaagagatagatctctacaatatcctagaaattctttaataatcagaaaatgatcagaaattttatcatccaattaggtttacgaggataaatgtagtcggtacgtaatccattcatttgatttttttcatagtaaaatatagcactatttcgactagttgaaaaaaaatagttagataattacatttttgtggaaagttgatctctagtctatatctacgtagttataaaataaaagaggagtggttcatatcaaatatgctctaaaaatttcatgagcgacacacatgtgtactattgtgtacgtcacaccagagttggctaaattttttcattgatggtttttgtttgaagatcaacacgttgatagcttaatctgtttctcatcgttaaaacgtaactagtcccgaattctagtttacactatttttggattgttcgcaagcccagctggcaaattatattattacatagtttcagttgatatgtctctttttcaaaattatgttcatataccctaacgatacttaaattatagctttcgcttaatgatgatggatacatcatacctgctaaatttctctacctaatcggccagtttccttttggcctaaagaattaaaagcatcttccactaaatgttatacttttctattataattgtatatataataaggaacggagatattggtaatctaattactatattagtacatcacatgcactacaaaaaagaagtattgtgggaaagagatagatccgtacagaaataatgagggaggtgtgggcatgtgtttcaccatgatgagtgaacgtggtgcggtggagttagaaacctttttgtcttctctgtctcttttcgactgtactgttgtgtcgttcaaacaattatatatatgtcaaatgaatatgttttagagacaatagtaatatttatgttaggaacatggatcggtgtgtgtgttatggatgacaagatcttgaccacgtacgtactgataacaacgaccaaattatttattttcatgaggcaatttgaaattaaacaatctttaacaaatacaaatttcagattacaatcgcaagtgagatattgcatctctggttttcagttttcccttcgccggaaaacaaagttgttcgtcaccagactcttcctctagatcgcgagtgggctacttatgggcctttgatagttgggcttaaacttttcatatgttgaatttttagcccacataggcccaaatatatgtggtattatcataatcctgctttgactctttgaccattgtttctggaactcagtgcccacacaattcaaatacttgagctccgaacggtcgtcagctagggtttttcttcactcagagagaaccaaaaatg

SEQ ID NO: 23018 - DNA, 3003 bp, Unknown
  misc_feature (1)..( 3003): 2750-1469P.txt file - cDNA_ID_2128361; gDNA_ID_1620336; Annot_ID_153792
tgggtttttgttttgttttctacaggttgatgttaaacgagtgcacatacagagaaggtgaaattgcaaaaagatcttatctttttcatcttttgttaaatctttgaaattagactagtttttgtcttggttttggttctgtttaggggagtgggcaagaagagagatttattgaatcgagtttatgtttctgaagaaatcagagatgaggccatttcaagagctaacaaatttcaggatgaattggggagtggttatccaagttttgtgaaatctatgcttcaatcacatgtttctggtggcttctggctggtaagcaactttcgtataccctaaatcgttagcttacattgcttgatttctgttctgtttggtaaagtccattgctagtctttacattgcttggtttaatcaattttcagtctttctaactcagtacctatgagaagtctagctagtagctatttatataacttacattgcttaatatttatgttctgttcgcttaaactccatcaccgttcttagtattgcttcgtgttactctaaaactatcgcttttgaattcgaaattgttgagataaaaatgtctaaccatgtaaactacacataaaagtttatgtgttaagtctagagaagaactattgtaactagcctaggggtgttgcagggaattgtagtttttccagctcaacaacaaatcttacattaaggttctaaggtcttggttttgtgcgtttctctggttaatcaagtctcttgtatggttttagaattgaatcttcttaaacttatctgatgtttttgtacatgtgaaatagcattagcagacagtacttctaacaatgataagctatttatataatttacttaatttctggtctgtttgcttagactctatcaccattctttgcattgcgtattacttggaaaagtatagcttttaatccgatgagtttgtgataataatgtcaagccatgtaaactacaaaatttttaattcaggacctctgaaatgttatgtctagagcagaactattgtaactagccttgggatggtgcagtgaattgtagcttttccagctcaagaacatcagctgaatcttataaggcccattctggattcgtttaaagtcttggtttgagtgtttctctggttaatgaagtctcttctatggtcttattaaactcatctgatgtttttgttcatgtgaatgttatcattatctaaccaagcaaagccattcttttggttgcaatcagggtcttccagtgcaattttgcaaatctcacctcgggttacatgatggtgtcataactttgatagatgaagaaggcgaggagtatgagactatctacttagcgagaaagaatggacttagtggtggatggatgggatttgcggttgctcacaatctagcatatggggatactcttgttttcgagttagttcgtcgtaccgctttcaaggttagtaaacctgttagttacctaccaaaaccgcaaaaaatgatgaaactgatgattgatgttgttattctgtcaggtttacattacaagagttggaagttgtggagaaagctccaaagatatgagctgatcatgtcaggaatttggatatgacctgagttagaagtttatttgcccttttgtcttttgtaagtaagatggtaactctaggctaattgtcctcttcagtcttccactgctaaatctgatattttgttaacaatattttggaagggttgcaaaaatccttgaaattttaggaatgggaaataacagtaaatttagtttgatgtttgatgtttttatttgttgttttaactcttaagagctaagttgttctaatgattaaatctcctactaaaatcgcatcactttctcctaaataatttaaacggatataacctaaagtatcgcttgatccactttagacttatcaacgaaattattaatgaaaaaatcttagtatcgagcttatctattttaaaaccattaactaaattattaatgcaagaaacacttcaagtaaaaatcctcaagtattagtacattcttgatgtgtttgagttgttggtagttgctactgatttcagcccaaagttatctcgctttcgccgtcatagatttcaggtaacatgtgttataaaagacctttaaaaaattctaaatattctttatatcatgcgttagaaaactttagaaatttgcatttgttatattttaaatatagacaaaaatgtagtatttttgaaaaatgttatcataaaaagtgttatttttgatgttcttcctaaatcatttgctcattttctatagtttatgaatgtggtgcaaagaaatacaagcttttaaatgtaaaagtacaaacttttcttcagtcgtttcttgattatatattctctaaacaaaattctcattattaagttaaaacatgttttgctaaaatagaaatcaaagctgatttttaagaatgctcaacaagtagtattttggatcggacaatgatatcatcatattagcatgcacaattcatttgaaaatttcaattttttctaagcgtaaattattgtattcatcttattataatcaatgcaacgcagtaaggcactagcagacgcaaaagagagtgagaagaggcttgaaagttaagtcgcaaaggaaagccttcgtcattgcttaacttgcaatcgaagtcaagaaacaaaaaattactctgaagggcctaacgttcacgtcaatcatccaaacacacacatgaattttttttagagtcttccattgttatcaattagatttttgctatcactactagaatactctcaccaaacactgaaagaaccatctcaaccaaagattaattcaagaaaacaactcaaaccaacaaacaaaaataaaataaaagtattgagtctttagaaataaccctaaagcaaatgttcagagacttttcttgtgtcttctattttctggactcaagagtaaaaataagagagaatg

SEQ ID NO: 23019 - DNA, 3000 bp, Unknown; identical to SEQ ID NO: 905
  misc_feature (1)..( 3000): 2750-1469P.txt file - cDNA_ID_2128402; gDNA_ID_1620336; Annot_ID_153802

SEQ ID NO: 23020 - DNA, 3003 bp, Unknown
  misc_feature (1)..( 3003): 2750-1469P.txt file - cDNA_ID_2128406; gDNA_ID_1620336; Annot_ID_153803
aaatcatcataggttgttgtaacaaatataacttgcaaagttcggtcgattcaaagacagcactctttaaatacgtaaataggttaattcataccgttacaatcacacgcgatacaaaatcatttcatatcatttgccaatgataaattatgattaacataatgataaacccaaatcacacctccaatagtaaaacgatatgataatataacagttgaattttctaggcacacatctgttgtgctagcatgggagcatcggttctctcgccggttatccccgtttctgtcttgttacatggcttcataccatcggttaaaccatctccggttttgacgtcaatgttttcattcttagtcttgatctccgatatggattggtacgataatgaaaccgggagaaaacccttttgacgacatgtctcaatagattcaataaacatttcctcgagactatacttgaagttaaaccccatgtccgtcagcttcttggaactgaattcaatgctctttagattctcatcaacaccttcaaacctgttatatagagttttgtttaggacaaagagattatgggccaaaacattttggttgaacaaaaagttcaggcttaaacgggtatatcttacgttgaaggtacgttatattcggggtattttggcctgagaaatttggagatagtaagaatggttgcatcatgagaggaacaaatataacgtcccttggcggctgcttgttcgtataagaagatatgagcgttgcataagtcgtccaaatgcacatactgtccttgtcttatgatcgagtaatgcgcctcgttccctaaaacattataatatattcaacgttttagatttaacattttcacatttccaacaaaagaagaagcacacacacgtacgagtgataggagagagcgcggtgataaggctaggcggcatagacgttgtgatgaatggaccgaccaccaatgttggaataatactaatgaaatctaatcctttctcttcggcgaaatcccacgctgctttctccgctaacgtttttgacacgaaatacatctgccacacaaatatatatgaactttaaattacttcaaaaaaccgtaacttgagtttaattaatatgtatattcttacccatcctgtcatctttttggacatgataaactcaagatcactccaatcattttcatcatagacattcttctgatgttcttctacattaacggttccggcagatgaagtaaatacgaatcttcgtacggtctttgccttaacacatgctttcattatccccaacattccattcactgtcggctttatcacttcgttctgattcgcaaatacaaaagtcaagttaagctaggttgacgcaaaaaccaaaagaagtttcctaatatagagaaactcacctcaggatcttttgattcaaaatccatgggtgttgccacgtggaaaacaccgtcacatccgtttatggcatcatcgtagcttccttcctcagataaatcagccttccataaagtgagtagcgtcttggcgtttggcaaatcaagaagatgttgtactttcttcaaattaccttgacaatccaaaaaaacccgtaaataaacgttatattaatatacataatcttaggagaaatgagtttgtaagaacatatagatatgtaccgggatctcgaacggtggcacgaacaaagtaaccacgttctagtaatcgcatcactagccatgaaccgatgaaacccgaagcgccggttacacacacggtctctttctgactaaccatttttgtggttatatgatagattgtgctttgggaaagattcaactatgtatgttcggtacaaatctttgtgatgtgaagacattataaataagacactagagattatgaatcgttattgaagaaaacagataataagaacgagaagctgccggtcacgtgagtaccaaccggagaagcacgtggggaacgttggttgacgaaggactaaagagatgtgtggtacgtaacaatctggtaagttgattttattatttccttaggtgtgtattttgttgttgtaccggtgggtgaaatacgttgacttcgatttgtttggtgagacgtgtgggtgacttcagttcagtttgtttttgtttttgttccccacccacttttacgaaataaatcaaaatttgtctaaacaaattaacattttgatagaatatatacagaaatacattttacttaagtaatattttaattttaattgaaatctaaaaatcagacacctaaaataattataaatcttggaaaagcttaaatgaaaaatatgtttatattttagatttatgaattaggagtttcttattacaaaattgtaaaattataaaacatattaatttataaatatgacttctagatttattgcaatctaaatattataagcatttacataaaatacataaactaaaactttaaaagatgtaattatccaattgtgtcccatgtcagctttttcattattatttcacgaattattataaaaataattgatatgttaaaatattgttttcaaaaatttatttatttccagttttcgcaaagaaaataaaataaaattagaaggacagtgaatcacttaatctcataaagtaagaaataacacgtggtggttacctcgtccacgtggattctaaaacacagaatcaatataactcttgtattttcaatttgttgtatcgtaagacgtcagagaagaggtcagcttaattttgactctcctccaaacagagagacaaagtaagccaagcgtctttggtgtagtccaccaccacgtttgagctcgacgcagagagagaagaatacttcaaagctctccttcttcttcttcaaccactagaaatcttcgttctctattcaattgcattgcgttagcaaaattctggtgaattgatttgatcagatcttcgcttgatttcgattttaaaaatcgaagaattttgtatcgcatg

SEQ ID NO: 23021 - DNA, 3000 bp, Unknown; identical to SEQ ID NO: 917
  misc_feature (1)..( 3000): 2750-1469P.txt file - cDNA_ID_2128418; gDNA_ID_1620338; Annot_ID_153853

SEQ ID NO: 23022 - DNA, 3003 bp, Unknown
  misc_feature (1)..( 3003): 2750-1469P.txt file - cDNA_ID_2128465; gDNA_ID_1620338; Annot_ID_153867
tttctcagcagccctctccatacgagcaattgcatcatacaaacactttgctatatctaataaagcaataacttcgccattttcaacaaccggcaaatgtctgaattttcctgcagtaggtaaggttaagatatagcctcattaaggatctagacacagcaatcagataaacatcaagtttctctagcttaaaaacaatgagacaaaccttggaccatcttttggagagcttcaacagcaagtgtttctgagagaacaaacattgggttcttcgtcataaccttagatacaggtgtttcctcgacattaagttcctgtgaaatcactcttgtagctatgtcctgaaaatccaaaaaagacacacatacacacagatcaatgaagtctccatttccttcttccaatctgtttctaactttttaactacacttagcgaatagtggcataccttatcagtaagaataccacaaagcatttcattagagtcagtcaacaacaaggcatcaactcgtcgtgaagccatccttttacaagcttcatatatagttgttgttgctggtactgtaagtgctttcgatagccttaaccgtttcacagtccgctcgcctcctgttaaacccctgctccatatacagatgagagaaaaaagttaaaaccaaatcacaatagcttcaatggaaaagaaataaggtaaacctgaggagctagatgttctctatgaattgaatacgagcataaactagggtttatatataagattgagacccagctgagacttacaaaggagaacgagaaacagtaagagatctccggccagtatcgagacctcgttcggccatatccatggatttcttctttccgtgcaatgacgcagtcgtaacggataagctccgtcttggcccgccttggctagccatatctactgtatgatatagaaaaaatcaaacccttgtaatcgtcaacgcttacgaaatgattaccaaaattcgaataaggaaagtttttctggaatcgaaactaaacaaaacgccaaaaaacaaacactaataagaatcagaaaactcgtgaaatcaaagctattaccaggcggattcgtcgggtcaacaaatggattctgggattgaaaaaactgagctacaccaagttgggattagttccgtttcgtagatgctctcttctctcctttctcaaaatgttcgtgagacagataacggcaagagagaaaacgacgatttgtgagacgagaaagattacagagattctcccgggaaagtgacgggaaaatgtaagaaaattagaaagcaagaaatattctgtgatttttctctctgaaaaacacgttttattttgcgattttcacccaatcggattctttgatttcgatgctctgtcgaattggacgatcgctaccttttttttttttggtctttgcttttttttttgggggggcaatatattgatttcttatatctggttattgacacttatatcctcaatatttgagaactatgacaagtggatcaaagatttgtttctcatttggcaaagggttttatcgtcattagctatttatggtcattattacacacgagttgatactttttctggattttattttttatatgttgattattggatttgccttttactctttcttcttagcatttggatttttttttttccttttttttggacaaattggatttcgtctaagacagaaaattcaaactgattttttcttaaaacaggttaatttaattaggatattaaaagttctgtgttctatctggataaaaacgtgtagactaaaaacaaaatgaaaataaaatatccattctgtctcattttcagtttcttacaatgtatttaaggatttgttccatccatggttgtgaaatctgtgtgaaccaaaaaaaaaaaaaaaaacagaaattttaatattcaaactttatattaattgttgaatatttcaatgttaaaaacagtgaaatgaatcaatgtcacaacagttttgaccaaaaggaaaaagaattggtgtcacaacaattttgaccaaaaaaagaaaagaattgaggtcacactcacaacaatagtcaataaccaaagctactttagcttcatggatatggaccaaacataagttatgaattataatactgggccgaaaactcaaagcccatatgtataagattcacgttgttcgaaatcttttcccactaaacaataattttataattaaacctaaagtatgtccacgtggataccatcaattggttcaccacagcattagctttcacatcacacgagaagcttcgtctctaactaaaaccaaaaatactccagctccttcaccactctctatttctctctccaaattcatttcttctctctttaagacaagaagttatggcggattggggcccagtgttgatcgccgtgatcctcttcgtagttctatcgccggggcttcttttccagattccggcgggaggtcgagttgtcgaattcggtaatatgcagacgagtggcgcttcgattctcgttcacgccatcattttctttggtctcatcactatctttaccatcgccataaacgtccacatctattccggttaactgtttagccagacaaaccggtgctgcttggttttatttcaatttgattgtaaggtctggatttgttttgtttgtaacattttcggatttgtgaatataatcaaaatttcaccaaatgatacaacatccagttttgtttttgaatctggtatcaatctgtagagtttgtttgggatctggtttaatttggttttcaaatgctacttgacacctaatgtacatccacctaataagtgaaacgacgacgttttactattattgggcctgtggtccgttaaaaagcccaatatgctgtatctcgtttaatttcaggtgaatctttcgacgaccactctctctcttttcctctttgcaaatccttgaagaaatccaaaatccatagcaatg

SEQ ID NO: 23023 - DNA, 2500 bp, Unknown; identical to SEQ ID NO: 921
  misc_feature (1)..( 2500): 2750-1469P.txt file - cDNA_ID_2128477; gDNA_ID_1620338; Annot_ID_153872

SEQ ID NO: 23024 - DNA, 3000 bp, Unknown; identical to SEQ ID NO: 936
  misc_feature (1)..( 3000): 2750-1469P.txt file - cDNA_ID_2128498; gDNA_ID_1620339; Annot_ID_153887

SEQ ID NO: 23025 - DNA, 3003 bp, Unknown
  misc_feature (1)..( 3003): 2750-1469P.txt file - cDNA_ID_2128505; gDNA_ID_1620339; Annot_ID_153889
ataattacgaaagtgacattgttattttacctgtcttggcccatgggctttttcaagagacataagacccgttgacccattaaagggctgtattaacgacaagttccaatttttatttgtttatcttttgttggaaaatgaaattctaaaaccctaaaaaatccaaccagaagggtagaagctctctcgccgacaattaccggctacaaggtttctctgctcgtcaacgttgtaagttatttcttcattgtaatcaaatttgtgcatgaattaggtcaaattagtagcttttgtagtaattcttcccgaaatgagagcttaattacggattgataacgagcttgcgaatcttatcgttgtttgtttcatgcagctctgaattagtggtattgaaagatgagcttatctcagaatgctccgaaaagtaagggtattaaaagagaggagctcaagaaacagtacgaagatgttgaagatgaggaagagattgggtccgatgatgatctcactaggggaaagagaagaaagacagagaaggagaagcagaagctagaagaatcggaactggttgaaatgaaaaagcttgagaatttgatattcgggtcactctactctcctgttacgtttggtaaggaagaagaagaagatggttcggctttgtttcatgtagaccgttctgctgtgaggcagattcctgactacgaggatgatggtgatgatgatgaagagctttctgatgaagagaatggtcaagttgtggcaattagaaagggagaagctgcctgggaggatgaagaagagaaacagataaacgttgatatagctagtgtcaaccgtctaaggaagctaaggaaagaggagaatgagggtttgatctctgggtctgagtacattgcaaggctgagggctcatcatgctaagctaaacccggggactgattgggctcggccagattctcaaatagttgatggagagtcttcagatgatgatgatactcaggatggaggagttgatgatatccttcgaacgaatgaagatcttgtggtgaagtctcgtggtaacaagctgtgtgctggtcgtcttgaatactctaagcttgtggatgccaatgcagcggatccttcaaatggtccaataaactctgtccacttccatcagaacgctcagctgcttctcactgctggattggatcgacggttaaggtttttccagattgatggaaagaggaacaccaagatccagagcatttttcttgaggactgtcccattcgtaaagcggctttcttgcccaatggctctcaggtcattgtctccggaagaagaaagttcttttacagctttgatttggagaaggcaaagtttgacaaaattggccctttggttggtagagaggagaaaagcttggaatatttcgaggtgtcacaagactctaacaccatagcttttgttggcaacgaaggttatatcttacttgtgtctacaaaaacaaaagagctgataggaaccctaaagatgaatggttcagttaggtctttagcatttagtgaagatgggaagcatttgctgagctcaggaggtgacgggcaagtctatgtctgggatctgagaacaatgaaatgcttatacaaaggcgtggatgaaggcagcacttgtggcacttctctttgcagttcgcttaacggagcattgtttgcttctggaaccgacagaggaatcgtaaacatttacaagaaatctgagtttgtgggaggcaaaagaaagccgataaagacagtggacaatctcacatccaagatagatttcatgaagttcaaccatgatgctcagattctagctatagtctctacaatgaacaaaaacagtgtaaagctagtccatgttccatccctaaccgtcttctcaaactggccgccaccaaacagcacaatgcattaccctcgctgcctagacttcagccccggaagtggcttcatggctatggggaacgctgccggaaaagttttgctgtataaactccatcattaccagaatgcttgaagtggtctttaacaagggcagttttgggattgttgtgtttcctctttttttgtcgcaagtactctttatgttatcaattttcctatccaattatcgatcaatgaaaaattttctttctgattcttgggattgagtgggccaagttttgttttctcacgattttgacagcatcaaccacttatttggtactatcatctaaaaataaaaatgcaggagaaaaagaaagatgtcaacattatttcatggattaacacaaagtacaaattttagtagagtggcttactaatagctgaaagggtatctcgacccagagattgaatctgaaccgtccattctgggaagggcaaacaaaacagtgtttgtgtctcacgttctcttccttctctaatagagtcttaagccgctttttcactccttaaacccaaaaaaaaacattagtactatttccttcggagcctggccggcgaatccgacaggtcgtttcagctgtgtccgaaggaaagttccaatttttatctgtttttcttcacggaaatccagttaaggtaattgtctacatttctcgatttactttggtttctctgggttttgctgttttcttttctaatttctcgaatgattcatcatttcttgcatttggggtgatgaagaagcacaagtttacacattttctggtttatatgcttcacaagtgcttctcttatgatgttgtttattagtattggttgtttgatttcactgaaaattagtcagtcaacttacagtgtattaattggttcaataaatttttcataattcatttcttaacatgattttacctcattcattatatttatagatttagatcccttgataatgatctgatattctttctgtgaatttgaaagttgcaggtttccacattgcacagctgtaccatttgtcgagatcacaacacgcaagtctcttagatttagcaagcttatg

SEQ ID NO: 23026 - DNA, 3003 bp, Unknown
  misc_feature (1)..( 3003): 2750-1469P.txt file - cDNA_ID_2128521; gDNA_ID_1620339; Annot_ID_153893
gatcaactgcagagacagatccaatcaacgcgtctaagatatcattatccatagggaattttccactcacaatcacctcagccacttccttagcctccgttaatcgcttagctgaaatcaaatccagaataaaagctcggtaatcgctgctcctaggtgctactccgagctttctcttcttctttaaaacaacctgtctctcatacagattcccagtaactacaaacgcttcagctatgaccctataagccataaaatccggtttgcaatctatgttccttagctcttccaatatataaaaagcatccatttctcgtgaacacttacaaagactatggagaatcaacagtgcaatgattgagccattgatattcaaattagcctttttaacctcatccaccaatctcaagagctgattcgtttcagaacttctacagaaccatcctatatagacaccgaatccaagagtgttcaacgaaacacctttatgacgcattttaacaaacagtttctgtgcataatcataacatccatcagaagttaaaccagctaaaagacgattgcatacatcgggatgaatctcctgacccgttgaaaaagcttcttctaaaacccaaaacgcactctgagctttcctacccagcacaagcgtatcaatgagggagcgatacacggaagaatcgagaaggattttgttcgatttaacctgtttgaaaagagcgtccatggcggagaactgacgagaaagcgaaagagacttgaagatagagtggtaagatatggagtcgtgagagtaacctggttgctgagcagcccaattgaagaaaccgagagcaagagaatgatgattcagcagaaacgggtctatgactcgagccacaagcgaagggcttattgagtgacgaaaaccgagaccgtgaagactctgttcaatcaatggactccatatccgagcagctcgagagcttccggaaacttttagcagctctcggccgatcctcaccgcaagctccgtcgcaggtctcatggccgagaagctgacgtcaacattttcagggagtcgctgacaagttggagaaatcgaatttggttaatgagtccattagttagaagtcaaactcatactggcccagtccaaaaagtgatttttagtgacccaaaactttgcatacgagattaatccttattacttgcccatttttggcccatcaaatatctgcatacacacagtaaatgtcgttcaattgtttacatgagaattgagaagtttcctagaggaaaatgacaacaattcacaaccagacatgacaacaacaacctcactttttggtaattttgcagatggggtctataggagtgacccactaaaagaataagaagaaaagaaagaaaccattacatgttttacggtttcagtaattaaatttttgttttaaaaagagaatatattatctctacttgggaataatgtcgactgggagatacaataaggaaagtgaaaatataggataatataccaaaagaagatatgattgaggaacaagaaagggagatatgtcgacttatcgagtgtccacgtgaatttgacataagtcgatcacattcttaagaaaaaatatagaagataatggagtgggaacaatggaagtgactccagattgcaaaatttagcatttgtaagtttgtttaaatctggcacaaaagtgtattgctttccctcttggtccccatacctataccacctacttctgtttgttcctttgttccttgttcctttgtttcatcccaatatgcttccctgtaatccccaattaacccatttgctttatcattatcttttcatacttgttcaaactaatctaatctgcattgtctatggtgtttgtttcacacagacgcctaggttcaagattcaccatctaattcttaccactaacaagttcctatttgatctacaaaaacaaaactatgtgcttctaacgctaaggagatgggtgtaggataattaatagaggagaacaaacccatagcattacgagttgtaatattaaaaacactgaagcaaacaacagtacctgatgtcgtggacagcttcacttgtctgaatcaactagccccaaagtcttcgttgttttgtcacggagctcccatatgcctcctggaaaaagtactctttctttacttttctgcaggatggtcatcaatccaaattgcattttcttcttgtcggagacagacagatcaacaaagcagactctttatataagaaaattattaccacataatgcagcctcaatcactctaggaatagaatgcagccacaatcactctaagtgagcaaggagccagcattgattgttgtttcaagtaaaataaaataaatctctaggcaaagcagtatcagtgtaaaacacagtttacattgttactataatcaaacacagaatgagtttgtacctatgtaactagatttcaagcagagtgcatactccttctactgtactagagaagaatagaccatttcactcaatttgcacgaaagaaagtctaaatatcaaggtttttacaacacagagcaatagcaaaaattgactatttattcatgctttatctgcaaatgacttgtaaatgtaaacgccacataaaatccactgttttacaatgtagaaactcaaatcaagataaaatagtaatacctgagatgctcgatgattgtaattacggatagctactccatcaatgaatttgaggcgtcatgtaaccacaacagtaggggctcaagtatgtaatggccctccaacttgttcttgatgtgatcttgaaagagaatggccaaccaaaattttgtagctttcttggtgttggtctccactgtcatcaacctaaaagacttgagatacagttgcaaccaattcactgccacagtaagactttaccaatcattgttctctataaaagtcactttctcctctagtattctgtagcaactgaagcacgaaaatg

SEQ ID NO: 23027 - DNA, 3003 bp, Unknown
  misc_feature (1)..( 3003): 2750-1469P.txt file - cDNA_ID_2128528; gDNA_ID_1620339; Annot_ID_153898
ttagactaatagacaggtgtttgtttttactttttagctataagctataggtttaaacttgatgaagcctttgaccacaaaaaaaaaaaaaaaaaaaaaactggtgaagttgtagtacatttgacgtgacgatagctcgttctgattgagtgcaagttagagtcgagagatactatatccttgaagatatatatcaacgtatcttcacatgttgttttcattagcaactctatcaattgattatcttcacatgttgttttcattagcaatatactatcatccatattaaagtcaataccgtatatatctcttaatattagtctacttcttctaattatgtagtcttcaatgattgtgttgttgtatccgtataaatataatcttcaattacaatctagaaatacgaatagtcgtcgatctcatctgcgattgcatgcttctttatcaaaggatggttcaaataagaaatgatatacatagttagaagtaacaacaaaacaataaagaaaaaggatttattgtaattccaatacaagtacttaaatggtaatcataaatcaaagcttaccaaaaaaacaataacaaaaaatataagaagttaagagatacaagcagctcacgagaggaagaaagaaaacaataaaatgttaaattaattaggcaacatagatgtggatatgaagagcgataatagagactgtaatgcacgcaaagaagataagagtgtggatgacaatggctgcgccgcttgtttgaaagccgccaaactcaaccactttggtcttccctggaagctgaaacaatactccaggcgtcaatacgatgaacagaaataccgacattaagactggtccccaattcaacaccatttcaatataaagaatcaatcgatttgatgtatatatgtctatgtaaattagaatcgttattgtatgagctaggtagtgtgtacgtttctatgcaccacttttatagagtgattgaattaatatggaggatcgtaatgaaacagtggcttgaaccggacgaaattagaaagtttgcaaggtgaaggaaagaacgattcccctgcagctactcgattgtatcaaagttatatattattatattgtcacactatgtattgattgttgggtatgctaagaatctgattcttgtctcacaaacatttttgttcaccctcttgtttttttgttataagagacatttgccttttttagttcttgttaggagagacatttggcctttgagagtctgtctcttttattcaacaaattcataataagtaaatttctatatatgcctagtaagtataagtgttttccatgaaaatggcggttactcccgacttatttgaatacaaaatcaaatggataagttgatcgaataattaggaaacgacattatgtgccaaaaacaaagatgataaaatatcaattgctgtccatataaatctaaaacttatccatatccgagtcaagccgctcacatctttattttattatttaatttaaacgcatgtttttatttaatttatttgttgatacgaacattttatttaatagcatgttggtctactataaaatctttccatatacttctctcatataaagacacgggaaaacgactcttcacccaattcttgcttgatttccaaatgctaatccttgatgataagaaaacgtataaccaaacaaaccaatcatattcatcaattgatttaatgccaaaagttaaacagtgtcttatgctatgtgcaaagaacacatgcatgcaagttgcgttcatactggcaaaaaatacatgtttgcaaattgcaagttgtgtaatatgtcaaattatatacagataatttttatttttatcacaaactaagttatttttccttttccaacattcataaccccactaaaaagggttggattgaaccttaacgacaggtcatggtggaaccacccccacccaacaggccacattttgattataaagaaaatttactctcgcctatatataacctcctcaacattctatgaaacagcgtattaaaaaatgataattttatctcatttcacttcatttgttacgtcatccaatttccgtcagaagaaaaactgtgataagatcgattccattcaactagttggtaccaacaatgacaagaagtatcacttttgaggatattcactaatgttaactttcgtgaataataactttttaaccaattcaacgtgcatgtatagttggtaagaataccagactattccacgtactaccaagattagtttgtgttttagccggcttgtataaaattaataaatattattttattattcttattttcataaattatgataaatatgctttgaattgctgtttaaattttcttttattaattggtccagcaaagacagatttaaatccagttaacgataatgttgaaaaaggcttaagggataatcaaccttaattaaaagactgaaacaatgacaggcacgccatttaaaaagatggcaggcacgcacagagaattggaaaacagtgacgaaattcacaacagtcccacggtgactgactactactcataattatcaacgagccttttgttctacaatttgtatacgacttcttcactaaaatccacttttttctttttcttcttcctcactaaaatccacttacaagttgtaaccaaattttgatcatattaaaattatcgtaattaacaaactaaacaggaatcgcatatctgcaatagtaactatttcacagattggttttatcttttctatgtcttgtccttttttgtccaatttaagaccataaaaggagaaaatcgtgtgaaagacaagacagatagacagacacgaatattcaaaaaaaaaaatttcttttctctttctaacaccacagatttcgcaatcgtgttttgatctgattcttccaggattctcccggtggcggagagaagaaacaaaggaaacccagaaagcatttttctcaatg

SEQ ID NO: 23028 - DNA, 3000 bp, Unknown; identical to SEQ ID NO: 929
  misc_feature (1)..( 3000): 2750-1469P.txt file - cDNA_ID_2128549; gDNA_ID_1620339; Annot_ID_153903

SEQ ID NO: 23029 - DNA, 3000 bp, Unknown; identical to SEQ ID NO: 933
  misc_feature (1)..( 3000): 2750-1469P.txt file - cDNA_ID_2128553; gDNA_ID_1620339; Annot_ID_153904

SEQ ID NO: 23030 - DNA, 3000 bp, Unknown; identical to SEQ ID NO: 932
  misc_feature (1)..( 3000): 2750-1469P.txt file - cDNA_ID_2128563; gDNA_ID_1620339; Annot_ID_153907

SEQ ID NO: 23031 - DNA, 3000 bp, Unknown; identical to SEQ ID NO: 943
  misc_feature (1)..( 3000): 2750-1469P.txt file - cDNA_ID_2128697; gDNA_ID_1620340; Annot_ID_153945

SEQ ID NO: 23032 - DNA, 3000 bp, Unknown; identical to SEQ ID NO: 7145
  misc_feature (1)..( 3000): 2750-1469P.txt file - cDNA_ID_2128715; gDNA_ID_1621129; Annot_ID_172425

SEQ ID NO: 23033 - DNA, 3003 bp, Unknown; identical to SEQ ID NO: 18331
  misc_feature (1)..( 3003): 2750-1469P.txt file - cDNA_ID_2128719; gDNA_ID_1621129; Annot_ID_172426

SEQ ID NO: 23034 - DNA, 3000 bp, Unknown
  misc_feature (1)..( 3000): 2750-1469P.txt file - cDNA_ID_2128727; gDNA_ID_1621129; Annot_ID_172430
catggctttgtctctttaagcgaaaactcactcgacccgttagagtaaacgatgggtctgggtccgggtccgggcattggactgggaagagcggttatcacgagaggctttatctcactttggtgtggataaaacggtagcatcctctgtccttgaccgttctgctgactttgttgttgatttcctctgttgtgattgtgaagagaaatttgttgctgttgttgttgctgctgttgttgaatcgccatggaagagctcacgttctgtacttttttgcttttctttgaaccacccgacctgttaacccgacggacattctcaccgttctccgccgttgtggtcatgtagtgtttgacgctgatttctccacgcacggaagagaaaaggcttctcttttcaagagtgtagagctgaacgactgactctccttctcttccaacgctggaacccaaaaccctaacctttcccaagaagtttctactgttagaagaacgcttctcgttgtatacgttgatttctagggctttgtgtctgaggtcgttgacgtcaataacgtggaagacgagcttctcgttccagattgggttcaagtctttgggtttgaccttagtccggagacgttggttctcgaactgcacttccacaaaaggtgacgaagaatcttcgccatcttttggcatgagattgtgggcccctactatctccaccacgagcctctcattgccagtgccggttttagcttcagtcattaccggttagaaacaaagagataacaacaccaatggagaagattaaaagcacaagacaagtgaaaagacagtgactagagagagaaagatagagttatagagtctttgtgtatgcagcagacattaacaagagagggcgtgccaaggagagaatctggattttgtattttcttacaatattaaactacgtctcagatatttctcaattttaacttttaaaagatttttttatcatgacagttttgaataatgaataataggttgagtttgtaaattagcaacaacaaaaaaaaatatacgaacgatagcttttcaataaatagaagagaacataaaggaagggaacttcggagaaagggacataacagcctcgagcttcacgcacctggtcgcgcgtggatttaacaacgtgtctcaaccaatggaatggctctgctctgtacttaccgtctgctttttgctttcctcctgatccagtaggacccattttatttcctctgtacaattaaaaacgaaagagacatctataaacgtggtattcacgcgcgcttagactaacgcgtgaggaataatgaaaagaacaggctcaaccttcgtggcgggtcaaacctcaaaggtctatagaacaacaattttgtctcaaaagagtattcgtcagacctcagaaaacatttattgtactataatattagtaattcttgtattttgatattctttagctttagttttcaggataagtggggatttttataaaaatttgtaattataaaccatagattttatttttccccaataaaaatattacaatgtactgatgtagtgattagtgagtaaattaatactccctttgctttccacgagcagagcttagaaaaggttttggacttgagtttgcaggtctgtccttgtccttgtgtacataacgttcttcttgcttttttagagttcccaaaaaaccaataatatatcggcatttatttcatttgttacacttgtattttcatttttggtttcatgggttgtatgtcttgcttctttctttaattttctttttttctttaattttgttctgcagactttgtgcatgccagtgttaaataacaaaatcaaaacaataataataatacaaacttcgtccttgtaatgactgccgcgtggcatccagttcatagtcctcgtaaatcccacttgtgccttgtgagacctctggctctcatcacacaactcaaaaattcaaaatacgtaaacaactgtcatgttgaatcacgatgtttaagttttacttaccaacactacacgatttaccttttattttctaaccgtacgagctaaacgcacataaatattctttagtttgtctcgggcaacgtatattatattttgttccacaaaaacgataggattctagttagataaaaagtttcatcccaagttaaagtgaccgtatatggacttgacgttaaagcccaatatattgtgacaaaagaaaaactcaacactgataaaaggggcccatatattattgtctgcgagggaaccttactaagtcatatgctacatggggatgatagttgatgattgtctgcgagggaatctggatactatatgttttaaattaaagaattgtgattttacatataatgagcacctgttgtatcaaaaaaatcaatcaacatgtctcactaaaaaaaacaaaaaaactgttatatgagttgtatattattactactgattttaaaaagaacaaataattagataattgattttttttgttatgtaagaaatcggacaaaattagtttttccgcgtccgaaatacaagctcgtaataacaaagaaaagacaggggtaatttggggatgtaattgtcataattcaacgtctacttatgatgctgtcattttaattaaagtaaatattttctccaaaaacaaatcccaaaggtgggggaggtaagggaagagggaagcacgaaagccaaaataaaacgaaacttttttttataatctgagaaagtttgcgacattacaacaatcagaagaatcaacgcgtttcggttttgctaattccctttatttttctgggcattgaatctggtttcttgaagcattctcgtatacgcattgtcggtgtatttgtcggtgtattggaaggcttagttacaaagaagaagttcaatgttgctctgatttcagctagatccagagaataagcaaaataacattgagtttcttattcgttaaacaataatg

SEQ ID NO: 23035 - DNA, 3000 bp, Unknown; identical to SEQ ID NO: 961
  misc_feature (1)..( 3000): 2750-1469P.txt file - cDNA_ID_2128828; gDNA_ID_1620342; Annot_ID_154009

SEQ ID NO: 23036 - DNA, 3003 bp, Unknown
  misc_feature (1)..( 3003): 2750-1469P.txt file - cDNA_ID_2128857; gDNA_ID_1620342; Annot_ID_154018
gcaatcaatttctttattattttctgaactgtaaataataaggttcatccccttaaataaattttatcttcttgaaacgtttttttaagaagaaatttcattctattcatacataatatttttatattttaagaaaaatcattttaaatttaatgttttgtttaaattttataaaatccaaatatggttgcacattttaactttgatatatggaaattaaagtaatttcatatacccctgaaagcataatttaattttaatttttgaaaagtatttgaatattaaaatttgttttgggatgtgaaatgtttttgaaggcatatgttgatttcattgtgaaaatcaaagtgtctttgtttaattagtgaaaccacacacatgattataaccatcttactttgagagattcgaagaagagagaatttctatataatgttgtaattgatcatgatttaaatgagtttttatatacattttaaaatgatttggtttagagggttacttctctaatttttagagagagaattgaattactcaatatggtagagaaaattttggtcaagagtgaaatttttatatctaagttcgaccatctttggaaaaaaaacacatttgtctgaaaagtgtgttagttgggttttggctaaattctaactggtttacatggtagttagaaatgcaggcggtctgattatccatgaaattcggaaaacactccaaacttgggacaaactttatggtggtctttcggagagaagtctactataaaacaggtgcaattctaccgaccagatcagctgatagggtttatcaaaaaaaaaattaattttaaaactttataaaagctacttgtctacaattcttgataaaagatgaagcattggataagctgctaatcaaagctcaccagtaaaaaatgatcatagacaaaaaaaagtggatggaacatctgaagcacatgcactagaagtagcaaatgaatctttcggattatgcgcatgagcttattctttggatctagctattatatagctcattggatatcaatggccataacgaaatagtaaatcacattggtggtccaatagtagcaagttaaagttcaaaaagaaggaggacggaaaaattttcacaaacctgcatggaaaatttattgatcttctcctctttgttaacaatggaacccatgttacgactcatatgccatgattctttggatctggttgtggtagagcttatcattgtatatttcatctgtggtttcagaatatggttggtagttgaattagatgttaacgaaccacatgcattttaccttgacggaatttgataaatcactttctcataggggctaacatttttatatctgagtcaatcatatggcataagttggcttgcacaacaaggtgtattagttactccaagtaatatactatgaccaaaccacgccaacaaacctcgtcctccgccaaactagagccacaaatacatcgatgggaaccataccgccgtcgacggaggggagtacctactcactcatgaaacttctttaagaaatcttgacatgcgatgaaaatcaaagagaaccaaagaaactagacctaaaaaacttcttcaagcgagagaaaaaactcaaaatttgatctaatgattgtctccaccataatactgtttaagcctttaaattttaagctttaatattctttgaccgtttatcatcaattataactaataagtaataactaatgctcatacaatcgttgtaagtcaatcacattctctcttatcgcttccaagcttaacctttgacataattctatgaaacagaggtattagctctcaaattttgaggctcattttatgtagatttgttagtgttttttttttaatgaattttctaggctctataattaaccaaagttttcataattagtaaaatagaccccaaattaacaaaatatccaaaattagccaaaaaaaacataattagcaaaaagtcccaaaattaagaaaaaacagtaaataaaaattatgaatctcccataattaacaaaataattaataaaagtaaagtttacttttaaaaaaggcccaatttttttttcctattcagcctggattttataagaccggctacgatcgcttctattcaccttcattgtaaaccgataaaacaatcatatatatatatatatatatataattttggcacaacaatcatatattaaaccgatagttttttttttggtgtgtttgagatgggtatcaattgttatcttaaaaggaacctagaagtaaatttcgtgacctttacacaccacacatgttgacgtagatacgcccaaacgcatgtggtgttgtatcaagacacaaagtcacaaactgtctaaaaagtcaaaacccaatccaaaaccatcatcatgttttcggcttctttaaaatcccggtttagggttctttcgtagcaacatagagtagacggtcctgactcgtgctctgcctctttaatttccggtttagtactctttcgtagtaagtagaaactctatccatatagacccaaagaagggccactcttctattctcaaaggactcggtaaaaaaacaaatgcgaacgagacaacaaaaacaagtaagaacactctacgcgctccctccaatgcgcgtaaaccccacgtgagactgatatccaaagacaagtgagttaaacgctctgtttaagcgcgtgcgttcagacacaaagtggataatcatggggaaactgtctaaccctaaagaaaaaaaagagaaagatttctaattttttttaatagctaaccaaaagagatggagaatgctaaaatacgctagatatgaaatagtagcttaacctacgccgtattttagtcgttcctctcttttaaacctacgttcctcgtcaccgtaatcgctctcgctctctctcttcttcgtcgcttcatctttctctctctctttgtaacttcgaaaccgatcaaatccatg

SEQ ID NO: 23037 - DNA, 3000 bp, Unknown; identical to SEQ ID NO: 966
  misc_feature (1)..( 3000): 2750-1469P.txt file - cDNA_ID_2128873; gDNA_ID_1620342; Annot_ID_154026

SEQ ID NO: 23038 - DNA, 40 bp, Unknown; identical to SEQ ID NO: 965
  misc_feature (1)..( 40): 2750-1469P.txt file - cDNA_ID_2128878; gDNA_ID_1620342; Annot_ID_154028

SEQ ID NO: 23039 - DNA, 3000 bp, Unknown; identical to SEQ ID NO: 990
  misc_feature (1)..( 3000): 2750-1469P.txt file - cDNA_ID_2128890; gDNA_ID_1620344; Annot_ID_154093

SEQ ID NO: 23040 - DNA, 3000 bp, Unknown; identical to SEQ ID NO: 989
  misc_feature (1)..( 3000): 2750-1469P.txt file - cDNA_ID_2128900; gDNA_ID_1620344; Annot_ID_154096

SEQ ID NO: 23041 - DNA, 3003 bp, Unknown
  misc_feature (1)..( 3003): 2750-1469P.txt file - cDNA_ID_2128919; gDNA_ID_1620344; Annot_ID_154100
tacacagtttttatgagaaaattaaaacgaaattaaagaattttgttgttagtcattgcaatattacaccataattttcttaaaaagaatatataaatgttacttgtagtatttcttttttgtatagtggactttgagaatgtttctgcctgagcttttggcgaatataactatgagggtgtgagagaaaacatagatgaaggaataagcgatagatcgaataaaaggaccaatgttgtgagacaaagtaataacataaactaaaagagtaaacgctagtaatagagaaaccgatatggtctaaaaacagaacactccaaaacatacatagattaaccctaataaaaaccattaatcaatttcatacagccaaatctagctggtgaaaaaagattcaggtttttttttacgcactagagaagaacaaaacgaacagtacggcactgagtacagttgtgaacgaggtcggaatcaaagaagatccatcgttccctgaagaaggatttggagctagaaatccggctgtctcaggtccagcagcagctactcctggagcaagacctgataaaattaggttccacattaagaaatctcaaaagcgtaaaacatctcaacgagaaatcacataactaacatggagaaaaagagcagagatttccaatcactcgagcaaatttttacaaagaaaatcacaaataaggaattcacacaaatttttgtcatggttcgtattaattataattttttgtattgtagaatcttagataaatcattttcactttaagtgagaacccagatgatcaaagtcaaacaatcgacaatttttatcttttcaaaattttcaagtgggaatttaaaaacacaataaagcattgcatgagacaaaacttaagagtaaaattaaaaatcaaccaagaagaaagacaaaatacctggagcagtacttggagcaacagacactgtaagaacaaaaataaaataaaaaagcattataagtaatttaatcaacatcaacaacaacaaaaaatagaatcttaaaacagtttcgaaaaatctacaaattattttcttaattaaactgaaaaaattagaaaaaatgtggatttaagaaaccgctctcgaagattaagcataacaaattaagatctacaaaaccggaagagatctaagaaacaaacaagttaagaaatgaatagatcttacatccacaagtagcgatagaaggagcgtgaagcttgcatgcggcgggaagagtagaagccttagtgatattcaaagtaactccaagagaagcactgctcttaaacgcttcacatagacactgagagtcagctttaagcaccgtcttaagaccagagcaacatgtaccttccggtttcgccaccgtgcctccgctcgaaacgaaggataaacagtcagccatgttgagtatgagagtcgaacagtctacagacggagccggcgccgttgcgtggtggtgagatgcgccgagaactgagacggaggatagggatagaagaacgatgagaaagagaggtgttgttgcggtgaaggaagagtgtgttgccattgtgtgggattttgattcttcttctcttttttttgctcttttgagtttttgaggagagagtagagaggttttttaatggtggaaaatgagaaagagtgaagaggaagaagaagggattttgtaggtcggttttggggttttggggtaatgtgcaaaaacgatgacgtttaggtatacgtgtctctttgcattttccatatggatgcgtgatcgtggggtctttcaccaagagacctgccctttcatctttccttctttctttttttctctcttccttttcaagtttttactcatttgttttttaattactccattttgaaaatttattaactttactaggaaaaatttattagctttcatacactaactaagaaaaaattaaatgcacctccgaattctttgttctttcgctttcctattatgcgaaatttgcgggatatttctaacaatcaggggtttccaaacaaaaatctaaactaattagtaattagagtaaaaaaattgagaaaaaaacaacgagaataattgatcgagaaaaataaactattgtttgttactatgttagtgtactctcttgaaaataacaaaccacatttaaggaaatgttttatcctcaaacccttattgatgtttggccttttcagtttctatgtggttgtgagtctgaggccgttcattttttaaaccaccgagttaagtcatggaacttgttgtttgcctctgaatggaatacttagcatgtcaaattatcaatattgatagcttaatgtacgcaagtgaatagataaatattacacgtaaaaaatagaggaagattaatatgagttctatatttagcctccacgattcatctacagagaaagaaaaaaagtaagttacttcgtcttttgttttaaaacgaatttggaaggtcgagagtagagacatatgttattatataacttactctttactctttagctccacacatggatttgtatttatactcgagatgattttccattgtatgataaaagcatcaaatcttatttccaaaaataaaaaagattccggttggtgatttggtcgacgtgtaaagagatcacagaatcgtagccattcggatcgtcaaaaaacactacctaccgacttcaagcaatactgacggtaactaatatttgggccgtaaaactcaagcccatacaatatgggctcattgttctctactcttttgaaaccgatggcctattgtggcctagttgaagagtaaatacataacaaacccacctcataacttttattatcttcccgaattgccccattagaaacaaactgtgtaaatcagtcctcatcctgaaagaaacaaataatttcaatctttgcttctatatcggtactcctaaaatctagcgaaaacttctcttttgtctctcaagtcagactcaattcccatg

SEQ ID NO: 23042 - DNA, 3000 bp, Unknown; identical to SEQ ID NO: 986
  misc_feature (1)..( 3000): 2750-1469P.txt file - cDNA_ID_2128923; gDNA_ID_1620344; Annot_ID_154101

SEQ ID NO: 23043 - DNA, 3000 bp, Unknown
  misc_feature (1)..( 3000): 2750-1469P.txt file - cDNA_ID_2128932; gDNA_ID_1620344; Annot_ID_154106
gttatttacttggtaaacatcactcttgtcactatcataagtatcattagattaataatattcatttggtagtagagtttcactaactactactatgtgtacaagtcacatgagataaggatgatgaacatgttatttttggatcatctgaagataccgattatatttaagtatttaactaccatctatagatatattatcatggttcaattatcactctcttcgtatttatctcatatctattaagtagtgttttagattattattattattattatttttgttaagaagagattattttattgtaacgtgattcatagttttactaccaaattattatttttatatgtgatatgattatttatattatctagtttaatttgtattatcattcgttcaactaatttataaatactgttatagtctttaaaatatttttttctaaataactaaatgattttttaagttctgtgcaaaaatcccaaaaccataagcattgtttcattttgatacagaaagaatatattttctagttagggttaatcgaggcatacgacaactatctttttcaaatctgttttttttttaaaaaaaattgaactcttttagtcgcctatttcatcaattttgtttgaaaaacaaaagtctaaaacttctttttccgcacaaaaacaaactcaaattattttttttctgaaaatcggttaggccatgcagtggataattgtctggttggatgtagtggtgttcatcaaagtcaaatttattttattaaataaaaacatgataaccaatacaacacatatacattctcaaatataaaataaactaaaacaagttaggtattaaatttttagttattggtcaaaaactcaaaatatatcagatcgaaaatattgatagatacacaatcgtgtgattcactgaaacttcaaccactgacatcagaaaagcgaaaaatccggaagattttgtgacataagaaagtcgaagaacttaaaccggagatacttccaaaactatcccactaattgccggattccgcagtctgttatcgactcttcttattatgacttcgctcaaagtcagcttccaaaacattatcaatttcgaatgtatttatttatctcttaaaaccacaagccctaagtcttttgtcgaatgtccatacatcacggacggatgtgagacgtttttttaacaaacaaaaaaaataaaaatgtgagacgtctagtcgtatatacaagaaaattatactgtggattacccttttagaagaaaaatatgaaaacaatattcattaataaagataattgtataattagaaacaacaatatgataggaatgtggtacaatttcatttgtaatacagtggtacataggctgtaagtacatgtcatactttgaaaatagttcgttctgcatgcattcaaaatttgaatatgattacattatttttttaatacatgtaaacgcaaatgctaaacaatatccttgtttgacacagtcacggtcataatctcaatcttagttcattggttgaagaactaatataataaaaacataaatcgagcttttgacaataacaaaaaaaaatatttagagaggcgtagacaaataaagctcataatatcctcaaggaaagatgatcgtttagatcttatcttataaagtcagcggtcacaatttgaggaatataacaatgatactatatgagactgatacaaaaaaaaatatatatatataattttcatctatctcaattaaggttttttttcgtgtaatctacatatatttgaagtagtactagtctttggagataatgtgttttgtctccaagataggtttctgaatagtacaatttatcgcttagcacaagtcgttagaagaacaaatacatctgtctccatataagctagggaccttggtttgtagaaacttcttaaatgaactgcctcggccctttcctttaaccattaatcttttacgttatttattagtctctcatttgatcattgcacaataaataacacattgaaaaaatgtggtctggtgatatagctaataaggttcatggctttctatagtttcaaatatataagaactgtacgtgaatcacaagggaaaaactttgaattataatcattagcaatagtttattaagaagttttttattaaaaaaaaagagtgtattatcattttgtaaattacaaaactgtattcgccgtgaaaatatagtaagagtttggagaaacataattaacctgatcttcttctttttttacagaagaatcttgaaccaaaattcagagtaattaatttctaaagtttgtggaagaaccagattgcttcatgattccaatcacaagttaattcatttactaccagtagttttatagtgagaatttataaacctttggatatttccattattaaaatccacttggcagacttttgcactttgtaaattaaagaagaatttgatgttcgttttaatcctctaatattgagatctacctaccaaaaaatggatgtatatacaaatttcctaataacaaaatagtataatcctcatttttaattatatatttgctatacatcaattaggcatgaacctaaattcaaaactcctatacgtaaacgatatttccatcattcgttacataattcaatcaatttcacaccaagtaactatcaaaacgaaaaaaaaaaaaaaaagtatcaaaacgaacaaatccaaaagaaaatgcttttaaagtcaaccagtcgaccagctcacaacgcactgaccaacaccacgcgcttttgaatctcccacaaacggtgtcgtttttcatctatcccccacaaacaccaaagccggttttgttgactcacacgtcattctttgactaatcaatctcctctataaatagtactctataacgaactaactctactcactataacttaaacacacacttcatcttctctaaaaccctaaaatttaaacacaagatg

SEQ ID NO: 23044 - DNA, 3003 bp, Unknown
  misc_feature (1)..( 3003): 2750-1469P.txt file - cDNA_ID_2129013; gDNA_ID_1620347; Annot_ID_154203
aagaaaatgttactagaaaaactgtcactatttgtctcagatcagattgaatacctggagctcatcaaaagcaccactatcacccctatagaacaagagttctgtttgcagttgctcaatttggctccgcattctttgcatttgtgcggttgctgggtctcgattgatctaagtattagaagaaatgacaagaatgttaggccacaaatgatatctatagttgagaattcataattaaaagcaagaactaacatataagtaccactgctttgttttgaatattgcgagcacgatttgcgtatttgagcgtatttaaagtttcctcagcatttgtatcagcgggacttacacaagctgcaacattcagagatcataaattatgtgatccaatagatgggtgaaaacagttctgtctaatacttggatcataaatgaaatgtttgagaaaccataccaatcatcacagttttgctattgccaccaagagaatcctaaacaacagataattaccattagtttttctttttcataaccatatatttacaagggcatgtagttcaattgaaaatgtatttacgtgtataaacaaacacatagggaaccttgatacctgtagcaaacgagttaacttgctgtcacggtaaggaacgtgacctccttcctttctctttttctcatctccaagtgcacttataacatttccaagagctaatagacctttgttgatgtgaatacctgtgtaaatattgatgaaataaaccttatagtttagtcatagtctcttttaagaaaccagaaagaatatttatacaactttatacatcataaagataaacatgagatagataaccttcttttaaacgcatcccatcagctcctgttcgttttgcacgttctgaccccgctaggtcaaccaaatgaagctttgcacataatatatcttcacctccatcttcagttgttgtgcaagaaccaccggcaatcttcttttgttccagagtgattgtgaagattgcatgggaccgactaaaaaagcaagaaacaaacattacattagtatacttgtaagaactataatttcttaatattggtcatagaatatgatctaataatgaaattttatcttgatgcaaaagtactcataactctactagtggatcagccacattagctctttcaagtattgaagtagttataaagaaaacggaatgaaaacagtgcatttcaaattacaaattcaccttgactggctattcatgtttgtgctgcctgtagctcgagacaaagagcctcgtgctagaaacgagcccatctcctctttcgtcttgacttcagcctcagtaactccagccaatgttattcctccactggcagtttccctgatttgaattggagctcgtgagagagcagtgtgctttgcttgaacgccactgtcatttttaaggagggccgaagaatttgagtccagcaaatcaaaaacttcttccttaaaaatctgcatttaaaggtaaaaatcagcaagtgaaatatacaaatcaaatctcaaataacaaacacagaagctgtttctacctcaataaaagacactcgtatcaatagttcagatgaatctttggttgtctccactcttctaaatatatcctccataacgtttggtataacgccaccatttgtgcaatctccactataattagtacccatggtataggttttacctgaaccagtcttcaattacaacaaacaaacaatgaatttgatggatcaaaccaaaaaaaaaaacacgtagctaaagggaactgcagagtttagagaatttaaaaacaaacctggccataagctagaacagtggcattgtatcctttaaacaatgcatccacaagtggagcaacacagtgattgtaaatctccgaacacggatagccaccatttccgtagacgaaatcataagtaaatgtatgcgaaccaatatgtacctgtttcagttcataagaaattccaacaaaatgagttttatcaaagttcgaatctttaaacatattttcagcaaaaaaaaaaaaacattcacgcatcaattgatttcccgaattgaaccgaatcagttctatgtgaaaacaaatcccaaatgtttcaaaattcgaatcttacagcaaaactattaactgatgaagaataaacgttatttctcattcgcgcataaatttgatttcccgaatttaaccaatatataatcccacgaatcttatcaaaactgaaaaactctcagaagaaataaacgcagaaaaaacgaaaaacccttccaattgaattacctgtggctctttgggagccacggtgatgcaatctgtgcatccgttcaaaagctccggtgtaattaacggacggatgttgacggcaaccctaacgcactctgtgctctccataaccgccgagcagaaacccagaaaacctctggttacggatctaatccagaaacgaaacctcaaatcaacaccacgaaaatgtagatccaatccagaaacggaggagctagggtaattttcgagaagaaaattctcaggaaatgcgatttttgagaattcaaattttgaagagagagagagaaagagagaagggggacttttgtttattttgagaggtcaacaattaaaaaacaagaaaggcaaaacttaaaaccattatggaaattaaaattataagcgccgctcaggtacgaattcaaattttctttgagaccgttacgcacgtgtcatgcacatgatcatcactaaaatatcataggcccattattttatatttcagcccatattttaatatcaaaggcccattagtttatatttcagcccatagttttaaatattggcccatgttgatctttgtttctgaagaggaggaggaagaagacgatggttgacacttgacagagtaagctcagaaatggcgactctggtttcgaattgaacttgtgaggaaggtttttagggttataaggtgataaagaaaatg

SEQ ID NO: 23045 - DNA, 3000 bp, Unknown; identical to SEQ ID NO: 1015
  misc_feature (1)..( 3000): 2750-1469P.txt file - cDNA_ID_2129017; gDNA_ID_1620347; Annot_ID_154204

SEQ ID NO: 23046 - DNA, 3003 bp, Unknown
  misc_feature (1)..( 3003): 2750-1469P.txt file - cDNA_ID_2129056; gDNA_ID_1620346; Annot_ID_154157
aaacaatcaaatctgagaaatcctcagctaccgctgctatggaaacactgaggataagaaccaaattttctaattaaattcaatcgaaatagattccatcaaagccgaacgaaataagctcacctgtgagacagattcttccactagcaactccagaaaactccacagataaaattgtttaccagaaaacaaaaaactcagcagatagaagagattgtatcaattcatcgaagctagatcgaaaaaaaaaactgtgtaggactttctagagatgttcggcagaagacgatgaaggcttcctatttttttttttttgacaaacattttaaattttaattaaactattgtttttgtttcgggagaatcaaaagacaagtgaccatgatatcaacacgtggcaactaaatcaaaaggtttaacaggcttgggtttttaatatcagaattcgtggacgagagagcagtgtgagatcctatcagttccagttttattattggtacacgtcattagtaccttctcgaaactgggcacgcctcatcttcttattggcttacatcgtaatgatgacatcagcctttatttacgtataacaaattaccatgcggttaaaaaaaacaatagttatatgggccgaagaaagcccaaagaatctttagttgtttttccgatcgatctgcgagtcgagtagtttttttatttgccggcgccgggagagatcctttgatctttttccgatggaggagcaattcggcgggagcgatgagagatggaaaggatcattggagaatataacggagatggcatcgaatctcgattcgcttcagaaacttctcctcaagaaagcagtcttcgttgaagaagacactttctctagagcttctctcgtctccgagcaagcccgaacaatcaaggttaatcctttttcctgtgataaaatttgaaattatagagcttaattgtctgaattttgagcttcttttctttgactttgatgattgcttctgtgatttgtggattcgatctagttgatcacgatcgcactttttagtttgctttagtactactatagctcagtgtaatagtgtgattctggaattgcatttgacggtgaatttgggaacttgtagttgatcataaattttgaatcttcgattttgtgatctgttaatggtacaaatgatcaccaaatccttgaagactggacttgaggtttcactatgaaaactcccaagtgcaattatgtgtattaagtagaaattcttcatgttgtaagtaaaaaaggactgtgttacatgtttgagataagggatagtttcagattgtctcttaactctgttcaatggtttgttttaggttcttgagcaaagagtacaaacactagaaagagaactagatgctgccattacagctgctgctcatgctcggtctgagaaacgccaagctgagtcctctcaaaaggctgctgaatcacgtgcccaagatgtcacaaaagagcttgaaaacaccacaagtatgcacttgataatcacttcttgagttgatgcctggtggcaccattctctcccgcacgtttatctgcgttccagtttcatattcactctcactcactgacttatacaactcttggtttcagaggttttcaagctgcatatggaagagcttcgaggaatgcaagaacagatatccaaacgcgataacgagatcaaactcttagaagctataatccaaacgctcggcggcaaagagcggttgggaaaaagcgacgtgaatggatgatgatgatgcgttttttcacttgtaaaggtttgtactcctgagtttgtggagatgtatcacttcgaagataaatgtatttttgtctgtctatttggtacgttttagaatcttgcctgttctttcaagaaatgaatgttacatgggcctgaccctataaatgggcctaatgtgaatcgatcgatactaaaaatgggttttataggtgtgtgtgtgtggttttcacacgtttgccgccgatagtgctgcgatgccatccagattcagtaacgcggcatctccaggactccagccgtgtggagcaagaaactacgtaaatttgacagctgaagatgcaatttcacaaaaagagaataaaagaaacaaaagaggattatgaccaatttagaaaaaacttttttcaaaaaagtgatgcttcatggtttttagcgtgtggggtgtctctctatattatctaattttttggtagaaactagtgtacaatatctaattttgataaaataccaatgaaggaagttttgactatttctgattgctttatttttgtttgctttgttatagtatatacaagcatataatttttatttttaaggctcgattaagtaaggtaagaaaaatgaggattgtgtctaaaactaggtgggggtgaaccaaagaaatacgtaaagtaataaattaatgcaaaggccattgttgtttacttcacgctgcgaaagtggttaaaaagaatctatggctactaattattctcttacaaattttctttatacatttggataaaagcaagaacataaacactttctgattatgacaaagaatctgaatttcattttgctgttactagtcaactctagtcaattgtcatgcatatcatagcacagtaaaccatctctatcgactatcatattaataaagagtcactaatcaaatttccaatattcaaaaaaatatatcgtaatcatgcaacatttaagtttcgataatcattcaatacgagtatatccaaacccttgatatatgaaatatgtattcctacgaaatggccaagtttattattccacttttaactaatttcaagcttatcacttcatttttctttttgctaaatcctgcacatgattcaatgttcttgaccccatttgacgtacaaatacaatataacgtgcatctatttatacgtgtatatatatgcaatcaaacctcaaacacaaccacataacaaaaaaaatg

SEQ ID NO: 23047 - DNA, 3003 bp, Unknown
  misc_feature (1)..( 3003): 2750-1469P.txt file - cDNA_ID_2129068; gDNA_ID_1620346; Annot_ID_154159
ttgattagaggttgagaaacagaaatagggacttgagagattacggaaggtgatgttaaggacgagaagtgagtaggtgtcgctgatatccggtggacctgaccttccgaagtgcgacatggttttcccgccggcggagaaattgggagcgcgagagagagacgaagtgaaattaggttaaagcttttctgaaacaatggaatctactagatacggggacattttttttaaagcttgacgttgttgttaattacatttgtaccccttgacgaagacacaaaaaaaagaagataatcgaaccggatgataccgagtttggttcgtatcggttcagcagcgattgggacggttgagacgcaattttattatagtctgaaacatttttaccaaaacaattctgcaatttacaaacaccggtacatctctaacacctttaaaacatattttagcacattcaaacaaattcatatccaaaatcattaaaaaaaacaaacagaaaaactccaagtaggatactcttttgaaattggtttagtgataaccaatcggagctgctgcttctcgcaactcttttccttgattgcgaatgtcctgcaaataactcacaatattaacaattcaaaaacaccacacaacataacaaatccacagatttttaaaattcattgatttatattaaaaactatgaacttgtatgtatccacacaccaaatgtcgttgattctactacttatatcatttgttattttaatatcaccgaaatggacccgaagaaatgtatgaaactcgggagttttggaaaaaaaataaaagggttgttgttttagactcacagaagcaaaatggttgacatctcgatgatgagcttcatcagcacgaatcaccgttacaacatctttcaacgtagcatctttaggcaatctccaataatcaatagcaatcgcgggcgcggcaacattctcgatcttcccattgtcgatatctttaagaaactcggtgtaagaatgtatagcttcttcctctaaatatccaacgaccctatgagctaaccgcggggaaatcacgtaacaaacgaaaaaagagttgaagaatattccttgaacaagcatcactagaagacgctcgtaccatttgggtttgactaactccatcatcgtcattagatgcatcctctcgttctctgcttcttcgagtaatgctttgatccaaccgccgctatgttcgaattttcggattgattttaggtgaagaagcattcctccaaccattcctggtactgcagctactgtctctagcatcatcgctctgcatccatatcgtctctgctgaccaaacatatatttaacattaaggaacaaaaaatgtaaaacattagcatgtgaagtgaaacagtgaatccatacgtatgtatatatgtgaatcatggtaggataatatgtgcatacaaaattacaaaccaaaccaaaccgaatcagctaaataaaccaatgaacatattaaacgaatcaacgtttcattttaaaatttgaaattacagtcatgcctgaaaaaatatatcggtgggaatacggaggagcttgacaatccggtaagcgactttgtcggcgatattcttcggaacgtggtgcttcttcaaatctatcgacagatttgcttgataagtctcccatggctgttcaaaatatacttaagtcatatatctactacatataaaagagtgcttaatttgtctacgaactttgggatgtgtataagtttaccataaaacagttccaaggccaatccgatccatctttccgagtaattttcatctttgctgtctctattccccaataacttggaaccgctactgaccccccgccgttttgacccttctttaccgtcaaattttcatctttcttctccatcgccgatgcagaactcatacccatccacctcaagttaaaatttcctattcaaattttagaaatatacaaatcctaattatcatgtacaattgttataaggttgtatgaggatcatctacagatatgcacaccttgcacatgcttagagccgatcttgaaatcgccaaaaccgccgcaccagtcatgaattcgcatcggtgccgttatctcatacggacttttcataacagaggtggaggaaacagaactcacgaacatgttacagtttcctctgccgcagacaagcagaactcgtaaagctgctttcgtaatgagttgactcatcttacgacactctctcgtatacttatagattcacttctcagataagaggcttgttctctgactgaaagaaaatgattcaactctgttttttctcgaaagaaagtgtaagtaggggaaacaagaaggaaataaaaaatgacgttatcagctgatacgcggcgaatactgctgaatacacgtggctcatatccaactgttgctttacttttaagataactatttttaaaaaaacgaatgcacattttttaagtttgtccgaatcttgaagtggcgttcagcagacagagcgcacgtgaatctggtcttgactgaactgtccggtccaatatcttttggtttggtttaattcggattaatagattgtctccttaagaaaagttcctaaaaggaacattaattataattacattcatgaatcaatttagcaaaagtacacacattgaataaaaatttcatccacgtgtccacgtgtaaggtttgtattggataaaaatgttttggttcactaaatttataaaacaacctccaccatatcggcgctttccttccgatttcgtcctcccccagaaaatagagaggaaaaaaggaaaaaaagtaatcatcgattcgctttcacaacctggaaagctcgaaaagaggaaaaaaattctaaagagcttatcaagctcacttcatacacctagatcgatttagggttcgtttgatttttttttttctgtgattgcgacagctagagatctatctctggtggattttgggtttatgttccatg

SEQ ID NO: 23048 - DNA, 3000 bp, Unknown; identical to SEQ ID NO: 1002
  misc_feature (1)..( 3000): 2750-1469P.txt file - cDNA_ID_2129087; gDNA_ID_1620346; Annot_ID_154166

SEQ ID NO: 23049 - DNA, 3000 bp, Unknown; identical to SEQ ID NO: 1008
  misc_feature (1)..( 3000): 2750-1469P.txt file - cDNA_ID_2129091; gDNA_ID_1620346; Annot_ID_154167

SEQ ID NO: 23050 - DNA, 3003 bp, Unknown
  misc_feature (1)..( 3003): 2750-1469P.txt file - cDNA_ID_2129094; gDNA_ID_1620346; Annot_ID_154168
gatcactactccaagctcctctgctaacttgagacacagcaaattttgagctgcagcagtcaagaaaagcgcactagagtttccggcgcactgtcaaagatcagaacaaaattagagaagcagaacaaaattcgaaaacttcaaaagtctctcaagtcaaatacaaacaacaagaaagaatctttcatctaaactagaaagcaacctataagaaaaatgaaagattctgcatttgaggtagaaacatcaaagcagccctcagattaagacacaaattgatgcaaagttcaaactttgtttctcaggatcacactactaactaataattggagccaaatcatgaatcaaaggacataaaacaaagaagtaacctggaattgagattgaatcaagtaagagcctagtttcctcgaagaagaatcattcggtttacttccagccgagagcgatagagacttgatgatgggcaagaaaatgccaccagctctagcagtagtactaggcatcgcaggagcaattaaagcctcactaagcgtgagaccataagatagacctaaagtactcttcccaagccatttgacaaagtaagtagcgattctatcaccaagacctgttttgacgaatccacgagcgaagaagaaagagataacgatcaaccagataacctcgcttgtgaaagctgagaaagcggcggagaaagaaagcgttttggtgacgattgaagcggtgagaccaatgaaagcccaagctccgactgggagaggactaaggacgagaccagcgattgttgagaggaagattgagagtaattgccagccttgtggtgtgactccttctggtacaggaacagcgaatcggaggattaggccgacggagattgagagaatcagagggatgagtttcgctccttgaggagacggagacggagacggagatgggggaggaggaggaggagcgttgtcttgcggtgcggcggcgattcgtgtggagaatcgaggaattggtttgagaagagggaaggagagaggttgaacggagagagatcggagggagattgttgaaggcggagatctcgaagaggtacgacggagaagagagagacgtgagggatggtgatgatgatgatgggagagtaaggtggaagtggcggtggtggagagagagtgaagagcgaaactctccatcgccggagattatatatatagagagagtgtctgtgacggcgaagtgtttaattttcgtcagtcgctcgctgtgtttttgtcgccggagagatctcgatcaatgatgatgagtggatgtgtgaagctgaaagtgaaattacactgagaatctaaaaagtcttcggttctaaccaaacaaaccgaaaccatggtaaacttgaaccgaaccactttttctaatttggttcatttttctagccctggtttaccaaaatccgaattcttttggaggcaatcaaaactcaaaagtcaaaaacactatcatcataaattcaaaatcatcgggtgggtattattttttaaatcatcggtttatcttaaatttttgaaatgatatgttttttttttttttttttggaaacttgagaacatctcattactaaagtgtgaagctttgtctgatgtaaaaccaaatgagagattcatgtcatgaaaattgaagagtagaacaatgctccgagtcaagaatgtagtgtcaattcgacggatcatggaagtactgatcttctttgtcttaaacactatatgaatctacccttaaactaaaataaaaaatacacatcctattcgtacgtcccattgttagatgtcaccaccaattttcgtgttaagaataccaacgacgcatatataaactattacatcatctaacaaaacttatagtataaaaccaacaaaaatgaaaaaataaacttaaagtatgttgtatatgtaaattacaatatattatcttgaacgacgaatacataatgttgcatgggtcatccgaccaaagaagcgaggatggaaaaacataaaaatgtgcggttggtatgtcacgggaatgggctgccactcaaatagtttcctatatcacaattatcacttatgatcccaaggattgttatttggaatctcggatggtcattttttttttgacattttcttcataccatacttagcatattagaggatacgatgggatccgattccgatttgtaaagtggaccatatttgtttatcgagttattagcatagtcatgagatcacacatcaatgtaaaaacaataaagaatgttaaatatgtcgtatgtgattgaagttgtactattgacttagatctgtttacctgaatttatagtctaaatagttttgcagtattttcaatcttttgataaaaaacaaaaatcaattgaaactatttttttcatacaaactatatagttgagcaactttgttacgtcaaggcagagacacatcttattatcagtttttttcaacatctgaaaatttaccactaaacttcaatctctatactagtagtttctgtactaatgacaaagatttaaacgacgattattttgaccagtgtttgaagcatatgattattattctcttttgtctccaaaaacataattagagaaggagacttttctttggtgtaagtgtaactaaaaagaagatgaaaatgaattgaaagtctataaaagttggctttgaagagaagagagccaagcaagtgtcttatctcctccacaccgaatcacagagatccttaaattcttcatttttcccaatttgcgccgccattaaaaaagcttagctaatcgctatcgtcatccgcaactaacaagacccatcctctctcttcgctacacttttccccgcatcttcttcttccaatctctcctattaatcggtactgtgttttcttctgtgatcgtgagattagaaaatctacccaaatttttgattttgcgataagggtttttcttaatttcgtctacggatatagaaaatg

SEQ ID NO: 23051 - DNA, 3003 bp, Unknown
  misc_feature (1)..( 3003): 2750-1469P.txt file - cDNA_ID_2129123; gDNA_ID_1620346; Annot_ID_154177
tcaagcccagacttgtagctatcaaaatttccttcgcatttttgaaagatacatggtcaagaagacagagcaatatagatacaacgaaccttcttcatcacaattacagaaaaaatgattatgtagatatcatgtttagagcctaaacggctaaacagttccatcattaatgtcttaaacaagcttttatgaacagacaatggaaccttcactgcgcaactggagcgtataaaagccagataacgtgcacgaatcacctcttggatagcttctgtatcttctagattctgcagaatactcattacaggtaagtgagaatacctagctactatgactacacaaaaaaaactctacatagccgtttaggtctttaccttagaccccagcaagaaattcttgacaaaaagcttacttgttttccttacctttcaaagcatcaaggatgaatgaagcaagcaatgtgtgttgtcactttccctcttcgtttgtcagtccagaacacaacaagttatctagtgaatgaacagaagcagcaattacgacatggaaaccacctatgttttgcaatttgctgctctatggccttttgagttggaggaacataattcttttggaacaaaatgaaacctgagcaggataagtaactcactttactttagataaggcatttggctagtaaggttttatagtctaataaacccgagaaagataatcttaatgcctttactcagaactcagaagcagaagactatataccagaaagcgacgaaagcatccgaattttgagcaaaataacatcaacagattccaactacagggattccaaggaatcaaaatgctagtatttccactacagttaaacatcaacaggaaacataaaagctaaggcctacaacaacgaaacacccgcaacctaaacaaagagaggaaaaagccttacttcactaagtagccttgatcttatcatctccaacaacagaaagtatgggcaaactattcaagaattcatcaagtccctcaaagaacccaatcccttccatattatctacctccctgttacttccgatcccattgcctgcatttcccccacctgccacaccaggctcttccacttcattactaaactccacattcaaatccaacctccccaggttcttagcgcctgttcccattcgttttctagtaatataactccctggtttagacataaccccagttgaagacccaacagccgcagcatttgaagcaattgaaaccgcgtgattgctagcactactgatactttctacattttggacttcttcaactccatgtttcttgttacttctcacatatgtttctttccctttcccaacattcgtcttcttattcacttgtaccacatcttgccaatcaccatcatcaccagcgtcatctccatccgaaatcgcaacataaatgtcatcatcgtcatagtaaatcctaggaggacccggttcctttctcttctttggttcaccatccaacttttgcagaggacaggcaaagagaggtgaaataggtgaccaacttggagcttgaaattcaccggaaaaccccaatggaaacaaagcccatgagcaaaagtaaacgtcttcgtcgtctttcttatccaccggaggttttggtatcgtcacagcttgaaacgctcttctacattcttgacatttcaaagtacattcttcgtaagccttagggtactcaaagagtacaaagcagtaagggcaagcggtccagaagctcgtcgccataggatccgccgaggtcccagcctggctctgagaccgcggtggcggatatacggcggtgctactgctaggttcccactggaaattttgatgcgattgggtttgaggatggaatccagattgaccgagttgactaagttgcaattctcggtcgtagaatgatttcttgaacggatcagagagaacgaaccaagcatcggagacgattttaagagctcgatcggcgaatgggagacgattaacggaaggattgaggagaagagcgagtctacggtactgagtcgcgacgtgttcagggttttgagctaaacgaccgagtcggagaacggcgtaccagtctggcaagttggaatcacctaaacgagtctctccggcgagaagaatgtcgcagattgcgaggatgtagtctgcagcttctgctcgggtcgggtcagcttcgcatgcgcggatcgcaaatgtctttgctccttgaagatcactagacgctagaagcttctccgatgttacaagccactgatccgcctccactctgttaccaccaccaccgccaactccgccgcgtccgcctaccatatcccctatttctttttgttccctttcgtttttcctctctccccgttgaatttatttattattttatcggtaaagagtaaatacagatctaaaaattaaaaggacgaaaacatgatggatcgtcaatgggccggaacaacaacatgatggatcgtcaatggcattttggtccttttcattttatataatatgtgcaatgtgatggatcgtcaatgggccggaacacttttttctaaatttttcacttacaaaaaatattaataaaataagatgtaatattattctcttaggacagtttctctaaacaattggaaaagtttcttgtaatctctcaaatgagagactcactcatctttactgagagatttttttaattaaaaaaaacattatttactattttatttttatttttgtagatgagagatttgaacgaaaaaccaccaatacagatgctttttaggatgttgtaaagcccaataattcttttaagaattaaaatataatctggtgggctttaggtctggacagcctaactaaaataaaatattacattccgattcccagaaaataattcgtaatcaattgaccaaaccgatcgatcactgttgtcataaaagtcatcgccatcttggtttcgtgatcgaaaaagactcgtgaaaaaatg

SEQ ID NO: 23052 - DNA, 3003 bp, Unknown
  misc_feature (1)..( 3003): 2750-1469P.txt file - cDNA_ID_2129131; gDNA_ID_1620346; Annot_ID_154179
ttgcggttaatatatgttatggcagacaccatcctctgaattggttagcttttggtctaaatggtgcagagattgtcttcaacccttcagcaactgttggtgaactcagtgaaccaatgtggcctattgaggtttaacttctgattctccactttactcaatttgaagctttctttctttagtaacactgtctaacaatgcaatatgttccttaaaacttgcaggcacgaaatgccgcaatagcaaacagttactttgttggatccattaaccgagttggaaccgaagtattccccaatccttttacgtcaggtgatggaaaaccgcaacacaatgatttcgggcatttctatgggtcaagccatttttctgcaccagatgcttcttgcacaccgtctttgtcccgttacaaagatggtttattgatctcggacatggatctcaatctctgccggcaatacaaggacaagtggggatttagaatgactgcaagatacgaagtctatgccgatcttttggcaaagtacataaagccagacttcaagcctcaagtcgtctctgacccattgctccacaagaattctacataagaagaaaatttcactctgtgaatcttcaaagaagaaaagtccaataatcaatgttcaatcatttgtgtaaatgtaacggtaactgaaaatctgtttgtagctgaatatatgttgatgccaaaaggcagctcctttgcttttataatcgaaccggtttataattgaaccggaatccaattccaaaaataaccgtaatcagatactatgaactgtggggttttctactcctcgtcatcttctattcgttatccgttttgaagcgtactcggatgggattgagtttcgcagatgctttaaattctagaaaataatgcaatctcttaccttaactcggtacccaactccaatttccccgccaagactcaatctttacccgctaagacaaatcgcagcttctgttctctctgctccgaccgccggtattaaccgtcgcgatatggcgtctcgccatcagtcaacttcctttaagccccttgccgttggtcggaatttgaccggagatgatgatgatggttactgtactcttatagactttgcaggtaacaaactgctctgtctgaacgaacttagcactgtctcgataattcaagttaatgtgttgtctgtcatccattgtcaatctatgtccgaaaatccgtaactttagtggaaataccctgaatttagcatctaaaatgtgcttaattgagtaagacaaatcttggaaactctcttagacgaacaatggttgggttttgacttttgacggttcctctgtataagcagtttgattgaagtcttaaatttattattattttaagttgttctatgaaattttctgataggtagtggaggaggagaagggaaaaatgtaggagaggatcttgtggtgttgctttaccacttacaacatgcttgcaaaagaatcgcttctcttgtcgcctctcctttcaattcttcactcggaaagctctctgttaactcctctagtgggtcagaccgagatgcgcctaagccgctcgatattgtctcggtctgtatcttattactctcttttttatcatgattcatatcaagattcaatcttacaattcatgtttccgttttgcagaacgatatcgtcttgtcctctcttagaaactcagggaaagtagcagtaatggcttctgaagaaaacgatagtccaacttggatcaaagatgatggtccttacgttgtggttgtagatcctctagatggatcacggaacatcgatgcttcgattcccacgggaactatatttggaatttacaatcgtctcgttgagcttgatcatttacctgttgaagagaaagctgagctcaattctttgcagagaggcagcaggcttgtagcttccggttatgtgctatactcttcagccactatcttctgtgttacacttggatcgggaacacacgccttcacgctagaccattccacaggagaatttgttcttacccatcaaaacatcaagatcccaactcggggtaaaaagcgtctaatgacacatatgacttgatccattgcgacattcctattcatggctctgaacaacctgcattaatcgttgttttttgtatgatcaacaataggacaaatctactcagtgaacgatgcgaggtactttgattggccagaaggtttaaggaagtacattgacacagtgagacaaggcaaaggtcaaaacccgaaaaaatactctgcgcgttatatttgttctctagtagctgatcttcacaggactctcttatacggtggagtggctatgaatccaagagaccatcttcgtttagtctatgaaggtaaccctttggcttttctcgtggagcaagctggtggcaaatcctctgatggaaaaagagggatactttcgatacaacccgtgaagcttcaccaaagattgcctctgtttcttgggagcttagaggatgttgctgagctagagagctatggagatgtgcagcagactgtgaaccctggctatgaagtttaaacaactcctctgtttcatattatctgtaaaaacaataaatgaatcgatgttagatttggttgcttgtaacattatgtattaggaaagttagatccgtgtatatatctgtttatcaagattcaagatcgactggtataatcacaattcacaagtttattatgtttctttatcagaagcaatctttcttcgatttctaacacagtcccactcccataaattggttgttagatttcggttaagtttagtaagaatttttaaaatcggtacggtatggtttgccgttaaataataaatatataatgcggatatttggcgcaagttagcaacttagcgttaaagaccaccaaagacttctctcaagtcctctgcgccggaaaccgccgtgacgagattggagagggagagagaggagagataatg

SEQ ID NO: 23053 - DNA, 3000 bp, Unknown; identical to SEQ ID NO: 1022
  misc_feature (1)..( 3000): 2750-1469P.txt file - cDNA_ID_2129155; gDNA_ID_1620349; Annot_ID_154240

SEQ ID NO: 23054 - DNA, 3000 bp, Unknown
  misc_feature (1)..( 3000): 2750-1469P.txt file - cDNA_ID_2129155; gDNA_ID_2926256; Annot_ID_143118
gtgaaaacgaagactggaatctgaaacctggtggccgttacttctttacacgaaacatgtcctgtttggttgcttttgctgtcggagaaaagtgagtcttccgattcaattatgcttccatggtataagatttggtttggctttgataatgaatcctggaactagttcaagctttgataattgaagggttcttcacaaaaatcgttttttttttctttcttagattccttatttgttgggttcagggaacctacatttgttcctcattttgtaggtatgtgcctggtaatggttttcatgccatagctgctcacaccgatagcccgtgtcttaaacttaaaccgaagtctgcttcatccaagtctggctatctcatggtgaatgttcagacttatggaggtggtttgtggcacacatggtttgatcgagacttaagtgttgcggggcgagcaattgtgagagccagtgatggctcgtttgttcataggcttgtcaaagtgaaaaggccattactaagggtacccactttggccattcatcttgatcggtaaatttctttcatgagcttgtctagtgaagttttaggctaatgcatttgccatcaagtggagttatgttttgaagctcattcatgctgttttgttcttcgtgtattgtttagcacagtgaacagtgatggatttaaaccaaatttggagacccaacttgttccgctactggcaacaaaatcagatgaatcctcagcagagtccaaggacaaaaatgtatcctccaaagatgctcatcatccattactcatgcaggtatgagtatgacataatttggttagtcactagagtcattcctctgcatcgtttctgaacatgcaccaagtttctaagatattagatcatgagaactgtggaattactgttgctaaattttttatatcattaccaacatttcgagtttctatcatagtatcatcatcatccattagtgttgctaaatttttgtatcattaccaacatttcgagtttctatcatagtgtcatcataatccattagtgttgctaaatttttgtatcatttagtttaaatttgggtaactgtaaaatccgcaaatatctcaaagtttcctgatcgtgttgcagattttgtcagatgacctggactgtaaggtcgaggatatagtgagtcttgagttaaatatctgtgacacccaacctagctgccttggaggagcaaataatgaattcatattctctggaagacttgataatcttgcatcaagtttctgtgctttgagagctctcattgattcatgtgaatcatcagaaaatctgtcgactgaacatgatatccggatgatagctttatttgacaacgaggaggtacccttttcctctaagatatttattaggttccttcaaatcgagtaacatactagcagcactattgtcctgaaaattgttgaataaagaggacttgcatttaaccttccataacttttttgctttgagctgatgatgtccttgaaccgtctgagcctttttgtaaaaattcttcctaaaaatgtgttgtttcaataggttggttcagattcatgtcaaggtgctggggcgcccactatgtttcaagcaatgagacggattgtgagttccctaggaaataagcaggtcactgagtgtacatttgaccgtgctatccggaaatcgtttcttggtacacactttctacttttgcagttgtttatgcatatgtagtttccagaatttttgtgagacagtggttacaaaattgggatggtttcctatctcttactttctaatttctactgaaacttgtgtttgggttcttgtggttgcagtgtctgcagacatggctcatggagtccaccccaactttgcagacaagcatgaagagaaccaccgtccccaactacacaagggtcttgtaatcaaacataacgcaaatcaacgctatgcaaccagtggaatcacttcttttcttttcaaagaagtagcaaagctccatgatcttccaattcaggttaggtgttcttcttaatgttaagatgaatctacacatcatagatcttctagatgctctgcactaatccacccacatttaagaatgaaatactgacatttagatttttgctatttctgcaggagtttgtggtgagaaacgatatgggatgtggttcaacaataggacctatattggcttcaggagtagggatccgaaccgttgattgtggcatagctcagctttctatgcataggtatgttaactactgccattccttagcaactctttctcatgtttccaaatcaaaatatgttagactcagcttctggtttttggaactcgttacttgtgagacagtgtgagagagatttgtggaacagacgatatagacatcgcgtacagacatttcaaggcgttttatcgatctttctcaagcgtagacaagaagctcgttgtggatgattaactccccggatattctctctaggcaacaaagatcttaagacatggtgagaaatgttaagctagttgcttctgttcgtggatggtcctcagtctcacaacaagaacagaacctaaaattgattttcttgtttaggaaattatagaaaccaaattggaatgtaatcttctaggttaaggttccggtttgtaacactgcatattgttttaccttgacaaataagcttctttctaatttgtcgaatatttatatttttcagaagaacctttaattttctttccaacagaaaagctttccaaataaaataaagagtaaccaagcaaaggatatattcttatgtaagaccaatcaaagaataggatagagaaaacaccgaagattgtatgttaccgttatgccttgcatatacttccggatatctactacatatacttgagcttttacatataatatccgattacctctatttgtctttgtttatttttcatattctattaggttttggtccaagcaaatttgatatg

SEQ ID NO: 23055 - DNA, 3000 bp, Unknown; identical to SEQ ID NO: 23054
  misc_feature (1)..( 3000): 2750-1469P.txt file - cDNA_ID_2129155; gDNA_ID_2926256; Annot_ID_204555

SEQ ID NO: 23056 - DNA, 3003 bp, Unknown
  misc_feature (1)..( 3003): 2750-1469P.txt file - cDNA_ID_2129159; gDNA_ID_1620349; Annot_ID_154241
tacttctttgaaaagaaaagaagtgattccactggttgcatagcgttgatttgcgttatgtttgattacaagacccttgtgtagttggggacggtggttctcttcatgcttgtctgcaaagttggggtggactccatgagccatgtctgcagacactgcaaccacaagaacccaaacacaagtttcagtagaaattagaaagtaagagataggaaaccatcccaattttgtaaccactgtctcacaaaaattctggaaactacatatgcataaacaactgcaaaagtagaaagtgtgtaccaagaaacgatttccggatagcacggtcaaatgtacactcagtgacctgcttatttcctagggaactcacaatccgtctcattgcttgaaacatagtgggcgccccagcaccttgacatgaatctgaaccaacctattgaaacaacacatttttaggaagaatttttacaaaaaggctcagacggttcaaggacatcatcagctcaaagcaaaaaagttatggaaggttaaatgcaagtcctctttattcaacaattttcaggacaatagtgctgctagtatgttactcgatttgaaggaacctaataaatatcttagaggaaaagggtacctcctcgttgtcaaataaagctatcatccggatatcatgttcagtcgacagattttctgatgattcacatgaatcaatgagagctctcaaagcacagaaacttgatgcaagattatcaagtcttccagagaatatgaattcattatttgctcctccaaggcagctaggttgggtgtcacagatatttaactcaagactcactatatcctcgaccttacagtccaggtcatctgacaaaatctgcaacacgatcaggaaactttgagatatttgcggattttacagttacccaaatttaaactaaatgatacaaaaatttagcaacactaatggattatgatgacactatgatagaaactcgaaatgttggtaatgatacaaaaatttagcaacactaatggatgatgatgatactatgatagaaactcgaaatgttggtaatgatataaaaaatttagcaacagtaattccacagttctcatgatctaatatcttagaaacttggtgcatgttcagaaacgatgcagaggaatgactctagtgactaaccaaattatgtcatactcatacctgcatgagtaatggatgatgagcatctttggaggatacatttttgtccttggactctgctgaggattcatctgattttgttgccagtagcggaacaagttgggtctccaaatttggtttaaatccatcactgttcactgtgctaaacaatacacgaagaacaaaacagcatgaatgagcttcaaaacataactccacttgatggcaaatgcattagcctaaaacttcactagacaagctcatgaaagaaatttaccgatcaagatgaatggccaaagtgggtacccttagtaatggccttttcactttgacaagcctatgaacaaacgagccatcactggctctcacaattgctcgccccgcaacacttaagtctcgatcaaaccatgtgtgccacaaaccacctccataagtctgaacattcaccatgagatagccagacttggatgaagcagacttcggtttaagtttaagacacgggctatcggtgtgagcagctatggcatgaaaaccattaccaggcacatacctacaaaatgaggaacaaatgtaggttccctgaacccaacaaataaggaatctaagaaagaaaaaaaaaacgatttttgtgaagaacccttcaattatcaaagcttgaactagttccaggattcattatcaaagccaaaccaaatcttataccatggaagcataattgaatcggaagactcacttttctccgacagcaaaagcaaccaaacaggacatgtttcgtgtaaagaagtaacggccaccaggtttcagattccagtcttcgttttcactgaggagatcaaacccagcagccaaaagctgtctcttcgcctcagctgccagcaaagagaaaaagaccaatgagagtcgtcacttaaagttgaataccgaaaagaaaacaatatttcaatataccagtggcgtgaaactgtgtccaggattcattaagataatccagaagatccccaacaatcgacgcattagaatcactccccggcgatctcgaatcgcgatgggaggtgcagaggattggagagacggaggagaaggagcgaaagggagagcgatggagataagtaggaaaagagagagactgagagaggaaggatgaaggattgaagatggagggaagagaatgagttagtggaagacgagctatggccgccattaatttcgctccggactctaaagatgaggtcttcttctgttatctctaaagtctaaaccatccgccgacgattaccatccgccggagatttgaagaccacttcgacttcgagaaccggattttgtttcttactgtgtgtccccagtcttctaatcttgaggagctgagctgagggccatggcccatgaggattatatgggctatggtgccacttctatgggctttgggcccatgtactcttcacatgattttatttggaccaaagaacctttgccttttatggtccacacttgcatcattccaattttattgaacgcgtgttaaggacgtgtctttatgtattgggccttattaggcttcagtactttgcccttgggccttattagacataattacatgaaagatgatgacattaatttgccaaaagtctttatctttattgggtctccgtagactttaccaaaaggtgactgcaacgaagcttcgttaatgggttccacaacgtcacctacttgtttacttccttttgttttgtttacttcgttgcttgttactccactcttccttgccttttcttctctccacttatctctctctctttttctcatcggcctttgccatg

SEQ ID NO: 23057 - DNA, 3003 bp, Unknown; identical to SEQ ID NO: 23056
  misc_feature (1)..( 3003): 2750-1469P.txt file - cDNA_ID_2129159; gDNA_ID_2926256; Annot_ID_143120

SEQ ID NO: 23058 - DNA, 3003 bp, Unknown; identical to SEQ ID NO: 23056
  misc_feature (1)..( 3003): 2750-1469P.txt file - cDNA_ID_2129159; gDNA_ID_2926256; Annot_ID_204557

SEQ ID NO: 23059 - DNA, 3003 bp, Unknown
  misc_feature (1)..( 3003): 2750-1469P.txt file - cDNA_ID_2129171; gDNA_ID_1620349; Annot_ID_154244
aataatgctaataaatatggtgaatacctcctctttggtccatcttctttcacatgtatatgagttgcgatatcgacatcaatctgtaccaaataaatccaaagcagaaatgagacatcagtaacctagagctagcttttaatgactgcaagcttctttataaaactcgactaagacattagaaaagagtttgtataaaacacaggacacaaaagtaatcatccaataagcagagtaaacattaccttcttttcgggagcctttattccaaaagtctcacccattgcaagttgctcactgcattcctgcaaaacaaccaaaggcaatgttcaaaaaaaaaaaaacagctgcatgcaagcctctttgaatgtgaatgtgattacggtaaagagataaagaaaactgtaggcagaccggatggtatttcaagagattgttgatgattgttaatcggatttgttccaacaagtcaggatcttccactttccggccagtgtctctggtgtgaaaaagaaaatttatttcaggcatctgtaacaactgacaatgcaggttgctgaagatgatatatgcacacaacaccaataattctcaaaaacagaaagttcttttttatcagattcacttgtctcaagctaattatctagtttagaaagaattctccagagaaatgatatagcccaatgtcaagcatgaacttcataggacaactgcagaattctatactagcataatttgagataagggaagatcatatcagcactaagcagtttgagacaaaattgtgcatcctattgaacaagtgagaagtcaataagtgatagaaaatcatctaaagcaaagggagaccaggaaaagaaaggcctttcttaccgtttcgttatagaaaatttggtctgcttaatggatccttcagttgagacagttccttttattacatccaatcccaaatctttcagcgcccgcatctgccacacacatatgattcataagccgaaaacaaggcaagtttacatctgattctgatagtaaaaacgctacaaatcaagaaaagctaaagttttttcacatcgataagatagaacaaaaaaccaaaacaggatatagaatccctcactgtgtcaataagagccccaagacgatttccaaaactgagttgtacaatagtagcttcagggtcagcatcctggtctatcataaccattggcattggaacaacgtcgtcatcgtcttccgatttctgcgatcaaattttccagcaaatgtcatctcaaagcacacgtgaacacaaaactcatacgcagaccgtttccctattaaacatgagaaaatcaaatcacatatcaaatagcatacacatgaacacataacgacatactccctacatttccttgctgagcttctgagagcgaacatacatgcaagtcaaatcaatagatccaagaaacatccgacgaaacaaaaaaagactgaaacaagttactgaccggatacgatggagtagcggccgaatcaatgctgttaatcgaagcatatacacggtttttaatactgcatacaaaacgaacaagcacggaaagatatatcagcaacctcagatacatcatacaaagaagaatttggaatcggtacatagagaaaccaaactaccaagcaacttattctaattatctaaagaaaccataagaacttcaatctcgaaatcgaaatttaatctacctttgctttctcaaatctcttaagttcaagattcataacgaccaatacaactactctaaacgagaatctagtataatagttccgtttgccggatcgttcgagcacatacagagcaaagatttttagtcgaatcaagcttaatagtagctgaacataaaagacgaagcaaagattactcaaatcgatttagcagaaggagcaagaagactataaatctccatcaattctagtaaaggaaagatctaagagcgagacacgacgcataagaaataggaaagagcctaacctcttcgtcaagagagacattacacctccgacgaacttccggcgatcatcgaacaaagcaggcgatagatctggagaagcaatttgagcgggaaaacgagtctgcctactgattgcagaagaaggacgcgaagctaacgaagaagaaaactgagtaacagagaagatggaactcgagaacgccattgaagtttgaaacaagaatattttttttctttctttctcctccgaagtcagagagaacaccttaatctataaaatggcgagagaaattggcgtttagtgataacaaaaagatgatggagtgctgaatctgctgatgtgatgtgtgacgtcactatcgagatgctccacctatacatctactaagcttttattttatttttattttatatggtttctacaagtaactaattgaatatttgcaaattgctatagaataatgtgatcatagtgagacgaatgtagatgcaattatttgcttgctgacgttcaaacttctacgctgcaagttaccaaatatcttctcttttctattcttttaccctccaagccaatcggactggtttgctgtttgcagattttttaaattaaacctgctaaagaattttaaaaaatattttgttttgtctctaataaaaagtttaaagtaaaaaaatcttgtataaaaaattaaaaacttttattcgttgaccaaagaaaaggaaaaaatatctaaaaacaggggaaaacatgtatgtcaacttgggccattaaaccaaagaattgtagacgagtctggggaaaggttctcactattgggctattgtagcccattgggtcattagaccaaagtccttagctaacaattacgccggtgcaatgttctagcgggttcttcaataatctatacccgacccggtccggacccgaagctgcctaactgtctcttcactccaaagacattttctacccaaaaaaaacgattttgagaaaaccatctcactgattagcaagatg

SEQ ID NO: 23060 - DNA, 3003 bp, Unknown
  misc_feature (1)..( 3003): 2750-1469P.txt file - cDNA_ID_2129193; gDNA_ID_1620349; Annot_ID_154252
tctaatgatcatttttcttagttaatgagttaacttcaaagcacaagctaaaacttccattttcattgacattttttgtagaacacaaaatcattgtatctcattgcgaatgctattctgaatctgccagaggatcaagaacagatgtcttggcttattgacttcacgggttggtcaatgagcactagtgtgcctattaaatctgccagagaaactattaacatactgcaaaatcactaccctgagagactagctgtagctttcctctataatcctccaagactctttgaggcattctggaaggttagacgaatcacttcatctatgactcatagttagacaatacattggtttggttaagacaactttgtgtgtgttttgttcgtctatatgtgcaggaacatgcaaagacattcgtcaaggtgaagtttgtttacccaaagaaccaggaaagcgtggagcttatgagcacatttttcgacgaggaaaatctcccaaccgaatttggagggaaagctttgttgcaatataactatgaagagttctctaagcaaatgaaccaagacgatgttaaaactgcaaacttttggggattgtgtaacagtaacaataaccagctgcacgcgagcaacgggttttctggagctgagattgcccctgagccagtccaaacacacccttgactgtttttaaaggcaatgtattgttataaccaacccttttgaatcttagctcttgatgctaactagagaggttgtatgatttagacatagcatttgaataaaataaagaggggttgtgtgtgtgtattagtaactcttgcaaggcttgtaagtgaatccaaaaactctttacactcataagcattttattaacaggaagcagaaaataagattcacattaccagcaacaagctttgtttctttcaatctgaatctgaccaaacacaagaagaagggaaaatgaattctttcaaaatttgaaggcacaaagagattaaaaaaagtacataaaacaaaaattatactagacagcagtattagcttagactatatagcttagagttctgcagtcaaaagtgatgtgcaacggattggagttagagcctagagggagagagagagagtaggcaatttgaatgaaactagataatcctccttctgaagtttctggtggttgattgataggtgcgaaccagcaggccaaccccaatgccaaaaacctacacagacaccaagaccaattcccacaccagcgttgaaccacgacatctcaccatcttcaccatctgcgtactctctattccaatacatgtcgctgtgttctccttcatattcttgtttactgaattggaaataggcccaacaaaatgcgacgaatgttagggcccattaatggaaaacctatatttatatagataagcaattagggattgcgttgccgcttagcttcgtctgaaaaaagggggatcagttccgtcgccgcttcttcgatttttgacgccgccgcttcttcttcttcctcgcaggtacgttctgggtaacttagggattgcgtcgttgtcggaaactgcaaaagcttgtgctgtaggtttcgatttgttgtttttttttttgtctctgtagcttttgaatcttaggtttggttagattcgttaataagataatggaaaagttatgaaatgggttgatttttattaccggatactgccgctgcatcttcattcttttagttttattgtatcaatggcttcgttgtttttataatcacattaggcctctgtcaagttcagtgttatggtgatgtatatttcttgattcatttgcaattctctagacattatttgacattgcatttacatgtgattcctgtgtttgtttagtgttacacctgaatgttgatgtttaagacacaaatcaactatacacttggttgtttcttcatttgtcatatgcttatggatctctattgtttctatttgacattgctgttcatatgtttccttgaactatgattataacaatcgatgctttaggtgcatttcttgatacataaatggttttaatttcatgatgtaattgaatcacggattttgaaccctaactaaagacatggaatttctttggtttttcccctttcagcaggtaagtcacacaggtaactgaaagatggggcgtgttagaaccaagactgtgaagaaatcttctcgtcaagtcatcgagaagtactactctcgcatgactcttgacttccacactaacaagaaaatccttgaagaggttgccatcatcccttcaaagagactccgcaacaagattgctggattctccacccacttgatgaaacgtatccagaagggaccagtccgtggaatctcactcaagcttcaggaagaggagcgtgaacgccgcatggactttgttcccgatgagtctgccatcaagactgatgagatcaaggtggacaaagagactcttgagatgcttgcttctctaggaatgtctgacactcccggcatctctgcagtcgagccacaacaagctatggcaccaatcgctgctttcggtggtggcagggcacccagaagatactgagatggctttgttatcatcagccaatcaaggcaaacgactggctctcttttttcacagttagggataagaaagacatgtgtgttcttggaaagtttattgtttcttttgattcaagtttttatgtcttaaactcagagtgagactctttcgtattaatgggttttgagttatgtggaaccaaaattggagttaaaactttcgatagtaacaatatcttttgcttatcagatccgagttgattcatgggggagaaaatatcgaaattcacctgaaactttctcgaaagttgggttaatacttatttggactttgagaagggcaatttggtaaaatttcaaaagttataaggattatgtttcgttataaccagagagaagagatactagagagaagggaaagatagagaatg

SEQ ID NO: 23061 - DNA, 3003 bp, Unknown; identical to SEQ ID NO: 23060
  misc_feature (1)..( 3003): 2750-1469P.txt file - cDNA_ID_2129193; gDNA_ID_2926256; Annot_ID_204567

SEQ ID NO: 23062 - DNA, 3000 bp, Unknown; identical to SEQ ID NO: 1026
  misc_feature (1)..( 3000): 2750-1469P.txt file - cDNA_ID_2129201; gDNA_ID_1620349; Annot_ID_154254

SEQ ID NO: 23063 - DNA, 3000 bp, Unknown; identical to SEQ ID NO: 1038
  misc_feature (1)..( 3000): 2750-1469P.txt file - cDNA_ID_2129680; gDNA_ID_1620350; Annot_ID_154286

SEQ ID NO: 23064 - DNA, 3000 bp, Unknown; identical to SEQ ID NO: 1031
  misc_feature (1)..( 3000): 2750-1469P.txt file - cDNA_ID_2129711; gDNA_ID_1620350; Annot_ID_154298

SEQ ID NO: 23065 - DNA, 3003 bp, Unknown
  misc_feature (1)..( 3003): 2750-1469P.txt file - cDNA_ID_2129749; gDNA_ID_1620353; Annot_ID_154387
taatgtatatgactaaaataaatctaaaattttaatcattggaaactcattttggtgttcaaagaaatatttagtaacaagtaaatcatagttaatcagaatgtcaagttaaaattagaatcaggaatatgacagcatttttctttgacgacaaatgtaacaaaaatccaaaaaactgaagaaaaaataaactgccgacagaatttgttccctcataactcacacatctttgtctttcgctaatcgctacaatcaatttgattaattggaaaaagttttctttaacaaagccatgaaagccgctatttgatagattctcaaaacaggtgcaaaagatttgattaattgactcgagatgatgtatgatacacatatttggtgaatgcaatagtcattatatatcacatttaaagtatcaattttattaaagaaaagatatgcgtaaatagcattggctgttgtaggacaagagacaaaagtcacaacattaggcatcaaatcttttggaattaccaataagcaattccctaggttggtccactactaatcgtatattttggtttatataaagattttttttcttgtttttttggagttaccaataagcattcctgccttattatggcccattaagaatttttgttaatagtttgacaaaaaaaaaaaaaaaaaaagaatttttgttaatactataaatcctactttgttcttacgaatattttatcgtatgcaacaagccatgcattatcatcaacaagaaaatctaaactagtaaaccccaccagaaatggctaccgacttatttcccaagaaaacaaacttatcccaaacagaagaaatagaacaatacgttatattttccaaaagcttaagggtaaacaattttttaaaacattatgattcttccgtttatttcgctatacaactatagtcttcacgctaattactctagcttcatttacttcaactgttcctcatcgacgtgacccattttcaccaacttaccgtccaagtttcaaactcaaaaacatttgttctcaaacatataaaatgtacaaatttgcttgactgcatttaatatcgaaactcagaagaatgagaaaaggggtcctacactgtggtctttgcatgtaatctctgaaacctctttaaagtctttggttttggttgttagtgggtcccacttttcacgcagtctctgcctttgaccaaaagtaacctatcattacatttttttaatttacacatattaataggccacaacaaaaggtgttccttcattaatttctcatttgtcattgacacatccaaatctttcaaaatccaacggttcatgatttctttagaaagctcccaaatagttcctttgcacataattaattttctttttcacttcaattaaactattcaacagatttattccctttttgaatggtggaaccatacaataacttgactaagcacaaaccacttacagtatgatttatgtgctcctcctccccacatggtatacacatatgatatacgtaatatgtagtgaaagagaaacgacacgtaaacaatgcatacgtcccaatgtctatttgagagcgaatagcttttgtatactctttttgggtatttgcaaaaagattgagactcaacacagagatgccttatgtattttatttattcacatgatcacatctttatagattctctatccttatattcaaccattcattcacgttttttaattttttttaaaaaattacatttttttaatttacatttttaataggccacaacaaaaggtgttccttcattaatttctcatttgtcattgacacatccaaatctttcaaaatccaacggttcatgatttctttagaaagctcccaaatagttcctttgcacataattaattttctttttcacttcaattaaactattcaacagatttattccctttttgaatggtggaaccatacaataacttgactaagcacaaaccacttacagtatgatttatgtgctcctcctccccacatggtatacacatatgatatacgtaatatgtagtgaaagagaaacgacacgtaaacaatgcatacgtcccaatgtctatttgagagcgaatagcttttgtatactctttttgggtatttgcaaaaagattgagactcaacacagagatgccttatgtattttatttattcacatgatcacatctttatagattctctatccttatattcaaccattcattcacgtatacgtgtgtatatgtattctcatttatatgcatcaatctgagtatatgccaaaaagaaaattaaataattaccttcctttaagacataaatcctcacccgattgcctcgaatccattactttttttttttttaatacgtgggatttcaaattcttaatgttaaaaattcagtggtgaaaatatgctactacatttttaatatgcattgtttttgttttgaacaccgttacttattttatttacagatttaactctctctaaaaatacttgtctttcctaaagcaaagaagcaaagaatcgtgtcctcttacacaatcacaggctttttgcaatttttttttttgcaagtatcatttcttttcttggcttcgaattcagctccctcttcttcttctttattcactttctttcccctttttcttttatttcattataaataaatctgatccgatacatatatggttccttcttctttatgtgcaagaacaacacatggtttaaagcttcgaatctctccctttgcttcgtcatatatctaaatcaccccactcaagatttcaaattccctatatctttgtttttataaattctttctaattttattgtcacatataattgaagcctaataaatcacaccacactgtcttactctgtttttgtttcttctctactctgttttttttttttcccttcaacattgaagataaacttatcttttctctctcaaagactgaaactttatcaaaatg

SEQ ID NO: 23066 - DNA, 3003 bp, Unknown
  misc_feature (1)..( 3003): 2750-1469P.txt file - cDNA_ID_2129769; gDNA_ID_1620353; Annot_ID_154392
gaagcgagcttgcgcagttgtaagagaggtgttggggttaacggttgagaaaaggaccttgattgatcatttgacacatttcaggaaggagttttctttaccaaataagttaagagacttgattgtgagacatccagagctattctatgtgagtataaaaggcatgagagactctgtgtttctcgttgaagcatacaatgacaatggtgatcttctagataaagatgagagattggtgataagagaacgtttgatagatcttattcaagaaggaaagagaattagacgtgaacgaagaagaaaaggcgccacacttggtgataaaagcgtggaagagaaaaggaaagatgatgaaacaattgatgattatgatagtgatctggatgatgaatatgaagatgggtttgagaatttgtttgactcagaagatttaggtgtggaatatcatttcgacgaagaagatgatgatgatgaggcaggggttaatggtgaaagtgtagagtattggagtagaaagctttcgtcttcaggtagtagcagtgatgaagcaaatagtgctgtggaatcatggtgatggaaaatgttaaatagatcgttttgatatttatactcagaaaattgtacgcaattacacaataacataatgtttatgtcgttaatcttattctcattggctttagagctgtgtgtattgatgaaatagttcgggataatggtaatattgaatgggcttacgaaagaatatgaggccttttaactaaacgagcccatttaagcattgaaagaagtcgaaagtcccacatcgcttagaacaaaataagaagttgcgtttatatacaggtagagtcgaagtagtgattgtcccttcggggacatccgataaaattggaacgatacagagaagattagcatggcccctgcgcaaggatgacacgcataaatcgagaaatggtccaaattttttttgaaaattttcccggttagttaatcggtatgggtagtaaaccgacgtgtcggatctttgtcatactcattagtcattaccgaatctagttggtcagagggtttctggataataccttgtaagaacctgaagaagaggttttttgataggcatcattcttatgactatccgagaaggaatcattttgatgaagaagatgacgatgacaaggcatgagcagtgatattggagtagaaaactttcttcttctcctggtagtaagagtgatgaagcaaaaagtgttgtgaaatcatgttaagagagtagaaaaaccatcaatgttttgatatttttgtatattcgaaaattgttgcaattacacaagaacacactgtttctgtttggtatcttattctcatttgcttcagagaagcgaatttagcatacaaaactgtgcgcgttcccttctttattttctcaactgttgttcgagtctctcaatggctgcaccaacaccactcgtgacctcaccgtggtggcctgtgtcaacgttattgccttcgtttgctttcttcatgagcttcagttgtacccaccctgtagaatcaatgcaagtatcacttagttctagccaactttccaatcctccctgatgcttctctatcattctctaaatatggtaatgacttgtaagacttatttatgtaaataaattaccaagagggaagcacactgtggctccaagaactgaaccaagcaacacattccgcgcacgccaagcaagagaccccggcactgccacattttgattagaggtaaaaatatgttaggacacagaaaagttaacatcctgaatctaataagccacaagtccaaaggaggatgcagagagtttgggatgtatcagtactgattaggccaaaaactgcagcagtagctgaaccagctccaaccacattgaaaacatcatgcactcctcgggtctcagctaaaaagttttgtagactaaagaaggaagcagtgaacattccaagacgcatccctccaatgagggagccacgagttactcggatgaaccttttctccattgcatctcgcatcaacctgtgttgttcacgcttatcctgtgtactacccatcttcaacatcacttctgcatctttgctctgtttcaaaccacacacacactgattttaacacaggaaataatattcagctaaaagtcttaaactttgatatcttatgagttcagtctagtaccagaagtcactaagttacaccaaggtagtggaatcgaaacacaaatctcaaggacaagtaacgagcttgaatctgaaattgaaagcagacataccacagaagcagaagcttctttgctccctccatatagcaatcctgcaaatactccaacaacagttgctgttccccagttgggatttccagctaatcttgaagaattctgttttatataacataaaaagcaatcacaccacaagtaaactatgaaccaatcacttaaaaaccctaacttttatgtagattcttgaaatgataatcataaagaacacatattttgaaaagctttgcttctaacaatgatcttatcacagggaaaatgaatataaatacaatttcaagtaagtgatcccgattcgaatgatcttattctatgcatttgaacaatacaaccctaaaccggcttgtcgcttaaggaaaatcgttgagagggaacataaatctcacccctgggattgtttcttcgggtttttctaccgcttccatagatgactgatcaaacactatcgccgtaatctccttctccgccgtagtctctttctccttcagtccaactaaaggtagaagacgaccagaacggtttaattaatcatcggcgatctatcttaaccgatcaaattttcctagaccggttaaatttgtcataaccggtcgcatagaccaatttatgttttcttatgcggaacgtcttcgtattcctttaaaacgctttattttagccgccggggaaaaaattggtgacaagagcagagagagtcgccatg

SEQ ID NO: 23067 - DNA, 3003 bp, Unknown
  misc_feature (1)..( 3003): 2750-1469P.txt file - cDNA_ID_2129800; gDNA_ID_1620352; Annot_ID_154345
gaatttgctaacttgggttttccataaactctcaaatgtttgattttgataaactcttaaatgtttgattttgcaaggaaagaaaaaaaagtaataatgagaagagaaagagagagagagcgaaaagaagaagcgacgaagaagaaggaaaaaaaaggaacgtggagagatgaaactttttttttaattataattttttaattttcaggggcaaattggtcaaaagtttaatgaaaaagttggaaaagtgcctcatccctgacaagtggctcaaaaggaataaaattctctaaaagtgcctaaacgtgtcacattccctattatactccctatgattttttaaaaattaattttctagaaaaaacatacatattaaaatatatattaaaaggtgattatatatatatatataagttttgtgatttacatttcaataattcgaagccaatgattttcaattatttttcttgaagtttacaatttatctatgataactaataaatattgcatagaaaatctaaaagaatcaaattttttaaaacaaatattttttttagaaaaccaattaattaagaacagacggagtaatgtattctttaaagtgtttaaagagaatattatttcttaaagaatgttaaattgttagaaaacttatctttgtgggacgaagaaaatattattttcttttaaaaaaagttttgtattgttaaatctaaacatatacatcaaactttaaaaatcaaagcaaaaaaagaatatctctccttttgcatgcttttgacatattgaatttaatagctaattttcttaattaagatgttaaacttatggattcatgatttgaacaaaactgaaaaaaagtatatggaagcgttggtgagattcatacctatcaaaatgaacaaaaggatcaccaaccgaatagtaaaaccaactactgtattttttcttcttctttcttaatttctctctttattaaaaatttgttaattatatcataatcttaactgttgtatataaagtatttcttcctaaaatatacaaggtgtacgcaacaaatgccaataaaaatggtttcaaattaaaaagaaagaccaaaactcatatgaacctcaaaaacatagtatgctacttttagttaaaataaactttctcatttcaagttctattttttttgtcattcgcttagttattaatgctcaaaaagccatttctgaggattgttatttacataagtgacatgaagcatcacacgatctaaaagctgttagaaccacatacgaaggcaaacacaatcactatgtactaaccgcaaggtataacaacaacaacaacaaccatgacatgtcagactagttgtaccgctaacacaatcagcctcaacttaggtgttgaaatcgcatcggacacccttgaccatacatcaaacgagcatccacatccacatctgcatccgcatccgcattcacatcgtgttcgttctgaacttaaaccagtggaacgctggattcaagtttattcatggaccacccatgggaacctgctatctaagtagcactaatgccggtataatcatcaatataacggttcgagagaaacgatcgaggctcaaacagatgacatctcttcctgttatccgtatatatccacataacatagcaagaatacaatatggtctctagaggaggatggtctgcacaaaccaaccacagtaacacaataaagaaaaagaaaaacaaaggctctatacttgcattatttatcttgattcttcctaggttaggaatggaataacattgttctttgtaatctatgatctatatgtatgtatgtatgtatgtatatcatgacacactaagatagagatattggtcttaatctcccaacatatttatttgttttttattaattcgaaaatgttttgtaaaaaaaaaacacaaagctttatatgtttccaagaaaatctgattgcagagatcatcaacatcagcctgtaaagaatcttctccatgactgccatggaagaaacccacctgcaaataaaacagaaacaaacactaaagtatacttttacattttcaaaatgtaaaagaaagatatagagagaaatcgaagttaccacattcaggacaacgaaaatactttttgtctcgagaaacaagtcctgttcctccacattcttcacatctcttctgtgcaatctgaaaccaaaactcatttttcaatagacaacacaaccaaataattaatgtatgtgtgtaataatacatactattcttttgctgaattcaacacctgcaacaacgaatggtatgattccagctgcaagatcaattgatttattataagcttataagaaaaacacattttttaatcacatcactaattagctaattaattaaattaccaatggttccaactataatctgccacgtaatctccgatttgcctgtctccgccaccgtgtcagctagttcacttagagccgacgtcgttttgagccgtcgattactcatcgtcatcatgccgccgccgccgccgcggcttcttcttcttcccggagaaacgaaaccagccgtggattttatctgacgtggtcttgatctaacggtccacagagacggaactctacacagtgaagaagcctccattgtcgccattatgactcaagaaatcaaattcaccgatgaaaatatgttaaaaaaattgggccacgtcgacgttatttcgggtcgggttcgcgccaaccgcaaataccatcgtgtggctttaaaaaagctgccaatcaaaaatatattctaaaatacattaaaacgacggcgtgtaatcggaaaacagtaaacgccattagagtcttgtgtgtgttaataatgaatctcaaaacaaaacttttttgtttgtttgttttggaattagggttttagggtatattcgcaatcactctaatcggataattcctctactctgttaacattatcttcttcttcgttcctaccgcaaatg

SEQ ID NO: 23068 - DNA, 3000 bp, Unknown; identical to SEQ ID NO: 1058
  misc_feature (1)..( 3000): 2750-1469P.txt file - cDNA_ID_2129808; gDNA_ID_1620352; Annot_ID_154347

SEQ ID NO: 23069 - DNA, 3003 bp, Unknown
  misc_feature (1)..( 3003): 2750-1469P.txt file - cDNA_ID_2129812; gDNA_ID_1620352; Annot_ID_154348
ggacaaccttataccaagcttgtcaggcatagcagatttaaaagccggcacccattcctacacaaaacaatgaggaaaaaaaacacaattaggtgacaaacataagattaaaatagcttccatttccagaaactaaaattaaacagccaatggctgtggaagcaaatatatacctcaaggtttccatatccatcctcgtcctctatatcatcatactggagttttacctgtttccttgatacgtccaggacagtgcatctaaaccaacagcctctaataccgctatcttgacacagaaactctatttttgcatcagtcttaaccactccgttgtaacaaggatgtttctgaacattggttggtgaaggaaatcttttgcccgaggcattaagttttagtctcttacatgaagattcgtaagttgttaacagatgatcagacataattcttgctcgttttttcatgcttctctcagcaccaaccattacattctcaccctcactccattcttcatcttcctctatattcatcgcacagtctacaggaccagcctccatagaacttaagcaagacataatcggttggtccaaatatccacgcaatttactcaaatcaaaaggtttaactttgctgttcctgagttgccgatagcacatgtgtacccttgccaataaagaattcggaaaggaagccacacactcctcataatgctcacgggtcaagacagtggcaggaccatcaacacattctgcactgatgacctgtgaatgaggggtgataaaaacctcttttgggtttgggttcttgagagcaactgcacccttcacttcttttgtgtagtgaaaccacctcactttgaccttttttaggccacgcttatcctcatacatatcttccagatatgcaacgtaccgatcctcccctttgctcaagacaaagacaaaagattgaacctgaaaatccaaaagaagaattacgcctccaagtgagtagtctcatccaagatctttacagatacaaatcacaagaacagtcaacatatatcgaactatgcatgcactgatgccaagtcttcaacttacccctattgttgtcccatttctgcaaaatgatgggtaatgtttgagctgtttaccacacatccaaggagctcctgaccacataatctcccaactgtgaataatcaagtttatgggaagacggacctgtaagagagattttcccatcagtataacaggaaagtaaaatgcagtgacaattgtatgagagcaacaagcagctaaacatcacctcttcacttgcttgagctcgctgagcagtaaatccattgcttggaaattcgggagatccattagattcccctgactcacattttggtgactctgtaaatgacaatataacaagtgctttagaataatcagttataaagttagaagagaccaacataaaggaagaattcattccttctccactcaacagacaatttgtcacatatggtaaaagataaagataaatgcgtactcgaccagtttccttgtgtactctgcttagacagcattgaagtgagccaatccacaacttcccttctcgacctccatttgaagccagaatgaattgaattctcaggaccatgaatgcgcacaaactcctcagagacaacatagaacatgtgcctaacacttctctcagtaccaatgacagctaggatagattcaccggcagaatccttgaggaagtaatgaacaacacggttccctcgctcttgggagacaaaatgctccttccactcgacaaaatgatgatcattctcacacatttttcaaaataaaattgattcggcaagcatcaaacgctccaaaccctcctttacatcagataaaaacactaactactgccagttcaaagtcaaagtcttttgtcctaaatcaagttctaaagcaaccccaacgcaacaatctctatataccaatgacagtggaaacccttaaaaacctttaatctaatgaccaaacaatacccctaaaatcaatcccctgtgccgtggaaatcctaaagcaaatcactctaatgcataactctgatcaacatctttcccagcttcctacaacacagctaaatcgtcgaagtctctgtaaatttccagcttttaagaaatcaaataatccggacgaagaagaagttaggattagagaaagcagataagaacccagtgagcggagagttatgaagatctgtagaaagatcagagactaagccatggaaacactgatctaagctcgagagcgccgccaaacaccaagatacgactttgactgcggtaatcagcttaagcatgacgaagacgaaatgggcatctcaaaattttcagcttagaatagatttataccgattcctctaaggtttgtacagaacaaacaaatgattcaggagaaaaaaaaagtgaactttagaagcttagaatagcggcgagaagacaaaatcgacgatcgatttcggagatggagaagaagaagaaaatgagttctgattaaggtaaacttggagaaaataaggtattcccatggatgatgatctctcttctctctctctctctctctcaaagtcacaggggtttggcaaaagcagctgctttggtgaaggaagaagagagagagaagaagaaattgtgcaattactacgaaatgacgagaatatcaggaagttattgggccttatatgggtctttaatgggccttaaatgaccgtggccgactaaaaaaaaaagtcaacgaaaagtcaaatagatctctgtcttttatttttttgttctctctcgtctctctggctaccgagaaaacagagaacgttaagaatcattgcttttctcgagaaaataatatttttaattgaatcgagaaactcttcaaagttgaattaagaagaatattacctcaattgagatttgagagacacgcatagagagattgattattgcatcgaatcaagcttggtttgttagtaatg

SEQ ID NO: 23070 - DNA, 3003 bp, Unknown
  misc_feature (1)..( 3003): 2750-1469P.txt file - cDNA_ID_2129831; gDNA_ID_1620352; Annot_ID_154355
gatgatgaaaagcattttactcggtgttgctttctttcacagctgtcactgctgttttttcttgtaaccctaatttcatctgtagctttcctctgtttcttgaactctcaaggagtctcctctctcacaataaccatggcaatcttgttcgtctcctcttctgttttcttgttacgaatcttcaaggaaaagacaagactatgtttggctgaggggtcccaaggagaaggctacgattatgaagatgatgatgatgatgatggtctcattgagattgatcttgtgagcgaagaagcagagactatagaggcaatgagaaacattaatcaaagtcgactgagaattaggattgaagaagaacaagaagaagatattgatgatgtgaatatggaagaagataatcttattgagattgatatttccattggatccattaaaagacgaatgtaatttagtttaatagatctcatgatcacaccatcgtgtaatccgattttttcatttcaaatgtacaaaggaaatccaacattttaatatattattgttctagatatttggtgattagggtttagggttttaggagatatatatcaatccctttttatagatgcatatatatatatatatatatatatatatatatatatagtactaattaactgtggtagttcttttgcattaagattgtgtaatagattgttgacaaaagacaaaagattgtgtaatagattcctgaaaggttttgtaaaacaaaacaaaagagttgcaatttcttcgaaagtactctccgagcataccccaaactccgctaacttattttctatgccaaaacacttgtctttctcttattgcagagtatatttttcttcttcttcactatatcatttaaacatataacttctttttaccaaatttttggttattgaaaaacacttttcctttaactttacgaatcaatatacaagcataacttataatcatccaccacactaatcatcatgcactttgttaattgttatggcttatgagtcttatgacttaacatcctttttaatctggtaaatctagcaaataggaatcctctgcaatctgaatcttgtttcgaaatttgagagtatgttgatcttgcgaaaatcgaaacaatctttgcaatgtaagaagatatgaagccgcatatgactaacaagaaagttggtctttatgtcgtctaaatcagaatataagagcatctccattgcctatgaaactcaggagagttttagaaaactcaaatattaatatttaatttaaaaatattggaccatgaaatatgtaagcggaagagccacaaaacaactattattttgtttttgttctttttttagctaaataagtaataaaatattcaaaataaaaagaaggaaaaaatgaaaataaagaaaggaaattcaacatttctatatagaattagttattaccattaagttaaatctaaaaaagaaagaaatcttatccttttaaaaaatagtcaataccaaaattaatttcattatcaaaatgtaatacacttattatatatggaacaaaattgtcaaatacaataaggttaaaatctactttacagtattgataaatgataatcaatcatgactttattgagatatcaaatttaaccttatcatcaaaacataaaacatagtatagtatatatgagaaaaactatacaactagaaattatacgtagaaaaaatcgttaaacacccgctaaaaatcatactataaaacacaatagtatacatagaaaaaccgttaaacacccgccaagtttagtaaaaaaaccgttaaacacccgcaaaaaattagtaagtatacaaatttattttatatgatcacaatattatacgtagaaaaaaccgttaaacacccgccaaatctaatactactaaatatcgatcataacttcattaaatgaaaaaaaaactcaaacataatattaagatctacataacttcattaaaatgattaaagatctaattatttttcattttttggggcaaatatttagatcttctaatctaatagggaatgaactcaaagaaagatatttgtgtttgaagataagtaaactgtaccggaagttgggttgtgtctaccgtcaccgatccacgagagtatcgaacacgaaatctgaaccgttcacaggtccgacgtggcaataaactgtatttaaaatccggttttgagtctgaatccttaatagaaagagatcggagcgttggtatcccttttttcttctctgattcgaacagaataaataagaaccccaaaaaaaaaaaaagctcactgctttgaagcctttggatagcgaaggtgagattccaaagtcttctcctttcgagtctctttgtacactctgagcttgttctctttgtttagcggttgaatcttcatagcttcgtttatattcgcatgtggttttttttttttttggttttgattgttgtcttgcttcttgaagtcgcgtttagggtttgtgtttttttgtgttctctttgatttgtgaatttgtgttagtttagtttaggtttagagagagactaattttgatttctgtatgagctcttggattcctctgttgttgtggtttggatctaaatctatgttttataccacaaagtattcagattgaggaaaattttggttacccttcgtttttgatttggaattgaattatgaagaacttattgtatgttgtctatttcctttaaaaattgaatcttttttctcaatttctcgtgttagagcccattgaagtttttattgagttgtatgtagaaagatgggatgcaatgaagtttacatgttgatataagttttgggttatgtaacccttcttttgcgtgacttttgtttcatgaaatttctgccgctattgtgtaagtttttaacactgtacttatattttctacagcgttctggtgttttctggctttaagatctactgaacattgggtgtgagcaatg

SEQ ID NO: 23071 - DNA, 3003 bp, Unknown
  misc_feature (1)..( 3003): 2750-1469P.txt file - cDNA_ID_2129845; gDNA_ID_1620352; Annot_ID_154359
tgaacatactgtttcctaaaccccaatgtattggctccatataagctgtcctctgtaccatcggaccatatggaccatccgaacaactcccgtaaaacaagctttgcccgttcgctatcatcggctctgtcacattcgagaaggaagacacttccgcagtatttgaggtcatctggttattaaaagggaagaaagagagcccgttgtaatccatagtaggcagaggaaacaactgatactgctcaaaacattgccgattgtaaccgcataaaccaagttggtcattagaccaacaactagtgtcaggaaatgtctgattcctattcgtagcctcttggatcttgttttctactgccatgaaaaccgcatagaggtcatttaaagaacactggtcgagctttttgtcccatgtaggatactttgtcgcaatcgtcggtttctccaccttagtgttgtttttctccaagcattcttgcacggtgtatgtcttggtgcagctgcttgacgcagtgtctctgtacttggttaagatttcacggactttgctcccatcctttggccataactcgggctccatgaccatttcgtcccctgctctgctcgggccgtacacaatgacacaagtgtccacaccgcagagtgttgagaactcactggctttcttatacaaacatgctttcctcttcttgtaagtcgttatcctcgttttctcgttcgttatcctcgtcatctttaccatctttcgacccatccagatacctttgcttcaatctaaaaagccataaaagagtaaaacacaacaatagatcataatcttgaaaattgaaatagtaatatcatcatttggatgtaacgatcagctaccaaaacatacagaaacactacaaatttacaaccaaagcactaatactagtaaacattttgttgtcaataaaaaatttgtaactcatatagcttttaggtttacattttaacatttcatagcaatgtaagccttacaaatgtatagggaagaaagattcatattattttattctcaattttttcactaataagcataatccttatcgttttgtcaagcttcctatgcataattccaaatccatatacgattaacacgaatagtaaaacagatgggatattaacataaagtaaatgcagagtgattactagaagaaaaaaagaatgtatataataccttctttaagagctctactttctgaagtttcttgatttaacaatggagttcctctttctgtgtttatataagacacacgcaaaaaaagaatatatgttttttttttttttttttgtcgtaaagaatatatggtttattctcgaatattgtttcctcccctaaattacggtagcaatgctgatattttatttctttccatgttttcgagtagaattaaagaggacgaagctatacaaatctttagtttctatgttcacgcacaagtgataagagttcagttaaaggaaaacattgtaattacagcatgatcaagaaagaagattttgtttgtgatttgtgccaattaattttctcaaatattccttttttgctttaattgaaaactttgttaatattcttacggaaatttggcgccggaggtggctgaggttccgtttgcaagttgcaacaatgttcttattggtcttcatggccactttggtagtttggttgtatagaaattagaaaaaagattaaagtttgttgtcgtaagtttgtcacacttctgtgatgactatttgtactgatactcgatagttcattttaatataatactaggagacatcgacaaataataaatttgtttcataaaattttaaactactagtagctgttggtgttgatcgattgatcggtaattcatagcctttgaaatatacatttaacaatttcaccaatcaccatatgctcatacgcactggtatgtaactaaaaaatgactagaacttgtaaaatgtcccatgcaattattacttagtgcgtattttgaaattttgtttttttatcctttattatctttcacattcgaataaatatcagctatatgtgataaacaaagttttgccacttgatgagtagtactacgagactgaaacgtgacatatcgtggacccatgatttaatttgatcaaactatatgacaatgaagacggaaataataggttaacttaaatatgtgagacatttttcgtatactatttatatgccaaattcactactataattggtaataggcagtgttgatggtggcgagtagcatgggatatgttctaatgggatattttacatgcttatccactaagggacgatatgtttccacgtcagcaaaatggttaattccattttctttgttaaaaaaccttattcaatggatatttaatatcatataaaaaaattaccatctaaaagtacaattagtttgactatatgctattcaagtcctcatagttttattattcaattataagtcagtcataatagaaatttaaacttgtttccatgttacacattaaacaccagtttgaaaaaatcaactctgatttttataataaaataaatgtaatctcaatcatctcctgaacttcaacaagtaaaacgttaattagttttgataatttcactgatttgtttcataaaaacacctatactcctataaataattaaatattgtaggcacgaggtatatagtagagaacgaaagttggggtcaattatagaaatatttaaaacatacgggcaaaaaatagaaaataaaggcaataaaggaaaaagtatagggtcaagaaggaattataaagttgataattttcttgatttaaaaattcagtatatatatcagaaaagccccaaataaattttgggtcgttaaaaagaaaagaaaaagagaaatagaattttgcgtttcaagtactccatctccgtctcttttcctccgcatctaaaaccatctgagaaatatctccgacgaaggagaagaaacgaaaatg

SEQ ID NO: 23072 - DNA, 3003 bp, Unknown
  misc_feature (1)..( 3003): 2750-1469P.txt file - cDNA_ID_2129864; gDNA_ID_1620352; Annot_ID_154365
atctcaccgttcttacaaagagacgaaacgcgatgaaagtaagatgtggaagaaggagaatgagcttgttcatcgtggtgtttagaagaaggtttcgatgatactgaaaatggaactttattcgggatagtgttgaaaggaagagaagccattcatgcctctctgataaacgtctctgaagataaaacagagttctttcgaatcctcgtatttaaattattttatttattatctcctcgacttcttttcgtaaaatgttctccaccgttgattcttgtggcaaatacagacacgtgtacggttttcatctgttactcgatacatatttgtaccgatcgcgattcgtatgtgtaccaaccggttttcgatttgatctcggtttagttgaattataacgttgaaaaatatataattcatttattagaatatacttcaaaagtaacgacaaaaaaaaaatacttcaaaagtatataaacaaaaaatttgagataataacagaagaagaaggtgacattttttataggcttttaatatttatctgaaacctatgtatgacctaaaagacaataaaagcattagctaacacaagcatcaaaacatatacgggaatggaagaggaatagtaagccatcgctgaaccggttgtaccgccttcggctcctcctcctcctcctccttggccgccaccgccttgtccccctccgccaatagtaccgtaaggataaggaggagtataaaaataaggatacggaggagaatacatcgtcgaaggtggtggacctggtggttggttgcaacagcctgtcgtcggaacaggagggcagcgagaacgtggcggtgaagactgtgaaggcggtgggggtggtgaatactgtggagacggtggaggagggttaccatatggagagtagcctgtagaggacggtggttgaggcggttggttacatgggtaaggagtgcaaaaaccagcgtttgaatccaaagctgagtttagattgacacagtttaaaagtgatagataaaaggtaataagaggaacagagagagaagcttgaagagacaacatgatgatgacttagagaaaatgatgagtgtttggtctttggttttgagatttataataaaaagagatgaattttttcctcggtttcgtattatctgccgcatggcattacacatgtcgggggtgttggaggatttctgaagaaaacgtttgtgtcttttagctgatgtagacaaatttttgtcatgtaatgacaaattaaaacgcatttgtattactttggaatatatagatatataccgatcggtaccattttcatcaatagatgtcccaaagaagatggattatgagtaacatgagttttaagataattgtgacaagtcgaatgaatcttttgctatgggaaagatgaagaactatgaattgtttcaagtaatcaaataatcaaattttacgttgaagacggggtttacacgatggataatatgtggctccaactaagctgttgcatgctcccgagttgcaattacattcaatcgctctggcccatgtagtgaaggctgacaagagcaaccagaaaaaagttgatgagggtcatttgttagtaaggtgctagccttcacaataaactgcttaattatgataactttaaccctcgctttgaaattaccatcgatgatggctttttggacaagtttggaaaaagtatccaccaaactcatgatttgcttgtgcattcatggtgctgggtgagtttgttttgactagtctgttgtaggattcaactacttttcaaatgatgcacaagctagtgttgaggtgtgactacactttcggacagtattgtatccgaggaaatattaattctgatggtgtgggttgtggtcttgtcgagagtggaatgaggactaacataacccatatttaagtctgcatgctgcatgttttttattaaaaaactgtgtgaggtatgttaatcttgataaataaattgatgatatataacaatacttatttatgaaacttagatatgttataagtttattcaccaaactgaattcaaaatggctttgagtgatgagtttcaaaccggttcgatagaacaagattttaatctaatataagctcatggttgagcatgcaccagaacgtcacatagaatcaatttaaatccatagtaaaccctgtcatatggtttagtattttacaaattacaacccactttatcaaatggtttcaatattcaatgtgttgacatttacctatatattttaaataataacaagacgataaatttacttatttaataactcattgtattggtttaaccaattagatgaatgttgtttacaatgattcaaggataccgaaaccgagttcaagttttgttataagatgatctacaaccgtgagcttgacacaaatattatcagtctaattctgggactaaagagattatggatcacatattcataatttcatgattacataaaaaaagtaaaaataaataaatgatatatagataaaaattggtgaaatgtattaaaagttgcaatgatatcacccacttaatttagctatgatattttaggttaatgtaattaatgtttttcttatatcaaatttttgtttagccaaactaaacaaatttgagaaatataataacatgccataaaataagttttatatgaatccaattaataccctaatttggattttcatttaaatatcacaaactttaggtttatcagggaaacataataaagaaatgttatataaaaatttagcaacacttttaaaatctaaaatctctgatattctgagaaatgtcaaaaaaaatattccagattgcatataataataaaatcataataaaaagaattaaaatatattgatacttcataaatagaagtcactgtccaagtctctgcttttttatacatcgagaggcagagaaggtgttcttcttcttgtccaaaagagaagacaaaacctaaatg

SEQ ID NO: 23073 - DNA, 3003 bp, Unknown
  misc_feature (1)..( 3003): 2750-1469P.txt file - cDNA_ID_2129881; gDNA_ID_1620352; Annot_ID_154369
tttgtttttttttttttttttagtttcagttgtgagatgtaactctttcatatgtgacttttattttcatttccttgaattttttagccacaagatcaattaagttacaataaaggaaaatcattgtcagttggctttataatattatagcttttacaagaaacaaatattatatcgcaaaattcagcaaaggagataatttaatgaaatttctctgttggagttttgatccttgaattgctattggaattcttgattgctctctccatctcctttgagttatctttgtcttcctatgttttttttggatgatttgacaaagccgtctagtcccaacattcaatttacatagcaaggtttcgattttttcaaaggacatgcaccaccaagccaagaggagagagaactaaaattcttaccgatcacatcacactccatcttgatctgaacaacacgcaatgcctaagattaaaatcacatttcgttacctgaatttccgggaatttctataaaaaaataaatatcgaagagagttcacttactagaaaatataaataatgctttgttcctctaaagagatctctttcatgactagtccacatagctcattttcatcaaaacagagatctctaagcaagtgtaatcaggtgtcttgcttgactaataagcatcgatcgtctccgagtctaatctctttgtccctttgactgttccttttacccattcatatcctcactacgtgttcatatctgcctcttccccacccaaccttcattttttaattaattgtttttcaaattttacgtactttacaaaactaactctttaccaaatcaagataatttaataataacttgaaattgattggagtgggggatagagaaagatatagacacatctgtaataagagagaccatgtgttgttacttgtttttgttgcagttgagtactgacccataactgcaaagtttgttgtccaaacaaatactattattttctaattaaaatatataataaatttaatacattgatatatatataaatatgtatatgtatatatatattttttgttcatgttgaatttaatacagtaaaaggttaattatatgttttccaagtggtacttctttactcttttttttaattggcaataaatcttttcaagtgggagtatattttaaatttttttttttttttcacaatactgattgcaacttttttgtttgacaagttgttaactgttaggaatctcggaattgaagtcatgacatgttctcgttcccagatgggatcggaaaggcttgttccaatcgagagagtgcatttttgaataaaactatataatctgtaatgaaaacaagatccggaagagacggtctcctctataatcaaaataaaatataaaacgattgtaaagctattccaaatcaattacaaacgactttttttacaacaaagaatataaaaagaccaagtttagctgtattctctagttttatattaaatgaccagctaatatatatgtgcaattttttaaagagaaaaaataaatatatatatatatatatgtgtgcaatgggtgagatgaaagggaagaagaatatcactatcaaaaaaaaaaaaaaaaaatccaaattcccattttagcagccatgagttctgtgggtgtatttagtaagaaggaaaaggatggaatataattttgggtattcacattagcacaaacaatagatccaacctcctcaaatttcaggctcaattaaaaacgtagtggtggacaagtaatgatcaagatgagatgttatagtttcataaattaatagtaatattgtgttggttttctaataagtccaacaaatcggaggggacataatttttttgttccagttagaaacaactatatagttgacatatatgttttaaaatttagacttcattactaagaaaggaaagacttataagagtttagacttttagtgatttgagatcaatataataaacgactattctttttataataaagaatttagaaagaccaaaaataattagttgttaagaaaaaaaacttagctgtattgacaagtttttatattaaatggttggctattaggcctgttacggatccggatatccgggatttttgaggtatccggatccggatccgtatccggcggatccgtcatttcagtctctggatccgtatctgccaacctcggatattcgggatcctgaagtctgtgaaaaagtacgagtatccgcggaccggatccgatccggtttttttttatcatcttctttcctcccgaacacaagcaaccgaacttcaccgccaagattctttccagaaaaaacagctccaaatctgcaacgaaagagtgaatccaacgccaaggggaagaagaagagatagaggcagcggttgtttcggtggaggttgaggatgagggtgatttggtggaggaggatgacgatttggtgccatggtggtagagatggtcgtttggtggaggctggtgtcgagaggaatgagtgaggaagataaaaggattaggttttttggaaaatgggccaagatatgggctggaaaatatcataattttaatttttagtatggcccaataaaacccataaacataaaacattgaatattaccggatccggatatccggtcatattttttatgattatccggatccggcggatataaaatattactatccgtatccggaaccgtttcacacggatatccggtttttcggatcggatcccggttccagatacggatacccgcggatcccggatatttgttccagggctattggctatatatgcaagagggagaaggagaagaaagatatcacaaaaaatttccaaatccccattatcgaaaccatgagttccgtgggagtattttgaaaggaggaaattgatggaaaaccatttttggtatacacattaacacaaacagacaacccaaactcctccagtgaatcactggccatg

SEQ ID NO: 23074 - DNA, 3000 bp, Unknown; identical to SEQ ID NO: 1051
  misc_feature (1)..( 3000): 2750-1469P.txt file - cDNA_ID_2129887; gDNA_ID_1620352; Annot_ID_154370

SEQ ID NO: 23075 - DNA, 3003 bp, Unknown
  misc_feature (1)..( 3003): 2750-1469P.txt file - cDNA_ID_2129894; gDNA_ID_1620352; Annot_ID_154372
attttccccctattttgatattccggctctgtgagatgtaattttctatttcgtttattattttttaaaattttatgtaagatgtaattttctttttttctctttggtttttttgttaattttttttctgaacttacgtattatgttttttttttttttaatgttcttgcatttttaagccacaatcaaatatgcagaacacaagtaaaaaaaaatgcagagagttcacttctagatgtccctagctttgtctgaaacccagctataaacaatgtccatccccctgaatcctcaaaaacaagtcatgggtatttcatgactagtccccagctcattcttatcgaaacagagaagttagactttgacgctgattttgaaaactttcaaatatattatatagaagtaatccatcatcagtttcacatttctctcgcctcttttgtgtttttttttcttcacatttgttgtacatatgaatatgatacaaagagttgataaataagaaccttaaaatacagagactcaacaaatatatctgatctgtttatcacaccattatttgatgagttgtgttgtaatatttgatctgatgaagtataataatcctctcagcgtttgtcatgtgagctcagtgtatagttgatgttgtctgatataatctattactccatcttcagtcaagtatttaaccgataaccctcgcgaaatgcattgcctgaaagaagcagaggaatgagcaagagaaatcattttttagtgtatatgaactgttctcgggaaggataaataaatctcacactaccttaatctactcgaactgatttgattaggaacagtattgtcaacgattttgacgttagcctgcgaaagaaatcgagggggcactattcagtaaaccatgtgcacaatcacggactgatacagcagagtcagaacagaaacctggtaatacttacacagttttcgtttaagatttcgtcaccagagatcatattttcaacatcttgtccttctctacggatgcacacaatgccataatctttgcaaatagttcttaacttcaaaaaccaagtgttgaaaaaggagcataactgtgagtaaatttgataaacacatctacgtttatataacaatgctaccttggtttacctgttcagggatccaaacaccgggagtgcagaaagatagcagtaaatccgagccacatagtagcatgactttgagagattctagcattagaataaatttgtgtttgtcatttgcgtagtggctagcacgtatgataaaaacatagcaagcaacactattcagacgacccagcaattactcccaaaatgtaagtgagataaactttgaatagaaagatgctaaaggcgacacaggacacttcttgcagttatcttaccctcgggtacatgtcgatttgttgttaagaaagtcttgacccttgataaaaccgtcaaagttcgttggtagttgctttgagatgcctgtagaaacagcttccacatttttgtaaacaacgcattgttccactaaagagaactgattaaaagcttttcgaggaataagaaagtacctcccacggatcaaccattacaaagtcagagctttgacatgatacattacacatctctaaacgatgttctgcagataaaaggccctacacataatctgatgaaattattagttctaagggaaactaaacagaatagtaaacagaagaactttgggagctaaaaaagaaaaagaagctcttagtttcatcacacataacatgtccattagcataggttcagaaaaaaaagagtcattatggaaagaaactaagattctcaagatgacaaataccttcttcttatatgcatcattaacaggagacatatatcctccaagaacatgaaatccttttgagcgtaattcatctctcgccagctctagcgacaaaaaaaaggaagagaacttatcagtttgatgtaaagaaacatatacatttgaacaaaaggtcacagcaatggacaagaatcaacaattgaaacctctaagttctgcagttcattcttgtcatatgccggttttataaaccaaaatatacaaagctaacacaatcatatactcaagaaacggtttcactcaagaagtaaacaacaaggcatataatcttaagctacttttgactataaaccagtattggattttcccattgaaacgagtcaaaacactgatcattatgcctcaaattgtgaaaactttcggattgatagaatctgaaacgccattgataaacatataaaaaaatgaattatatatctactctggtaaaagaactgaccaaacatgcgtaaatgcatgaaagtaggaggattgaaactcccagttgccacaagcactacacaagttttgtccctgtttcagacaaacaatcgaaaatattcaacacccggacggaattttaataataaacctggtgagaatctcatcatcataagtaaccaagcagatcaaatttacaaaatcagaattttcacaaaaaagacaaatgaagggaatcaaaatcgagaataagcttcaaaatttactcagtgtttgatccataagataatttctcgactggtaacgggacatccattgaactctgatgattgaatctcagtctcttaatggtagctccggcgaatgatcagggacagcgaaaataagacgacgacggcgaaagtattaaaagatagagagaaacgacatcgtatgaaaaaggtttgttaaaacgaaacgttttacagctaacgagaagatagatattagacacaatacgaagccgtttaaaactaaacgcatcgttcaggtagcgagggttaaaaaagctaaaaaagcttcattctatttttttcagtgaaaaacgaaagcgaaaatgaaatctttatccccaaaattttgaaattcaaatccgcgctaacagtctctctctctctctcgctctatctctagagtaggtcgtcggcgatg

SEQ ID NO: 23076 - DNA, 3000 bp, Unknown; identical to SEQ ID NO: 1089
  misc_feature (1)..( 3000): 2750-1469P.txt file - cDNA_ID_2129965; gDNA_ID_1620357; Annot_ID_154538

SEQ ID NO: 23077 - DNA, 2076 bp, Unknown; identical to SEQ ID NO: 1069
  misc_feature (1)..( 2076): 2750-1469P.txt file - cDNA_ID_2129994; gDNA_ID_1620355; Annot_ID_154448

SEQ ID NO: 23078 - DNA, 3000 bp, Unknown; identical to SEQ ID NO: 1079
  misc_feature (1)..( 3000): 2750-1469P.txt file - cDNA_ID_2130009; gDNA_ID_1620355; Annot_ID_154453

SEQ ID NO: 23079 - DNA, 3000 bp, Unknown; identical to SEQ ID NO: 1077
  misc_feature (1)..( 3000): 2750-1469P.txt file - cDNA_ID_2130020; gDNA_ID_1620355; Annot_ID_154456

SEQ ID NO: 23080 - DNA, 3000 bp, Unknown; identical to SEQ ID NO: 1076
  misc_feature (1)..( 3000): 2750-1469P.txt file - cDNA_ID_2130032; gDNA_ID_1620355; Annot_ID_154459

SEQ ID NO: 23081 - DNA, 3000 bp, Unknown; identical to SEQ ID NO: 1075
  misc_feature (1)..( 3000): 2750-1469P.txt file - cDNA_ID_2130043; gDNA_ID_1620355; Annot_ID_154462

SEQ ID NO: 23082 - DNA, 3003 bp, Unknown
  misc_feature (1)..( 3003): 2750-1469P.txt file - cDNA_ID_2130072; gDNA_ID_1620358; Annot_ID_154551
ttttgttgactttcgaaataaatgagaaagtgtttgttgacttgccatttgagtcatgtcgttaaataggttcaaaaaaaaaattacaacgttaatgactcgtttatttgctctgttagaacaaaacaacgtcgtttattgcacagaccaaacaacgtcgttttgtcttgaaacaaatttaaaccttatatccccaaatcgatttcattatctcgaaatcacagacccaccttgacctcaaaatcgcagataataaaatcgaattggagattcagggtttaaatttgttttaacagacaaaacgacgttcttttgtctctcaataaacgacgtcgttttgttctaacagagcatatacacgagacattaacgccgtaaaataattctgttaacctatttaacgacatgactcaaatgggaagtcaacaaaagctttgtcatttatttcgaaagtcaacaaaaactttacgatttatttgtcttccgtgaagttcaagattaaatcgtcccaaatttgaaagttcgtgatttttttgacaattttcccgtataaaaaaattctattagtattttataataaatatcatataagaatatcttttagtgcttaaatatattttaataaataaaaacagaactagaagtcaaaattaaacgataaattattctgttattggtcaaatatatattgaaacttgatatataaaatgggatattcaatattgacataactattttcagttttaaacatgtataaaaaaagaactttggcaaaaatttattaaaacgaagttgctaaaggagaagaatcaatgtagtggaacaacaacatgctcatgagaaaaaataaacacaaaattaaatgatcaaaattttaataagaaagatggatgttttttttttttggtaaaagaagatgggtggattaattttgatttaatgacgatcatttaaggtcaagaacaaaaaaacataacaagcaatcttacatataaacaacataacattaaatatctaataaatatgcctatgtaaattttataagaaagtgaatgccgtaggcgagtgtttctaattctatcaaataggcacggctcttagatatattatgcatgaatttgaatattcacatataacaatttaaacatgaaccacgatgcgaaatgtcttaacgctaaaattgcaatgcttttccaacataaaaattaggggagaaagcagaaaactttattaagataaggaccttttatgctatatgagcctatatatgagagtatatttaaagtctatatatggtatgcacatgcaactgcatgaataatttgtatatctagtgattaatataatatattaaactaaaaccatatcttatgtgtttttggcaatgtaacttcacatgatctgcgagcatcttacaatcattgacgtaaagtttttgccttgattaatagttgttgttatattttactaatatatgttgtttgctgtgctgttgtgcatatactattatagctgcatgtgcggccaaggaacgatgacgaaccatgataaatgggaaaatgattgtttacaacttaatttattttctccattacaaacaaatttatagctttttctattcccaattgcttaacatagccgtctcacaattagagaaagcgaaaacattaattatcccaatacaataatgaatatattcaaacgccgaagggaaattgtcaagagttgttaaggttttaaaaaccttaaacttcaatacaaccttcacagttcacacccttagaaaatggtccagttttggcccaaatatttaacaacatttgggttacgagtatttgccctttacaaatggatcaacaatctccctggatcaatatttagtggccggtttcatgaatcaacatattctttttttttttttgtctaaagaatcaacatattctaaatcaccaaaacactttggtcaacaattttcgacaatatatggaaattaggttggattatcatgcgacttttttctgattaattttatgtatttttaatttacgatgtaattcggactactaatttgtattatgataactttacattttccatactactcaagtccaagtaaaatactattgtatatatatctttggattttacataaattaatggggaggcctaataaaatatactcggagtatatcatttgactttgaaatttatcgagtcaaatcaatgattgtatttttggtaaaaacaattattatgaagactttgaaagtttttaatgattttaatttcaaaaattagtaaatgctggtctggttatccatccattggaagagaaaataagaccttttcaaagctagttgataaaaaaagttctcggtcctatccctcatcttataaagaaattattaatacgtttagggattcaattcacagaagatttaaaaacaaatggaaaataggatattaccataataattatggttcaacaacaatttcgatttctaatttgaataatggaaatttagatcaaaaatagttccgactcatagataaattgaaatgtgccaaatgtcacgtaaaccagcaagaggacaaagtcaacaccacaagagacgacgacgagcacagtgtgaggttatgatatataccctctgcgagactgcgactgctattactgatttgatcccaagttttttttttttttttgaaatttattttttctttatacacaattacatagtggtaagagattctagatggcttcttaatgtttgagatttatatctagtttaagtaggaaagctatattatttgaagaaagaaaaaaacaaccaatcaaagtcatgcaatgtgtgtgagagacattataacatacatagataagatataaaaattaaagcaaacaaaagtcatattttacttcttttataaaaaaagaagttaagcaataacaaacaaacacataaccacaaagaagacaaaacatctttaaccaaaaacatg

SEQ ID NO: 23083 - DNA, 3003 bp, Unknown
  misc_feature (1)..( 3003): 2750-1469P.txt file - cDNA_ID_2130076; gDNA_ID_1620358; Annot_ID_154552
tcttaatgtttgagatttatatctagtttaagtaggaaagctatattatttgaagaaagaaaaaaacaaccaatcaaagtcatgcaatgtgtgtgagagacattataacatacatagataagatataaaaattaaagcaaacaaaagtcatattttacttcttttataaaaaaagaagttaagcaataacaaacaaacacataaccacaaagaagacaaaacatctttaaccaaaaacatgaccaacatgactcttcgcaagcatgttatatactttcttttcttcataagctgctctcttagcaaaccctccgatgcatccagaggtggcatagccatctattggggccaaaacggaaacgaaggtaacctctctgccacgtgtgccaccggccggtatgcttacgtcaacgtcgcctttcttgtgaaattcggaaatggccaaacaccggagctcaaccttgccggccactgcaaccctgcggcgaacacttgcacccattttggctctcaggtcaaagattgtcagtctcgtggcatcaaggttggttcgttcattcacatacatccgatcctttaggtctagatggttttttttccgagatagaaaataaatagcttttgtttttatctactcaaattttgattctataatttagttagctactttgaaatgacatttgttttgatacttatgtcaaaattgttataaggttatgttgtctctcggcggcgggattggaaactactcgattgggtcgagggaggacgcaaaagttatcgctgattatctgtggaacaacttcttgggaggaaaatcatcatcacgtcccttaggtgatgctgttctagatggtatcgatttcaatatcgagcttggctctcctcaacactgggatgatctcgccaggtagtagtataaatgtataattaagaaaacattttgaataaatgacaaatgttgtcgtgactgaaaaagactagttatcaaaagaagatgttgaacaccaccaaacgatttgggtgactaatttatctattttagttccggtccaaaaagataacgaaattcgaactttatatagaaaagttttgtttaggtgtttaaattccttctttgtgttgactttttttttttgtgaaaataacaaactaaacttcaaaaaaaaaaatgtgtacaggactctctcaaagtttagccacagaggaagaaaaatatatctaacaggagctcctcaatgtccatttccagacagattaatgggaagtgctctcaacactaaacgttttgactatgtttggattcaattctacaataatccaccgtgttcatacagttcaggtaatactcaaaacctcttcgattcatggaacaagtggaccacttcaatcgcagcccaaaaattcttcttgggtctaccggcagctcctgaagctgccggaagtggctatatcccaccagatgtactgacttcacagattcttccgactttaaagaagtctaggaagtatggaggtgtaatgctttggtctaaattctgggatgataaaaatggatacagttcatctatattggctagtgtgtgaaaagaatcgttatggccattgtatgtgtatcaattctctcgtatgtgtatcaattctctcgtctttggtttctgaagaattgttgtgtgtgtgtggtgttagtagtctaatttaaattgtttgtatcaatatacttaatcaactttgctttttcaatatttttttttaataaattatggattcgcttttagtatgaactgatatagatgtagctagctgcatgcaagatttgtttttttttttacatgaaaggtttttttagagatacgatatctactttggaactatatttgaaattgaaaattatcggaagcgcaaagaaacgagatgaatcatgattcagaagaaaaataaacatattgtaagcacatagaagacttctgtccacatcagaaggatgaaaaaagatttttgactaatactccttctgtatattatatttgatgttttaagttttggcaaaccgatattatttattaactatttaaaacataagatttaactaattgtaaaattaatatgcagaatataaactgtcaaaaccaataaaaaaaaatctattttaaaataactttttgtaataaaagatcaagtaataaacagagagaatatatactatatatatatatatatatcgtgttcaaaaaaaaaaaatcattatatatatttagacaaaggattagtctaaaatatctaatctaattgagctatgaacggtttaacatgcatgcactagttcatttatttgttatttgcttcataaacaaggattgatccaaataatcccttcaaaatgagtatagtcgtcaaataactcattcaatcgatttttctaatggatctaaaatgatgtaccattttggctagccaaataaaaatagtttgatgatttcatttaatttgttgccatcatttaaacttttgaatatgaaaagagtatgtagagtaatagtaatggggaacgcataaacattagttgatttgtgctgatttatgttgatttatgcgacactatattatcttacgtaccatgaacacacatttcacaaattatagatcatatattggtgtgaaaaataaagttaattgttacatcttcgactatagctggagttttcatcctattaaatattaataaaaaaatacaaaaaggcacaaaacaggtgccgccatatccaatatatccaacatcgtcaattattcagagccgaccatttacaaaaacgaagaccttttgtgaaaatctagttcaaccataaaaacacgtgccacaatctcattcttcagagttctcccaccgaaccatctctctaaatgcgttcaaattatataagtgagtgatatataaagattactaaaccacatggtataccgattttttagcctcattctcttttgttacaagattctactatg

SEQ ID NO: 23084 - DNA, 3003 bp, Unknown
  misc_feature (1)..( 3003): 2750-1469P.txt file - cDNA_ID_2130107; gDNA_ID_1620358; Annot_ID_154559
ttttttctatgtggcatgatgcaaattatcttttttgcacttaagtaatttttggagatgtctgatagacacggatatggagaactgtttataaaaaagtgcatgcggatctaaaatctatttgtcgcattgtaattggtaaatatacttcgtagctgaatttactcccaaacaaacatattgtattgttcttccttccagtaaaacttgactatatttctaaaacattaacaaaaaacgaataaataacaaaaaagctcatcatttatatgataaaaaaaaacgttatatttattatgaaaagatttaaaagcttatcatttatgtaattatatttaacaaagaaaaaaaattagaaaaattatcaaacaaaccaagactcaaagttatttatttatttttcttttgcaaaataatattttatgcatttgttaaatgttaaaaaacccaaaaaaaacttcaactaatttttatttggacgtttaatacccaattgtttttggttggaaagtaaatacacgaagtaataaaaccgtgcaatttaatacacaaacaagtaattgttgttattttcatactcacgatctcacaataaaaattaatatcatattatcataaactaaaatattaataaaattaatttttattcaaaattataaaattaatatcatattatcaaaaaaaaaatagttaattgagatggtaaggataaattgcaattttatttttgttgtgagatcgtgagtatgaaaataacaacaattaattatttgtgtattaaattgtacgattttattatttcgtgtatttatcttccaacaaaaaataattgggtattaaacgtccaaataaaaattaattgagatcttttttgggttttttccctttgttaaataccatattaacttcattttcataaatatattttaaaaatttccttgttttttggccgtttcgtataatgtggtccaccacctattgaccaatgcttaaaaaaactaaataattgtgacaaaaaataataaaaagaacaaaaaattacttgagattgtcaatgacgtgaaccatgactagttgatcaacaagaagacggccacgttgaaagctttgaattacagctatacatttaacaaatacatacactatcatgtttccgtaactgtacttacgtgaacacttatttatagtacaaagacgtgttttgttttcgcccaaaccaactcgctttttttctattttctcctaattcgtcttcgcttctttccctaccaaaacacaattcttatctctacaagaataagagaagatctgtagattttaaacaccatttctgatttctacggctgcaaaatttcaaaatcgtcaggttagtgttttattccatttctccatttttttgtttttggattcgtagttaacaaagttcattacatcacaaacaacatttttgtgaatcctttcttgagaacatgcataggctacatgcgattcttgattttcttttatatgaccttagggttcttattacgaactaataaatttattaattgatttttcttttcttttttttttctcctcgttctttctttcttaaacccaaattgattccagaaaccaaaaattaccttactaaaccccaaatgccaatttagctgtgaaccaatgtgatgtaaaatttacaaagattcctggtttactaatactagtacatgtatgtgatttttatatgttcaaaccggttttcacaagcgatggaacatgaacaatagcgtttaaacgcgtaaatattcataagcgttgttggccggtcgagccataactttgaagtggacccgatgagttgatgggcacatagcaccacaccatccatttaagatcttttgctattttgtttttttcttctaaagtttttttcttgtacagccaaaaagaaaggaaaaagaaatatatatatatatatataattttatttctgttgttaataggagtttttgtttcgttaattaaaaccaatttagttagctttttatatatttaatttcctaattatgggagtcttgattttacctacgactttttgaaacagcgatgttttagattggtttagctttgatcattgacgtggaacatcgcaataaagggtttattaatgcagttctaaaattacagttttgttggttttctaaaattatagtttctcttaaacaaatattcaaagaatttactccactcaaagtcagaaaccaaaaggaaagcttaaaattcgaaaacgaaaaaaatagagaaaactgtatttattctattctttgtgctttcttgtttttctatttatgattgttgtttgatttgaggagaattctcaaaggcgcccaaatgcacactagtatttataggttttaagtgcaattgttttggataaacaaacaatagtggccttcttttttctttctagccgataacatgcatcattttccaataaatatagggtaagtgactaagtatagtctaattctatacagctgggaaaccagcttagtggcaacaccactagactttgcaaaatgtatattaggtatgatgtttaaatgtggagaatttaggtcagatttatttaattatcggcctaattaaaccactagattttattagtttatgattttagaaaatataaatcccaaattcattttccaaaccatgttatagagcaattgcgaagggaataggtaaaattctaatgaatcaagaactcgctagaagtccttttactgtgaataatatatattttgttttccttcgcatatgctttcaacaatctaaaaaaattatatattgacttcaagggctatactcatcaatcttttgtgttaatgatgaatcaatgatacaagtcaagttagaatattaattaactatagattaaaaagaaaattcaattttataggtgtcaattaatacgtaaacaatttggatgttacagaggaaattaaaaagaagaaaaaaatg

SEQ ID NO: 23085 - DNA, 3000 bp, Unknown
  misc_feature (1)..( 3000): 2750-1469P.txt file - cDNA_ID_2130140; gDNA_ID_1620358; Annot_ID_154568
ctttgactgtaagtttcactcgaccgacaacccctctcaagcagcatggatcatgcgctattccaatggtacgtttctatcagcgggacacagtattggacagagatgcttcacaactctggaagtggaacttcaagcgctagtaatgacgatgcaacaagcatggttaaaaggtcatagatacattatcttcgaaggggacaatcacacagctatacaactagttaacggagaaaagcgcaacttcaaagtccataattgggttcgtgagatcaatgcatggaagcagaagttcttaagtacagaattccattggacgcgaagacataacaacaaagcggcagatagaattgcaaaagctccatttccaaatcatgctacttttgaatctttcttctatgtacctcaatacattgtaaacatcctccatgaggatcattgttcttcttaatcaataaagcagacgttagaaaaaaaagaaaagaagaagctaatggcttaatataaaaaacagttcgatggaggaaaataattgtctcgccggcaaaaccagttcctcaaaatgaaggagttttgatatttatttgaaaactcacatggttctgaaatgatgttggcattagcacctctaccagtaaaattgtaccaaacctcccaagagaaccgtggttctgaaccactggttcatgtctctgaaatagctcatttcgaacgtatggcccaatatttatttttgcgggcaataatatatacgcgtagacaatagactggacgtgttggctttatatcttgctttcgaagcattgctttatgtagtttcctgaaattttatagtttgtgtatttgtgtgtatgaaattatgtagtttgtgtgtcaagtgatgtaaaacattttgacacattttttcaaacatataaatttttagactctatatttggattttattattgggcaatactataaatctaattcaagtgtctaaattatttatttttcattattaaaattataaaacttatttgaattctcatttttggatcctattgttggagatgttcttaccggctaaaatattcctcataagcatatctatctcaagacaactatgtttttcactggaccatgatatatacaaaaccgactacgattctaatttaaattaatcgcgattaaaattgattgattttggagtgggaatgggagattaactgacgattccgtgtaatgtaaagaaaaaaatataactcaatttatttatttcttcttttgttaatattaagcaaccaattacacgttgacacatgtcagattctctctctctctcattctcaaaactctctgaagagaaccagctcttcttttaatcagttttgattattttttttcaatttaatcaaagaaaatcttatgaaagagcttccatttatcaccatgatgctcttattaatctccaagttttgtcttttggttcaagcaaagttccaattttaccctctaaaaaatgtcgtcccgtggccgagaacatcgaccaactctcatagcaaacgatgcgtcatattacgtcctactaaatatatgttggagaaaaagaacgaccaattactaggtttactggggataattatcccatgactagattgtgacagactcctttagttttcatacagaaaagagtcctttagttctatatgttagagtagtacgtaccatcgttttggcaagctttttgaactatatgtgattaattttgtttaatttcttcgttttgatcttatgatatcagtcgttgtacacctttatgttaataaacctttaaaagaatccaatgtatgtaaatatgcaaacgaaaaccccgtgaattttttgttgtacattgtgcctaatggtttggtttagccttcactagttgtcgatggaggggtcgttctctcatggtaccatcaatttgtcgccttagagtgtgttcaacgagttgagtacttgatgacatatgaatttcataaatctaaggttgtggagaagtattgccaaaaaaattaggaacctgtccgaatgcccatatattaggtgtttacatcaaggacaaagagaaatcatgaagcatggacacacatattttcaaggttcatcagtagggctgttggctatgttcacatgcaaaaggagaccgattgtattacgtacttggtatgtaatacatgcatagtttcataaaagtttgagctaataaatatctgaaatatccgaaacgtaattatatatataaaaaattaattattttatacttgatgtaatccaatgatacaatatacaattatgaataaaaaatatcagttatttttaaatcaaaataactgaaatactcaaaataaccaaaatatccaaactattagttatatttatcaaaacttaaactaaagttttttcgaatttaaacaatttcttatttgtttttataatattttggatacccaaacctgacttaaatatataaaatactcgaatgaggcctagaaacctaaaccaaaaaactcgaacaccgaaacgtcgatgattctttttttttggatataatgttagttttaacatggaagtaatctagaaatctaaacccgaaaagtttgtttgcaagtttaaaggttagtaaaattatctcgatggtttatactgttagtgagattttttcgaagtttaaagtgttatccaataacaatttaaaggttaaaaatgttattttcccctaaatatactaatcggtaagatatccataggtaataccaaaaccaagaaagaaagaccactaatctgtttatacggtggaaattagtcccacgcctaaaaatcttgtactctttattgcaatgttttttttttcttttctcgaatatttctataattctatatatatatgtatggaacttagctgtatcggcaaagctttgtggaaccacaagtgattaattttggagaaaaccacttctaccagaaatttttagcatg

SEQ ID NO: 23086 - DNA, 3000 bp, Unknown; identical to SEQ ID NO: 5060
  misc_feature (1)..( 3000): 2750-1469P.txt file - cDNA_ID_2130256; gDNA_ID_1620759; Annot_ID_167099

SEQ ID NO: 23087 - DNA, 3003 bp, Unknown; identical to SEQ ID NO: 20585
  misc_feature (1)..( 3003): 2750-1469P.txt file - cDNA_ID_2130272; gDNA_ID_1620759; Annot_ID_167105

SEQ ID NO: 23088 - DNA, 3000 bp, Unknown; identical to SEQ ID NO: 950
  misc_feature (1)..( 3000): 2750-1469P.txt file - cDNA_ID_2130308; gDNA_ID_1620341; Annot_ID_153968

SEQ ID NO: 23089 - DNA, 3000 bp, Unknown
  misc_feature (1)..( 3000): 2750-1469P.txt file - cDNA_ID_2130308; gDNA_ID_2926222; Annot_ID_142464
atcttgttttatgtacttcaacaacattgtgataggcttatgattaaaatttggattgacatcaactgaacaagatttgaaaagtattcgtatgaaaaaataaaaagataacaaaaattatatgtcatttaagtcaatatttttttatcttctgtcattacatatatcaatattagagaaatgatcatgtcttaaatgatttgaaaattgtctaacttgattataaataaactatttctggtttgatgtattcacctgatataatattccaacaacagtgttatcgactcatgattaaatatatagaattgatataaactgaataagatttcaaaagtattcatatgaaaagaataaaaaaaaaagcaaaaattaaagcagcatttaagtcaatacttttagatcttctctcattgcatctatccatataagagaaatgatcgtgtattaaattatttgataggtctaatgttttaaatgtttattatttgaaaaaacttgaatgtcaatgttatcaaagactcaaaataaaattactaaactaataagaggttaggtaacgaacaagtacaacaaaaaaaatagtaaaataaaaagagtataataaaagtagtgcttaatttattaaaattaattttttattttatttttattttgaagaaaacaattaagagtaggattgatgatatatttaatttgcttatttaatttgattaatattttaatttaaaaaatatagaatgacacatgtcattttcttgtgtgatgatgtgtcatttatttggagagagttggccaactttcatatatatgatttataatctccaaaaacaatgctgtcaataaatcaactgtcagaatctaccaaatttatccaacggtcagaaactcagaatctagtcattacattgcctctgccattgaaagtaaatattgtccgttggattcttcatttttacacattgcaaactagggatatcaataatcagccattgtgccaattatgttgagattattgtaactaggtaacgactaacgagtgacaatgaatggcatatagacaaatttattctttattaaactgttatctgaaaattaaaaaatgatttcttccttaacttttaggtaaccgttgtttaacatatccaaattttaagtttttataattattttactatcagtttatatatgttattcattcacacaaataaagatatttgaaaataagcatttaataaataacatgatatatatcacccaaaggatggaacaaaaaaaaatagaaatttgacactattgaattagcattaagttacaccattacctcttacttattattatttattttttctcttacttaatttcaatcctaagtaacaattttgtacataggtggattgtctaaatattcttgtcgtgtaaattattgattatatttttgaaaactaaaacacacgatagagctgaccagagaccaatcaccagttagacatgccaaacatgctcagacattattaattaacggaatgattaaaaacacagctcgttagcaacgagagacattcattatagagttgaaaagaagaaagaaaaacgacatagacatataatggaatcgatggagacagagagtggtatggtcagtgcctcagtggtcactagtcaaaggaaaatcgtttcctctgtctaaccaaaaaacaaaatgtatttcaattttcttaaccaatttccagttttttttttttgtattatatcaatccagttaactgattttatgtttgattcatttctcactgatatctaaacttattgattttcgtgcacattttcaaatttgaaattttggatgtaagtatgtacagttaaaaaaagttatgtacaacattttagtaaagaacagtgtttttttttgtcagatagtacataaggagttattacacgattttttaataaccacgttttgtgtgaacattttccccaatacatttggtttcatattcatatccaacttactaatataaaattagtactaatctttctgttgacgaaaaaggttaattattttggaattttaaaggtcgattaaaactactccaccatcaagccatctccaattttaaaaagtaatgtcaattacatttcccaattaatttttgtggcttataaagtcttgacatctctttgctctttggacccgccttaatgtttttttgttcatgtaagatctttttctctctttcctctttccatgtttatgttttctattatttagttggcttttggtattttgttggtttctgggtttaagccatttttttcccaccgcctctgcagctctgcttttttagctgctattttttttttttgcttttggtatgtataatcggatttcttctttatcatttatcaaatgtttgaattcttccatctctcataattcttaagtggtcgtggtgtgtactatctcctaagctctctgttttttttttgtttgttcattggctatatttcaggtcttcttcttcttcttcaagaatgagctaatactcacagaagaagaagatttttctttggatttttcactactggtaagctcggttcctccctcttttgactgtaatttttaaattcggttttttttttggtgtttttctgaagaagttctgattattttatttgtgaagtttggatctttcttacagatttagtaggattaaagaatgttgttgtctgtagttaatcttcctctgtaaatctatatgctttgttacaaatctatgcttcaggaatctagggtttatattccactttgtttactttaataaaatatagtttcttaaaccctttttgtctgatgaatcaaaatctaattactttatttgaatcaagctaaaataaattggtactttaacatccccacagtgttcttctataatcttgattttttggaaattttccagaggcattgttgtgaaattggatggtagtagcattggaatg

SEQ ID NO: 23090 - DNA, 3000 bp, Unknown; identical to SEQ ID NO: 23089
  misc_feature (1)..( 3000): 2750-1469P.txt file - cDNA_ID_2130308; gDNA_ID_2926222; Annot_ID_203374

SEQ ID NO: 23091 - DNA, 3000 bp, Unknown; identical to SEQ ID NO: 951
  misc_feature (1)..( 3000): 2750-1469P.txt file - cDNA_ID_2130333; gDNA_ID_1620341; Annot_ID_153977

SEQ ID NO: 23092 - DNA, 3003 bp, Unknown
  misc_feature (1)..( 3003): 2750-1469P.txt file - cDNA_ID_2130357; gDNA_ID_1620341; Annot_ID_153985
tcctccaatcgtgatttctcttctggatccaagctgatgagctctacgtcttcctcccaggtcatcactcttctctttttatgattgtgaacttgttttcgatggttttgatcgatttctggttcagttttttttttatccttcttaaaggattttatactatagatgggtcgatcaagtgttattgatatgccattgaagtgaactaagcttgaaatgagccaagttaagtcttttatggggattcttacgaagttactgaatctgatgtgaatattttgtggcagatggttcagctcgtagctgacaagcatgtacgttacattctgatggcagaaaaggtacctagaaactgtatagaacctttgctcgttttctctgtttatgtcactgtgattgtatagcttatgttcttcttttcaattgctttttgaattttatttaatttgctagaagaaagagagttttgagtctgtggtgatggatcatctaagaatgaatggtgcatactggggactcaccactctcgacttacttgacaagctcggctgtgtttctgaagaggaagtcatttcatggctcatgacttgccagcatgaatctggtgagtacttgagtatcagatcagctctttttttacttactgatagaatgatgtaaaaaaagggatacatgggctaggcagtgaaagcaggtgtctttgacaattatgagaaaataatcattggctgtgattgctatataagaactagcaataagatctatggggacctttaaagttgctgggtggtttcatattttggttcgtattcataagatgtcgccacagtcgaagttgaaaacaagttgttcttttctgagcaggtggctttgccggtaacactggacacgatccacatatcctatatacactcagtgctgtacaaatcttggccctatttgacaaaatcaacattcttgacattgggaaagtgtcaagttgtatccttttgcacttagctttttgtcaatgtcactaactcgttcttcttcacaaatagtcatggtggaactttcatatgttaattaatcaatgatgttaaacaagaaggaaaaaccctgccttatagtagatattattatgttttcctatatacaatattagatgttgctaagttgcagaatgaagatggatccttctcaggagatatgtggggagaaatagatacgaggtgtttttccttgccatgtattacaaagacatttatatatttcctgttggtgatttcactatgttgaatcttaacagcaagctgtttatgcaggttttcgtacatagctatttgctgtctctcaatattgaaatgtcttgacaaaatcaatgtggagaaggccgttaagtacattgtgagctgcaaaaacctggatggtggttttgggtgcacacctggagcagagtcccatgcaggacaaagtatgttatgctatttgagtatttttctgtgccatcttcccaattgttacttgcaattagtgttataggtgactttacagaattaacaaggccaaccgcatcactgccgtttaactattccaatgactagatactcagatgtttatttttctgtagtcgacgtgctattgatacatctttatgtaaattgtataggacagtttcatggttgggagatatggtaaaaagacggtattctttatttgtttcttctgttactgcagttttctgctgcgttggtgctcttgctatcactgggagtctccatcatgttgataaggactcacttggttggtggttatgtgaaagacaattaaaggctgggggcttaaatggacgtcctgagaaactcgctgatgtaggcattaagctcatctccaatgagagagacctttgtatgatttccttggttcttacacattttttactgttcttatttccaggtttgctattcttggtgggtcctatcgagcctaatcatgatagatagagttcactggatcgacaaagcaaagcttgtcaagttcattctggactgtcaggttcgtctccaacaagaaaattcatatcgttactaataagccagttttgattgaaagctctcatctcatctatctaaatttgaatttgaataggatttggacaacggaggcatctcagaccgacccgaggatgctgttgatatcttccacacctactttggagttgcgggtaactttcatttgtctcttcttttagctcatctcttgctgtgaagccaaaagtggtcttatttcatcaaattggtgcagggctttccctccttgagtatcctggagtcaaagtaattgatccagcctatgctttgcctgttgatgtcgtcaaccggattatattcaccaaatgactgcaatgggtatatgatcttaatggtcaaacaatatggccgcaaggctctctatatgatttgttcattgaataatttacttggcggttttagaagttatgtatgctcaaggaggaggagattgcaatttgggtatgggaacagtctcaaatctcaatgttgtataacttgctacattattgaggtttctgatgtaatggaaacgaagttgtgttgctgctacattatataaatcacattaatgtgttttttctccacacttttcattctgatttacttcttgaaaaaagtgaactaatgtgtttaggagtgctcaatacttatagaccgaaccaatttaattaacaaattgaacaatttagagaaattgcaaagattatagtacacaaatcataattacaaataaattttatttccattgcagtaaactaaaaattaaaactcttgtatcgaattttgcaaatatatttccttttaaattttttaccttggggtttaaaaaaaaagagtaaaagaaaatcaggatgtctaaaccctagtacgccattagagagggttcagctcaagtgctctgtttttgtttgtttggtaaaaccctaaaagctttcgagccgactcttcaatg

SEQ ID NO: 23093 - DNA, 3000 bp, Unknown; identical to SEQ ID NO: 956
  misc_feature (1)..( 3000): 2750-1469P.txt file - cDNA_ID_2130361; gDNA_ID_1620341; Annot_ID_153986

SEQ ID NO: 23094 - DNA, 3003 bp, Unknown
  misc_feature (1)..( 3003): 2750-1469P.txt file - cDNA_ID_2130369; gDNA_ID_1620341; Annot_ID_153990
tgagacgggtggagagtgaagaagttggatttatttatgaaagagtaagaagagggaaaggtaaaatttgatccaacggctgtgattggtttaatctatcggaagctggatgccgttggatggtgagatatcaacgttgaggatggcgttgggtaagatgtgggagctactttatgttaattggattgtgattgtcggttcttccttcactcctacataccaattattgttgtcacatgaatagtaaaaaaatctctaacattggagtcttggaccattggtctaacatagaaaagataagtatttcggtagtaatgtcaagattcttattattttccaaacgcaacttacaattttagagaagctctctttggttacacacttaatacacgtcaaatgcataaacaaactcatcaaaagccgtaggaacaggcaggagcaataccttgtaatgagtgtgtgacagtataaaatcgagctaagaaccacgggaaaaaaaaatggtctcattgcgtatgacaatgcggagaatagtaaatcaccgtaccatggtcggagagtagatgaattcttaatggtttatttcgtacctatattaactagttagttaagtttagttactttcgtaaaatatatattaaatctttcttttgcatgcatgtcatagcaatcagtttatatgaaatatatgcagaaattgttttttggtccatcagatctatacgagagagttgaagaaaaaagttgatgcatattaccgtagttaggacgataatgtaaaacacacgcattggatactctcgtttagatttaactactgatgctaaattgctactttgaaatctttaaaatattctataagttcttacatctgtcgatctactgtcaatcaataaatatatcagtttgctattcggaaaatctaaactaataatcggataacttaaatattgttttctcaactttgtcgttgcttgtataacaataaaaaagtgatgtttcgatggtttcgcttagtactaaattttccatggaacattaatcatgcttacgtttctactttctataacaatgcaaaagaaaacccgaaaccaaaagcactactaatgatatcaataacaaaaccaatgtcgcccttatatcaccatcatttagatcataaacaagacgtgataaataaattacgctaagaacagcatatagctgtaaatatgagaaattagaagggtacaaaaacaagaatgtgttggtcttgtagagcttgtggatcggaaatcggatagcgacagaatgagatgtagagatatataaaaagaacaatgcacatgaaatccacattgcgtcccatgtgacatgccaacagctcacctgacttaaattctaactttctctactcgtagtttcttgctccagtagtttctcatacctacaaagttttttgctaaattccaatccctacctacaaagtttgtcagagttaatgtcgttataatatcttcttaatttatttttttcccacaagttcttgtaaatacaaaaattgaatatcttgtagtataagtatatatcaagtgaagtttactctttttgtaagtagtagtattatttacgtgattaatattataatttgtttctatgcaataagtcttgactctttcaaataaatcctctcacttgatctgtacgaattttctggtatttctatgtctgtgaatattcataactttttgttatggttaaccgaggatgagcgatgtccaaaagagattagttgagtgctctttgatgatgaaactctatgaaatagaaacacatctctctttgaagattattgttcaaagcaaacgaagtgattggtcaatgcagctcttgagaattcaacaagagcaacaacgtaatcaattagctgaagtagtgaagtctatcattttcttttgctatgatcaaaattgtaattcattaatttattggtttgtgattgtgaaaaagttttaatgacttttaaaatatataaaaaatagataaattaaaagattttaaatgattactagagagttttgtataatttttatgatttgtttttctaaaattttgtaaagtctttctataatcttgtaaaatctccttgaatataattataaactttaatttgtgattttttcaaaattataacatatctccaaaatatagtatactattcttagttattttcatcaaaatgaaaatcacacgcataaacacaataactatggtatttgtaagtaaagttacatgaatagggaaccatccatgaagaacttgatgttttattttcaaatattttgttggatatttacttttcatatgttagattaaaatgctttgttttaaaaattgcttgtgtgttgatttttcacaaagagattatagaggagcattcgtgggacttgacccattagaatatatatattgttcatcactgttaatgagatttatgcatctgttcgtatcattggtttttgtttatatccaaaatcatgattcacaatctctctttttttatgatacttttcatgattttaatttgtgaagaaaataagataaaatcataatcgaataacacaatattttataatcattaacagtcatggaaattgttgtttaagttgaataacacaaaatttgtaatgattttattaaagtatcaatctaataactccagatttacaaaaactttaaatttcttttttacaaatcaaaatctaataacaccaaactttaaaaaaatcttacaaaattttaattaaataacaaaaaaaaattcatgacattacaaatcatttaaaatctatataaatcacaaaccaataacaccctctaaataaaaaatatcaaattaaaatataatcgtcatcttcatttttttttcgttccgcatatggtgccgtgtttttatttctttgatttgtaaatccttctatggtttctcaatcgagaagaaggaacccaacactgagatccatg

SEQ ID NO: 23095 - DNA, 3000 bp, Unknown; identical to SEQ ID NO: 1108
  misc_feature (1)..( 3000): 2750-1469P.txt file - cDNA_ID_2130607; gDNA_ID_1620360; Annot_ID_154616

SEQ ID NO: 23096 - DNA, 3003 bp, Unknown
  misc_feature (1)..( 3003): 2750-1469P.txt file - cDNA_ID_2130611; gDNA_ID_1620360; Annot_ID_154617
ccctgaatttttttcaatgaatcaatagttgaataataaatgtaactgttgtaacacttttatctcaagtcacatgagctaggaacatctttggcaaaagccatacattatcggaaagcaacatacctttacagcatgaaaaggcgaagttttggtgcatttgcagcatccaagctttgttgttccaggatatgtctttgcaagaccatgtatctgaactgcaatgttaggatcaactcttccatccattgcttgttgtttaactaaaatctcctcttcaagcacatcttcgtcctctggtgtaatatgctctactggtggaactgaaccaatacagctacagatgctcccttcttcaaaagtgtagaaaaacatgttttaacttataattagttttatttagtgcaatagagaaaaataccttccactttgttgccttctttgccagtccaataactaggttttagaaagtagaagatcgattttctcacaccggatgcattggggatgatgttgtcaaagtagagagccaatacaaaccagaaaaagaacgttcccacgagccatatgtagattttattctgccaaaaacacagtttgttcagagaatgatacctacacaactattagatccaaaatctatctcagaaaggttggcatacagttgtaataacgcaagtgctctcgccccctgcacatattgctctttcactccaactgattccagagtctccgggagatgatgtcgcttcaagaagcagctgcagacccgcagaaaaggtattcggtggaaagagtgaccaaatgacacggctaccaatcgaatatgcgcttgaataagggaatccagcagttgttacaatctgcaataagaagtagaaatcgtaagagtccaagatttaaataagaaccaaaatttcagctactatatatgttagcaagagaggccaaacctgtgttataaaaccaaccagaaacacaaggaaaccaacagttgttgccgaagatgatttgctaatgatagatgatagcgcgaatgctaggccaatctagcaacacaagtaaatatataataacttaaatgatacacaaataatatctttgaagaaagcagagtacataatttgaaaatgaagttttttaccatattaaactgaaaaagaaagaaaagtaggaagacaagaacaaaactgttcttcaagaaaaactcaaactggaacatcattccaaagaggaccaagaagagtgaggagacaaaggtaaggattccttcccatatgagccatgacaaccaatatgcagattcataaacacccatcgttgtcattgcctgttgagcaacaaagaaacaaaacaatgatccaatacgcaaaacctcaggctaccaaaaaacaagaacagagattattataaaacctcgcgaagttttagctctttctcggtaaccacagacccgagttggagaacaaaaccaaacatggagaaagcaagaaagaacactggtcccataagataaaatgcagaaatgatcacttcaccaccaatcgctggacgcgcaaattccttaaatccaaaatcccaactaaactttggatctgaaaatgtataaggacttgacttattattccatgttataagaagcacccacatatgtatacatacacactgctacaaaaatcttcctaacacaaattaagattcaagaatataaagtacctccaattaaagaccttgcgatttcacgctctgcagcaatttgaagaggaacaaggaacttaaacgtaggatcttcacgccgaccacgttttttctccgatgaagagtttgtttgaattccatagctgatcactgtagcattcttttccacaaaatgcaaagcccctgttacttgcgatggatgtgacataaaccatgcatctacttcctcaggctttgtaaatgattgaacctgaaagagaccaaaccacaccagaaacataactattcagattttcgtacattagagactatggaagatgatgaagagacataatcatgacaaaaaaccttattggttggaattggtcgtccaggattgttagccataattgcagagacaatgtcagtgacacgacggctctggttgccactccacacgaagtcaaaacatggaagtctcacgaaaaacttatcctcacatggaagaatcggaagagagactaatgctttaggatctgtgacattcttgtgcctagtcgaggttaagtcgctcgctttggaagattcctctatagagaagatgagaaggatgaagaagaacgaagagaagagatgaagacacgtggctctcttgttcctccatgaaagcagtagattcttcttgaacaaagctgtgaattgctgatgaaaaagcggcaagccttctcgcagagtcatgatcacagaggaagaagaagattagaggtttttttttttttttttgaaacaaatgaataacgtttatctttaattaggtttttcgtaaggaaacgcctatgaaactatggacaaagactcttatcaattattctagagaaaaaaaaagaagtaattttgtttattactctaaaaaaggtttgaaagttgagaattcttaaaaagtttttttcctagttttttccatgattttattcagttaaaggaaacgcgttttctgtatttgtaagtacacttaagttttttttaatctttccgtttctacatagtattaaatttgaaatgtttccaattagtatttattgacttcttgggaagactatctgtatccaatccatcattacaaaggggtaatgtatcagattgttgttacactgtatacaacaatcaagagggttttcttggattttcatcaactattatttgattaattaaaaaccctaaaaaaaaaatattagaagagaagcgttttggagaagaatactaaaaagtggtgtcagtaagaaaaattttaaagactaacggagctctttttcttcttcatcaatg

SEQ ID NO: 23097 - DNA, 3000 bp, Unknown; identical to SEQ ID NO: 1103
  misc_feature (1)..( 3000): 2750-1469P.txt file - cDNA_ID_2130642; gDNA_ID_1620360; Annot_ID_154625

SEQ ID NO: 23098 - DNA, 3000 bp, Unknown; identical to SEQ ID NO: 1100
  misc_feature (1)..( 3000): 2750-1469P.txt file - cDNA_ID_2130689; gDNA_ID_1620359; Annot_ID_154580

SEQ ID NO: 23099 - DNA, 3003 bp, Unknown
  misc_feature (1)..( 3003): 2750-1469P.txt file - cDNA_ID_2130798; gDNA_ID_1620362; Annot_ID_154668
taccttttctatctctgaagtcttagtgtttatatccttgtaggaaggtccgctgttgacggaagatcttattagagaaacagaggaattagtacttcggacagggaggtcagtgccatcttttatttgttgtagtttgatataaaatttacactccacagcgattctggtgattgaaagtgaaccaatctgctaatgaattctgagttggtgattgaaagaccagtaacagtcagttagattgaaataatagacgtattatctggctgaataatatataattccgtttcgttattcagacatccaattatcttgatagattggattattgtctttcttatggttcagcatgggggctggatgttctcaactcttgtctgacatgcaggctttcaaggtgatcatcttaatgaataatcttattactgtttggtatataagcactcatgtaaggaaagaaattgtagctgatatgaaattgataagatctgtacctctgtattaggcagcaaatcctggctgtattttggaagattttgtgagatggcactcgccaccagactggactgaaaatggtaacatgtctggagatgactcttcacccgttcgaggtcaattaagtacccggatgcagaaagaaggtgtgaccatttctcagtttctctatgttgttaaaccattactgtaatatttcaagtcgtattctcaactggtcttaccaacgttttaaaaaaaatattattaggtaatttatggcgtgagctgtgggaaacagctaaaccactccctgctgttaaacaagcacctctctttgatgaagatttagctgtgtaagtttcaatagcatgtcctcttaaacgtagtgaaatctgtatttgatcactcatggagatcttgtccatttctcatttaacttatacagagaaggaatcttgaattatttggaagacattccagctgctgaactttttgagcagctgtttacttcgctagtaagtttttcccaacaaattgcgtatttttctttttgtgaagctttctatctgtaaggtcaatctcaaattctctcacttgcgctacgttaaatggatgtcattggttacacagttaaggttttagctgtaaatagcactttgacgattggattggttaaaaatatttcaggtttccctggggtttgtgatggtggagccagttttagctacaaacgatgacttgtcaaagcttttctttgaatgcaaggattatgtagtcgctatttgtcaggggggcgcatggaccgataagcttgatgatctatgccaggtactttactagagagctttgcacagattcaaaaacgtatctacatgcttggaaatctatcactttaatagagttaagaatgttttatcagatgccaaagtaaggccatgtggatatgaacattatgctcactaatcatacatcctaattgcatttatttggtcataataggtatacgagaccgtggaaacaatgttattacgtccagaagaagttttgagatcaatgaaacaaacagaggagtcgccatcaagtggcagcgaaacgaaacggcggtttaagcggctaggtttcatctttcgtggtagtaaagaaagaaagcagacaagagttccatcagaaactgaacagaaaagcaccgaacctagcccacgccaatcattctctagtctttttgatggcaagtcgtctctgttttcaaagagacctcctagacctgaaaatgtgacgcttgtctgaatccatattatttatttgatttgtttcatctgcttttaagtcatttctcagttttttgtattcttcttctggggttttaggttgttaagttgatcaattggttggtaactgtaaagttatcttatttaaaacatttctgaaggtatggtgaaatgcaaataaatggaaatgaataagatgtgtaaaagcttttagaacatttgtgtaaattattagatttctgagatgctgttttagatggttgcctaaaattaagaagttgaaagagttgaatgaacattcaaaccaattttttaccatttaagataaataagttggaaaaatgattcaacctaaaaagttgaaaaaatgaattaattataaagaattttttctcaacttgttcatctcctattttgcagagaaatgaactgaattttattcatttcttttttcaactcaaatttttcatccatatgcaaccatttgcaccttaaggtttctacacaagatatacataagaaaaatcaaaactctctagagttggttactttcccacaataaacttttcctaatgtttaggttgttgtttgatcaattccttggtaactgtaagtaaattgtttcattataacatttctcaaagtgatggcaaaaaaaaagaaaaaaaacatttctcaaagaaaataacatgggccgttgggcctatggactatttgatgttactaaaacgcagacgttttcgagagttcatattactgaatccaaatttagaagcgtaataataatcagagatcttataataataatgttcatattattcgttttacacaaggaaataagacacgtgtaaaatcctctgaattttccatattctttcgtgacttgctcaaagcagagaaaggtcatatgcttttctccagttcctctctctgtctatctctctcctccttcaataatttctgcaaaccctaactttctcattcggcgctcaagtttctctccaccccttcggtgagatttcaattcctcggttttctcttgttttcattttcgtcttgttgctgaaagtcacgaatctgagcagtttttatgttttgaaagccataatagcaggatttaggtttctgattttgagaaagtagtgttgaggatgaacagattccattttccgacgatttttgattgattgtgttgcgtttatgattacgagtgttgaatctcaccgacatcttgttgttacagagatttggtgcgatg

SEQ ID NO: 23100 - DNA, 3000 bp, Unknown; identical to SEQ ID NO: 1129
  misc_feature (1)..( 3000): 2750-1469P.txt file - cDNA_ID_2130810; gDNA_ID_1620362; Annot_ID_154672

SEQ ID NO: 23101 - DNA, 3000 bp, Unknown; identical to SEQ ID NO: 1128
  misc_feature (1)..( 3000): 2750-1469P.txt file - cDNA_ID_2130854; gDNA_ID_1620362; Annot_ID_154690

SEQ ID NO: 23102 - DNA, 3003 bp, Unknown
  misc_feature (1)..( 3003): 2750-1469P.txt file - cDNA_ID_2130856; gDNA_ID_1620362; Annot_ID_154691
cttcgattcattgcgcgaatcatccgtgatgttggtgtctagggttttatcaagagtttctcgcagcgcaggcttacgctcgtctttctcctccgtcgttactccgaagaggaatcagattccgattgttgcaagccgatttcactccctcgttcacggaacccccaacaaggttaggcttttaagctgattttacttgtaattcgttctggattttatcgtcgggtttatgctagggtttaaggggtttgtctaaacaaaagattgttatgttctgattctattgctctggtcttctttattacagtgtcacgaatttaattgtgtatgtctgaatgttaatgttttgattgctctttcatatgtcttaatttggatgtgaaattctggcaatccttgtgaatttgaaagctgagataaagctcattctaggatttgtgtacagtgaatttacttaatttggatcattttttttaatggcagcttgttgcagttccagtgtcgctccgaaaccatggaactctagatttgaatgttcttcaaaggttcggctttttttcctcttcctcagctgaaccgaagggaaatgagagtaacaccgaagtaccaaagaccggcgaaacttctgagaatgtggaggtggggaaagctacaggtgaggcaaaagattcatgtattttgacttagaataaagagagattactgtgtctaatactgaacgagtttctttttctgagttccagatgcagagattgacttcgacgatttgtcaagagacgatttagtgaagcttgtgagtgagaaggaagatcttttgaaggttcagcagaaagacataatggaaatgaaagataaatttcttcgcacttatgctgagcagcagaatcttatggacaggactaaccgtaatgctgaaagcgccaaaaagttcgctgtacaggtttacttctctactccgcgaatcctttttcttctttcttgtattaactcgttttgctttgtgtataatccagtgctgaatatgttttgttgtgctgcagaactttgcaacgagccttttggatgtggcggataatcttgaaagagcttcttctgttgtcaaagagagtttttcgaagatcgacacttcaaaagatttggctggtgctactccactgttaaaaaacctattagaaggagtggagatgactgagaaacaattagctgaggtaaaaacgtccattatatatatcttttgaggtaaacaatgataataagactggtgctgagaatgcaattttgtatgtaaaactgcaggtgtttagaaaagctggtttggtgaaagaagatcctttaaatgaaccgtttaatccaaacagacataacgcagtgttccaagtcccagatgcttccaagccaaaaggcacaattgctcatgtcctaaaggtactaaactattcaaaggattgctctctttcttgctttaactcttaagcctatgttaacttttagaaatccacacaatatcatggattctctgccatcattttataactgtttttttttcttccatatttgcagtctggatactcattgtacgatcgagttataaggccagctgaggttggtgttacttgcgccgtggagaatcaagaaggcggcaaagagtctgcagcttgaaatacttaaaacatcgagagttaagcttttgtttttaacatcttcatgagttctttttttagttaatagttctctttctttgcatattcattggaggaacaagattcccataaggtagcatgactatgctctgtacttccagggaagccctggttctgtaacttttacacaaattcataagccaaagccaaactcttggtaaaagcttcaaatcttacatttatataacttcttcctaacttacaaacacactacatagagatctagaagacgtcaaagtggaataaccgcctagcataagatacaatataagacatcatcacagctgaacacattttatagttgctcatcccaaatcaatatgattctcttcattcttcagtcccttcagaattcagacacagtcccagattcaaattaccagtttttgcttcctgcagagtaagtttataaaacacaagtatgaacaaacactaaccactttcattacattgcttgagttttaaatgaagcttaccttagtttggtctgagtctgttaggttcatgtctagctcaacagctttaggtaatggagattcagtgtcgaattcttcagtctcttcaatttcagaatccttagaaatcactttttctctatgctcaagcatcgcaatctacacaaaatcaatcattttccactaatcccacacaactaaaaccctaatttaatgatttggggaaaaaaaacttactggagcgtatctgaatcttcgcttaggcgactcctctgtctcaccggaaccattagcgtcggaggcagtaaccgtcgctgaggtaagtggagtccacttatggagaagtagatggtgtggtgagttactgttgttgctgttgttacgaccgttggatttagatgctctgaaaacaccgacggatgaggttgagacacgtacccacttcttcttccatttccttacacggccactgaacaccgccgtcgccgccggaccactgtatctcgatgacgtccggctcaatctcgatcctacaccttccattctcttctctctcttctcactagccgggaaaatagttgctttatctatcagctagaaaacgctgcgttttgatgtgatatagccacaaacgcggcgtatttatgtgatatggcttcaaaacgcggcgttttagtgagataattgttaattagttgaaacgtagcgttttaaagagagatttgttgattagtcgaaacgcagcgttttaaggagataactctgtttatctgaaagtagaagcaagaagaagtggcgcttcattcattagctctgttcagtataagcaagaagagagagcgaaaatg

SEQ ID NO: 23103 - DNA, 3003 bp, Unknown
  misc_feature (1)..( 3003): 2750-1469P.txt file - cDNA_ID_2130862; gDNA_ID_1620362; Annot_ID_154692
aaattgcttcctggatgcaccactttaaaggaggtaatgaacacatggattttattttcaacaaattatacaatttttttttttgtcttatatcagtgtaattcgctaatgaaacaagtaaacaggttgaagaaactctggctaaaagatgtcaagagatggagcaggaagccaaggagcaagcgacagacaacgccatccttgagcagattcgaaaggtcatcatctaattccatatatcatttgaagcattaacatcgttgatcaaacatcatttgcttctttttttttagatggttgaagtagagattcctcaatctttatttgaggaacaaggaagacagttttatggagctaggcttctagagattcaggcaagtgttttcagtgactgttgttgatctcttactctcttttactgtcactcagattcttaaggttgaatatggtgctgcagggaaacatgaagcttaacgaagaccagttggcttctctttcaagtcaaaaagcagtaaatgagtttctagaaactcaaagagagagcatcaccaacataatcaagcagaatatagctgttggagatatcttcaagcgcgaaaacttagaggtatatttatatgcatgatactctgtctccaagaaagaaacaatacatttttagtaacaaaaacattgtcgaaatacttgaatgcagttctcaacagatgaactagttaaagaggtcgaaaactcgatctcagaattcaagaaacataaacaagagttcgacgaggagcgtgtgaaagatcaggttagttctcttgtgaatctaagcactatcagtttcttgagcctatataagataactgaaagagagaggttcttcttgaattggtggttggttaggtacaagagattttagaaggagcaaaagtgcttgaatggttaaaagaccgagccgagattcaatacatcactcgttgattagcatataggtaatgtatgtatgattggcatgttctgtttttgtatgagcaatttggttttgatgtacaattatgattgattttgtcagaagaagagaactttgactatatttgaattgataggtgcaataaattattaacagaaacgttgctttttattttgtaatttaggtcactttttgattctatagtcaatgtgttttattggatatagatggtatagatataagtatttacgtcgatttcatattgaatttgccaactaacattgagtcattttgactatgacttgttttttatttcgacaaaaaaaaaaagagactcttcgtcttttctagtttggttctatatggactaatcttccctctgacctcatcacttttgctacttgtcttagctgtatttacgaactacttcctcatgatccatgttaaattatggaaaggtaaattaaatttcaccaatccgagtaggctagtacttacaccattttcccaactaataataaacacagttcaatacaaaaaaaagaagtttctaaccaactagtgattggatttattaataaggaataatatcgaagatactgctaatttgaaaacagaattttattcaaaatcagcaattctccggagaacttttcatctattttgaatgcaagactataatgtcaaagatgtcaatgtttgatctgagtatttcaaactaacatttataattccagtttactttacagatatctgataattaatttatgtgtttatctttgtcaactgtatttgatattaattcaaaattcctaaaaatgttttatcctcttgcatcatactttaaaacaaatatgaatttcgactgatagcgataataaatatttacaatattgtaattggataatataaatctagtgatatatatatggtccctaaaactggtaaacaactttggttgtacagtaaatgtttttgtagagctacacataacatttacagctttaaataaccataagttaacttggttagagaaaaccaaaaactattgaagcatccgagaatctagtggtgaattataacgatattattgcactgtaagaaaagaaaagaattaaaaaaaaaagtaaataacttgtgtggtcaaacaagcaaagaaccaagtcaaggaagagtaaaaaaagacacaagtctgtctgtgaacagtgtcatgtttgtaaataaagaaggaaactaggggtgaatattttgctaattggagtttccatcgtacttcaaaaaaaaaaaacgattgggtcccacactcacctctccgtctcttccacctccatagatagattttttttccttaagcaaaaaagattttatctcactctcaatagtgttagtattgtcacagagaaagcttcagatctagaagaagaagcagagttcataaagagaaacccattttaaaccctagaaatcaagtgtcaatctcggtaattaaagtttatgcctttttctttttactgttagatttgatcaattttgaggtctttagtctgttccttaaggttttgattgctttggttttatcaccaatgctgtccgattctcttgaagattctgttttttttgttcagagatctgcttcttctttctgtgctttgcttctgcttgatcggattttagatattgcattctgagcttgacttcgtttgctttctgtgtcatggtgaaaaaagggtttttgagcttcgtaagtcaaattttttgtttccgattcttaatgtttggtctgtggagtttaatctttggttagagtgattaagaggttttagattccgaaaaagattctaactttgattgagaatatctacagcgtatcttttggtgtttgttattgttttttcttagcttcgtaatcttagttcagtttcattataatctgatgcagaagaaagatctgatttgagcgatgtataattcattcttagtttagttttagtctctcattggtttttgtttttgatattttctgcaggaaaccttctgattccgcaacaatg

SEQ ID NO: 23104 - DNA, 3000 bp, Unknown; identical to SEQ ID NO: 1120
  misc_feature (1)..( 3000): 2750-1469P.txt file - cDNA_ID_2130917; gDNA_ID_1620361; Annot_ID_154649

SEQ ID NO: 23105 - DNA, 3003 bp, Unknown
  misc_feature (1)..( 3003): 2750-1469P.txt file - cDNA_ID_2130927; gDNA_ID_1620361; Annot_ID_154651
aagtgtaagaaaaacgaaattcatcataccgttttgtaagaatttagttgcttgcttgttgttatgtttttttcatctttcgtttagaaattcatatatggactagaggtaactattgcaaaatacatatatagtttcaggacctgagcaagaccattttctaaaacagaatctagaggctttttctttgtaaagagagtaatttaccttgcaaaaataatgcatccttttaacacttaatctgtccaacttgaattccactggagaaagaaaggttcttatcaaccacagaggatttgccttgagaacaaacaatatatatatatgatgcagcagaaacaaaaaggcgccgttcttgaatcaaagaaatcttattgaaggtcttgtgcaaaaaagataaaatatccctaatacttacccctgtcaggtccttggttcgatgtgttacccaagcaaggaatctttttcataatttcttttagcttttctgaagaacggacctggtgaataaggagcaaattctaagaaagagaaatgcatatatggactgcacaagaactagaggtaattattatacctcctcacacgcagaagttaccacatttaacctttctttgagttctgttatctgcacagtaacaacagaaccaagaatatacagttacatagacgctggtaaaaccaaaacgttttcctccaaagaatcagataacagaaccgccggaccttagtgccaaattgagtcttgaaggaaaatactctaagctttgcctcaagtcgtggcaccttcattagctctagtaagtactgcgataaacaaaattgatggcagaagtcaatgagttagctaagtaagctaattactaaccatatttatttatagtaggaaccaaaaacagtgcgagattgataacttcaacagacctgttcatactttcccaaggctgccttgtcaccagtgtaggtctacaacaaatcagtcaatcacgacaaagaacaagaacccgtgtcaataaaaagtgaataatgatgattaaccaagaactgacaaatatcacaaaataaataaatagaaagtaaataatgcaactactcaaaagtcaaaaccttaagaagctccatctcctcatttgttgggcaaaactttataagtttctctatttgatcaacatctactacagactcatccattgccaggactgcagtctggacgatgcaaagaaaaaaatgtggactattatcattaagctatgaagcgtaatgacttcttacccaggtaattaatgtaggttttgtagcttaccatcatatcaggcagcggcatcgaaagattaataaccttgttattggctctcatatagtaggatctaacattaaaaaccctgtaactggctctcctaaggtcatgctggaaaaccataagagagactatactttcaaaagtctccaccagaaaagagcaagttaaaaaatatatgtgacgcaataaccaaatgtgttaagaatatttcacattaccagtcgaattttttcaggttttgcctcaacaaagaaaagggtctctaattctgatatatcaagttctattgcactggcaaaaaaaaataagaaatgattacttgcaaagcaatggtcaataaaacgtcagtacgtattatcacatagaagtaagagaaaagccaagataaagttaaagtccaatacgtttgtgaatctccatgtcgtctctgtaactcatcccataagctcccctgcaaatcgcttgttattttaacccaatgtaaaggcttcagggaggccctttttttagctggacgtggaaaaccccacaccattcctgcacccgtatgatcaaaggcatcaaacatcggaggtaatcttctaggcataggaggaggacgtggtggtggtggtggtactcttccaggcatcggcgccgccatagcatcagagccagagatctcgacaagcgacattggattaggaacaaacagacgatttattacagtttatatacaagaccaaacagattgttttagatcatgttcgatctaagtcagagcatataagagaatgatcaatcgcataaatagacttgggaaagcacagttgactttgggcaaaagaggttgtccaggtttgaacagtcgagaagattcctagaagaagatagcaaggaaacattgttagcattaaaatgttcttttttaaatttcgatgcaagcaagaagtgcgagatctgctgggccatcattatggtcatgaaaataacctatatttgagtcaaacctagttattttccctttagtagtttactattacacaagtctccaaaacagagcattttggacataatcatgagccctatccgcttccaaggagaaagaaccgatcatgtacgtatcccactcactaatatgctaatccaaagacggttaaggattcggtttatggttttgcttacaaaatatttcaacggtgagaaagagaaagacaaagtgaagctttattggaaaatataaaaaaccttgaaaatttcattattttttgtttttaagattttttttttggaaatttcagaattttcatttttgtcctattttcgttccctaaaaaaaaaaaaaatatgaacgaaaagaaattagcaagaaaaaagtgtaaaaaacagaggataatgatagttattcttctttttttcctataaacatcagagatagaaactacatacaactggacaaaaaaagggtagaaatttcttaagaaacaaattactttgagtttttatttccaaagaaacaacaaaccatttgcaaattctttaaaaacttaattgaatttcgaaaaggccaaattatggcacgtttttattttatttttgtcgtatggcacgtttattatataaatccgtaccattagttatctcctcttttatttcccgcccattaaaacatccaactttcttctgttcttctgagtacgaaaccctaaaaagtgacagagatg

SEQ ID NO: 23106 - DNA, 3003 bp, Unknown
  misc_feature (1)..( 3003): 2750-1469P.txt file - cDNA_ID_2130943; gDNA_ID_1620361; Annot_ID_154656
aacgatgtggaaagagttgtagattgcgatgggctaactatttgaaacctgacatcaagagaggagagtttagctatgaggaggaacagattatcatcatgctacacgcttctcgcggcaacaagtaaaatcctagcttgccgaaatccatataaataagggtatatataattaacacattattaaagtttatatatatgttttacttaaaaggtggtcagtcatagcgagacatttgcccaaaagaacagataacgagattaagaactactggaacacgcatctcaaaaagctcctgatcgataagggaatcgatcccgtgacccacaagccacttgcctatgactcaaacccggatgagcaatcgcaatcgggttccatctctccaaagtctcttcctccttcaagctccaaaaatgtaccggagataaccagcagtgacgagacaccgaaatatgatgcttccttgagctccaagaaacgttgttttaagagatcgagttctacatcaaaactgttaaacaaagttgcagctagggcttcttccatgggaactatactaggcgcctccatcgaaggaaccttgatcagctctacaccgttgtcttcatgtctaaatgatgacttttctgaaacaagtcaatttcagatggaagaatttgatccattctatcagtcatctgaacacataattgatcatatgaaagaagatatcagcatcaacaattccgaatacgatttctcgcagtttctcgagcagtttagtaacaacgaaggggaagaagctgacaatactggaggaggatataaccaagatcttcttatgtctgatgtctcatcaacaagcgttgatgaagacgagatgatgcaaaacataactggttggtcaaattatctccttgaccattccgatttcaattatgacacgagccaagattacgacgacaagaacttcatatgatccgttgattgcttaccggactagagttgaccggttaatgtcatatggttctcttagatatttgtcaagttatagtaaaggtccactatagggtcactatatattaatattcagtaatggattctcttagttagagaaccttgtgatgccgtggatcaattagtatttgatttgcgggagacacgagttttttttccttctattgttgtttgtggatttacgtactataaataataaataaaacacccatttgattgcaagcgttcactgtactaaaaccatttgatttaaagtttgagccttagtttgtctgacagtctgagccatgttaccaaaaacaatgaaaaatatgtaacacattttaggtttttggtgatatgaaactccgaagaaacaaatccctactgactactgagaaagtcgataagcttttttgtggataagtttcatggatatattagaagtagtaaccattaaccaacaaaaaaatagcttaagtgagttatcaagggatcgatgaacaattatgagatccaatgtgtttttgttaagaggcaaaatccgatgcagtctctatgagacaaaatttccatgggaaaaacagagagttctgaagtctctctaccttaaacatgtgcaagccttagcttcaaatgctccgtaaggttttcatttaaaaacatgaaataagatagagaaatgatacttgatccaactgatgaagattaacaagataattttgaagcaacttctgtttgtataatatgtcgtacaaaatctgctaccaatttagaggccaaattattttcttttctagacagtttgtgaggtgggcagctgaaggtgtttaagccaagattctcaagatttataaatcttgaatcgaattaagctatcagccggaaattaggaaatgatatgcatatagggactaaagatatagttgttgcattaaaaagcttaaagagagaagtggatgtgaaaagaaaaaaaccacagatttttgcacacaatcttgtgtgttgattgatatccaagtagactaattagactgctttgttctacacgataattggttgtttttagatatcaatacgaaacatgttaaaatgtgaaaatattttagattagatgataacacctgaatttaatgacaaaaaaaaaaaaaagtggatagagactagagggacagcaaggctgtgtgacatatatgggcagatagacaaagaagccgaaaaacgtgcaccgtccaagattctggctactatacctaatttccttcccgcagggacttgacaaatatcactatctgccatttttagttttattttgtattggtgtcaaagaattgaaataatgaacaacggtcgtaaaaagatgtaaatggtgtttgattgattaatgtttttttttttttcttagtatattttagcaattgcatattatcatataacattaattaataattattgtgttgtagataaatgtcatgcataatgcagtaataaatgtgtgtgcatatattatatatacacgttaattagatgctaaaatgagtgacatatcttttaattctttgataacaccatttccataaatcattgtaaaacttaccttataacaaaaaattaataaatgttataggggtcaattgacccccataactctacactagccccacctctgcggataagcttaacatgtctattaatattcattagtttacgtggtttaaaagtttattgtcacgagtgcatgacacttaccgtgatgttgactatatgaagaggtagatcgtacgtgtacaaatgacttcatagatctttgatcttttttttcttcttcttcttttttggtaatattctttagttttatttgatctattgtcgttgtaatgatctttgattacaaaggaaaaaaaaaactaagacccttgacgaaaataataaccgtattcgtaatctctgatatcctacattatgtactatttctgatttttgtttcttatacgcacttttgttctagatataactaagaaaatg

SEQ ID NO: 23107 - DNA, 3000 bp, Unknown; identical to SEQ ID NO: 1116
  misc_feature (1)..( 3000): 2750-1469P.txt file - cDNA_ID_2130955; gDNA_ID_1620361; Annot_ID_154659

SEQ ID NO: 23108 - DNA, 3003 bp, Unknown
  misc_feature (1)..( 3003): 2750-1469P.txt file - cDNA_ID_2130966; gDNA_ID_1620361; Annot_ID_154662
tttagctaaagctaaagttccattaaaagagtatttacgtgtgattaatgcgttttcttctctcatccattttgcttccgcagtacttcctagagctaatgaaggttccaggagtagaatcgaagctgagagtgttttccttcaagattcatttcggtactcaggtctggtggtatttacctataacgttttggtttttgtcagtgtctaagtaactgtagattcttgatctccttttttatgatgattactttgcagataaaagaacttaataaaggtttaaataccgtaaattctgcatgtgaggaggtaagatatttgcaatacttaaaactcaataatttacgcagcccatttgcgtttatctttcttagacattttctccttattgcttgtttatcagatacgtacttcacaaaagctaaaagagattatgaaaattattctctgcctggggaacatattgaaccaaggaactgccaggggtgagtattataattattttcttacccaaatattttttttctgtagcttaagacataacacaataaaatttctctgttcaatgtgggctaagttcaagaatggcgcctttgtttcattacatcataaatacttgttttgtatgaacgcaaatcctttgtggttgataaagaccctttgctctgctttctgcaggcagtgcagtgggattcaagttggacagtttattgaatttaagcgaaaaatgttctgctaacaccaacatgactctcatgcattatctttgcaaggtaaatttcaatcaaaagaagtagaatctatttatactgaaacccctaatctttctttttctcaggtccttgcttccaaggcatcagatctactggacttccataaggatcttgaaaatctcgaatcagcttcaaaggtttgcatttgtacgtactttttatccgttcttagctgtaattggctcatcatttgattgtcctgttgattcagatacatttgaagtcgttggctgaggaaatggtagctataaccaaaggactccaaaaactgaaccaggagcttaccgcatccgaaagtgacggtcctatttctgaagttttccgtaaagtatgttgttgtttttcaatcttatccatcttttatcaatcatgaatttgagattaggtctatcactttgccacattactaaatctgcttccatcattttgtaaaatcaataacagctagaaataattcttcagctaagtttgttttttcctacataacttcttccggacgctaaaatctagttttatgttttcgacagttattgaaggacttcatatccgttgctgaaactcaagtagcaactgtatcgagtctttactcctcagtggtaatttttgtcaacctctactagattccaagtaccttacatttaaaaatgtgtttgatcctgaaattaattacttttgtttttgaatcttatgatggtggaccacagggaggaaacactgatgcacttgtacactattttggcgaggatccgaacgattatccatttgaacaaggtatacgatgaacttcatcatcctcatttgtgctaatatacataaaaagtggctggctcattgtttttacgtagctaataacaatacatgattatcgatattgcctgcagttaccgcgaccctcttgagttttgtaaggttgtttacgacagcagcacaccaagagaatgtcaaacaagcggagttggagaagaagaaagctgcaaaggaagcagaaatggagaagacgaagaaacgagtcagtctcactaataaaaaagcaagcggagttggagaagaagaaagttgccttatataactgaccatagtgtggtaactcagatattttgtgttgatttaaacaagcgatggaaatattttcactgtttggtgttgttaatatgtgtgtggttacaaccacgttttttttttacgatcaacttgtgctttttcccatctgtcgaaacacgttattattgatttttagtaatccccaattgcaattattgtatcacattcatatttacagtagtttataattgaatcggtattagtgaaccatatattaaaattttaatcagcgaagacccatatattaaaggttgggcttaatttacttaaaggccggcccattgatgacttacggagtcacgtgagacgtgacattctccttatgggttctttgacttttgttcatttcaatccttggccagtttggtctttctcttcgtcgactcttttgctgaatgtgatttcgaagttttgtgtgaatgaatcaaaatcttcagataagtcggaatcaaacttttaatttaatttcagacagtatgacacatgtgacatgtcatgtctctcccctcaactcttgccatgtcttcgtctgtaagtttcctgagaatattctccattttcctgcaatccaatcttctctcttctccaatgataatggcccagcagatctcggatacgctcttcttgcttaatcgaaattgaaattaaaataaaatattttagtgctaacaaatgtttcattacactatgttcttctaggaatctagttcaaaacttcatttttttctcttaaacttgcttctaggtctgtaatgctaattttattgttttgtaatggaaaggatggtctaaccgacacatatataaaggagtggggcttggtttagttagcggcccattgggcttcctgactttgttgttttgggtagataataaattcgatgccgttattgattaactattcaaaaaatggatcagacaatactctctgtcttgtcttatcttgtcgtccctccaattttggacaagtcttttccacaaagtcaactgtgctgccattgatcattctctttatattttttctgggaatttttgctctgaactagtgttatttgctctaaatcggtgaagaaagcagtttgctattaaatctctctactaaatcatctgtttggttcctgatccaatg

SEQ ID NO: 23109 - DNA, 3003 bp, Unknown
  misc_feature (1)..( 3003): 2750-1469P.txt file - cDNA_ID_2131002; gDNA_ID_1620364; Annot_ID_154762
taacaaaatagaccaaattaacacccactccttcttgttaacctcacgttataattatttcaagaaaatttagatttcatcatttcctgttgtttaaaaaaaattataatctcatacgtgttagtccacagcttcggaattaaaacaaggttcgctctgttttaggactgagtttcgacgtttctcctgtagactgggttcttcttctttctctgttcttcgtgctctgtctgcaggtggaagacgagtctgtgctgggtttttcgtctgggcttctgagctctctgctttgtttctttttggattcaaggtttttcttgttttattttcgggcatgtgtgcttggttggccctagtggctttgtatgttttcagggcctatatgtccttttgggcttttggccttgtaatgttttaatggaaatataaaattttaaaaataaaaaaaaatagaattaatcataaagctctctcaaaaatatgtcatttacaatcacacctaaacgattctgcaccaattaaggtttcattgctgctcagcaactcttttcttctttcttttttttggttttgcaagagttccaaaataatttgagtagtctattgagcttgttaccgttacgcgctcatgacactctgattatagtgaccagtgaggcagtgaccactctcaactaataatgatatcaatgatcttgctacaagttgtctgtattaactcatccttgtttgtatccaagtaattattttagtgactaaggcaataacacatgcagattcacgtcaatcagtttgtcccattcctgacagataacttatcatattcgttacaatgttgtcatttttttaaaacaaacacgtacgacatgtataatttagaaggtaatactcaagaagttgtcaataaattcagtatctattattttatgaagatgatatgatttgacctaaccaaattcttcagcttggtgacggacgtataacgaatacttattggttgtcatctacaattatatatgaattgcttcataaactatttcgtcggcaaaaatttctttccaatcctgaagcgaaattattcatgttggtaatagactaataggctaattaacagcgcttaacgcgtgaattttcttaaatcatctttcctttaattaattatcttctcaaatactctacaattatataaatgattaattatgatccatgactttgtctattgtatataaaaatatatatattataatgttgttaatatttacaagaaagaggacttttttgaaaaggaaacttttttgtctcctctataattttggtgcaaagaataattatatatgaatgtaaacgtttagtaagacatgctttgatgaaaaaagctcatttggtagcttactggaaagagctttttaacggggtcaattataaaaccttaaaataatatctaggcatccctcttggaggacaaccaaaaaaaaaaaaaaaaaactactctgtagagaacaaaaagatgaagtctagttggtaaaaatttaaagttttcgtgttaatattaggttgaaaaaactatattctgttaaaaaaaaaaaacatacacacaactaattaaattggacctacagttattttttcaacgtactacgtatttacgttaggttagattatgattgatcaaacgggttctatttattaaaattaaacaaatttaattgatacattaatgtgtcacgagttcaactaaggaattaaaatactgtgcatggaaatattgaatttgcatatactgtacacgatgagaattaaataaattaaaatatatatatatatatatataccccagcctcgatttgaagtggacaggttattttatttcaaatagaacgatataaatccactgtatatctattattttttaacagaattggacctacaaaaaaaaatctgaaattgttgtatcgaagtgagttggtcagtcagagattatgattgatcaaaccaggtcccattcatcaaaataaatgatatttttagttttttttgttgttggaggaaatcaaaattaatgaatatacaatgtactagaggcattcaacatatttaatcggatatattaatgaattcaaatatattgtttccatgaaaagaatttactatttagatactaatcgataatcatactattgaacttcgatattcacggagagaaattatagaatattaaattttggataaggattagctccgatttgaattgtggctgagaatgatatcggttcatgctggtcaaacaagtcccatggtttacttaaaaagggagaaattagcaaaatgggtgaaatagtctgttttctttaaaaattataatttatcaaacgacacatatataattactttttatcttaaccatgcatataacacataaaacaaaaacaaagttttccaaaatgtgatcatagagtaattatgtatatacaaatcaacaattgtaagaaaaaatgaatcatctcataatatataattaaccaataatgattagcaaatgatgtaaaaaatcaaaattaattaattaaatttcctaaaaatataaactaaacaagtacagtatttagcttgaaaaaagatatttatgaacaatcaatatatcacatgttgtctgtcgacaaagacaaatgtaaaaaacaatcaatgacctttaatttcatcattttgattgtacttgactcgtgttttttgtctaccacgtctcgtcgtctctttgatttattattgattgattcattcatttataatttccacgtttcaaaaatgtcactagctagctaagtttatgtagctatattcttttaaccttagttctcaatgcagtaataaccaaaaaaagcaaaaaaacaattgttgaccaacaacaacaaccaaaaaaaaaaaaccactatataagcatgccccatgacccatatatgacaccacgagaagcaaatcaaaatcagttactctccgtccaaaatg

SEQ ID NO: 23110 - DNA, 3000 bp, Unknown; identical to SEQ ID NO: 1153
  misc_feature (1)..( 3000): 2750-1469P.txt file - cDNA_ID_2131018; gDNA_ID_1620364; Annot_ID_154767

SEQ ID NO: 23111 - DNA, 3000 bp, Unknown; identical to SEQ ID NO: 1154
  misc_feature (1)..( 3000): 2750-1469P.txt file - cDNA_ID_2131039; gDNA_ID_1620364; Annot_ID_154773

SEQ ID NO: 23112 - DNA, 3000 bp, Unknown; identical to SEQ ID NO: 1155
  misc_feature (1)..( 3000): 2750-1469P.txt file - cDNA_ID_2131052; gDNA_ID_1620364; Annot_ID_154778

SEQ ID NO: 23113 - DNA, 3003 bp, Unknown
  misc_feature (1)..( 3003): 2750-1469P.txt file - cDNA_ID_2131080; gDNA_ID_1620363; Annot_ID_154718
cggcattttccgaaaagtaaaattgaagggacgcaaataatatttatacttatttaggtattttattttatatccgaaaaagtaaaattgaagaaataaaaattgaattttggaaaataaaaattgaatttttgaaaataaaaataaataataaattaattgaaatatgagtgaaactcaaattatatgaagtctatgcaaatgaaagttaacttgaattattcttcatttaaatgatcaattatccttcatttaaactcaaatattaaaactggacttttaaatagtatctaacaattcacaaaaaatatctaggagatgtgaggataaaaagtttggcacattcttaaataatttaatataaatatgcaaactcaaatttaaaactcaacccaaaaactttttttaccactatcaaaattttgtagaaatatttaagaaatttgtatttgataatcagccaaactaaaaagataattgttgtgtgattacatgaacatggtacatcaatagaggagcaaaaccaaacacaaacaatctaaacaagatggactcctcaacacgaaacattaccaccaaatacatacaacttcgtcaaggaccttaaatttaagactactctatgccgaaacatagatagtagaaaacagagcaaggaacataatggcgagaggttagatagagtaaagtttaggtaaaatgaattttatatagctcctttacgtctttgtcaatttcatacttttatcaacaagacatatttccgacttcgattcaaagtcgtacattggaaaattatgctttagaaaaaacaaacttgacgaccaaaaatattttttaaaacttaaaaataaaaaaaaactgttaataaaaaaagtttcaaaaatagcttgagcaatgcatgaaagagagctgggagtgatagtagaagcaaaaaaaaacctttcaggagatatatataacccaaaggccaaagctctatattagaacacaaacattaaacattaggcatggaaaactctcaattagtttcgatcactttcttagcttacactataatcatatcaatcggctccatcaactgcatagacaacaataatcttgtaacaaaccaatccgctctgttcgtgtttggagattctgtgttcgatgctggaaataacaactacatcgatactctctctagtgtccggtctaattactggccgtatggtcaaacaacattcaaatcccctactggaagagtctctgacggacgtttgattcctgatttcatcggtaccaaaattactttttcgtttccttattttattttaaaacattttctttgtaactgatcgataacatggcagcggagtacgcatggttaccgttgatcccgccaaatttacaaccattcaacggtaacagccaatttgcctatggggtaaactttgcgtcaggtggcgccggagctttagtcggaaccttttctggattggtattcattagtaactactttacattggttttatttatttgttttcttttgttgaatccatggtaattgtttgtcttgtctatttttttttctttttcaaaaaacattttcaccactgcaaggtgataaatttgagaacacaattaaacaacttcaaaaaggttgaagaaatgttaaggtctaagttaggagatgctgaggggaagagggttatctcaagagctgtttatttgtttcatattggactcaacgactatcaatatccattcactacaaattcttccttatttcaatccatttccaacgagaaatacgtagattatgttgtcggtaacatgacagacgttttcaaggtaaaaaattttcaaaagggtttttgtagagtttctattgtgaacaacttttggtctgaaaaatgagagatgatgttgtgttcttaggaagtgtataatcttggaggaaggaagtttggaatcttgaacacgggaccgtacgattgtgcaccagcctcattggttatagaccaaacaaaaataagatcttgtttccagccggtcactgaactgatcaatatgcacaacgagaagcttctgaatggtttgagacggctaaatcatgaactatccggattcaaatacgcccttcacgactatcacacttccctatcggaaaggatgaacgatccttcaaaatatggtaacaaaacttggttaataattgcaatatatataacagagtctttactataaactttttgatcgttttgaagggttcaaggaggggaagaaagcatgttgcggaagcggaccattgagaggaatcaatacgtgtggaggccgaatgggactgtcgcaaagttacgagttatgtgaaaacgttacagactatttgttctttgatccttttcatttgacggaaaaggctaatcgacagatcgctgagctgatttggagcggacctaccaacattactggaccctataatctcaaagcgctgtttgaacttaattaaagctcactatctcgtcgtgtcatcttgtttggttttcattcaaaattttttgtgtatttgaattgtcaccagaatctttcagttttcttagactcttggtctccaaggctttacgcgagcgatatatatcactcgtttcgattttgagtttttgaccgtttgaactttgaagagtgtttcttcaaattaaaccaaaccaattttacaaaaccaaaattcataactgattcttttggttcacactaaaccgagtttatcaaaactactttaaaatatggtttggtttaaccaaattatacgtcttaatcaatgattaggagactttattaaagtctataaccgcaattcgtcatcaactaccatttccttctccaatggagttcttctctgagagtgagaggaatcactgaaaaaataatactgaccatttcccaaaaagttatgtacttattctgacgaaatctgcaggaaattctcaatttttttaaaagaagtagctttttggagttatg

SEQ ID NO: 23114 - DNA, 3003 bp, Unknown
  misc_feature (1)..( 3003): 2750-1469P.txt file - cDNA_ID_2131084; gDNA_ID_1620363; Annot_ID_154719
gattttgttctgtatcattacccataagctcaatctaacaatcggaatcattccttcgcttaatgtagctgctggtcttctcggcttcttcttcatcaagtcgtggactgggttcttgtctaaattagggtttttatctaaaccctttactaagcaagagaacactgttattcagacttgcgttgtctcctgctacggccttgcttatagcggtaaaaatcgttacttgcttagatatgggttaatagtaatcttcttgatttggttacgtttagtttcaattcctatgtgttgatgatgaacaatgggagatatggatgatactaactttggatccacttgatgactttgctgaagggaactgtagctattccagatttatgatgatcaagtttgatttttttgtgtgcctaatctgatatagtttcttgtttttttaggaggatttggttcgtatttgatagctatggatgaaaggacatataagctcattggttctgattatcctggaaacaatcctgaagatgttataaatcctggattgtggtggatgactggctttttatttgtagttagcttcctcggtctcttctgtctcgttccacttcgcaaggtagcgtctcattactgcgatattagtattaatcaaaacaaaatatctaagagaacactattgtttgatctgttgatccttattcaatagtgtatcttaggtgatgattttggattacaagcttacgtatcccagtggaaccgctacagcaatgttgattaacagtttccacaacaatactggagctgagcttgcagggtaattgtcagagattcatcttcaatattcaactccctgcaaaacattgcttgagtttcattaaaaatttatctccaatattattcacatcagaaaacaagtcaaatgtcttgggaaatacctgagccttagcttagtttggagttgcttcaagtggttctttagtggtattggaggtgcatgtgggtttgatcactttcccacacttggtttgactctattcaagaacacgtaagttaaccaatttcgtacagtttaacaataagtaaatgagaatggtttagcatgtggatataattggtaacgagtcatgattttttctgctgtgcaggttttactttgatttcagtcctacttttattggatgtggcatgatatgtccccatttggtgaactgttcggttcttcttggtgctatcatctcttggggttttctctggccatttatatcacagcatgctggggactggtatccagctgaccttaaagccaacgatttcaaaggtctctatggatataaggtacacaataaaccgattaagtaggaagaatttaatgttagtagatgaatttcataggtactctcattgtggtggttactgattctctttcatataattactgtacttataggtatttatcgccatttctatcatccttggtgacggtctctacaacctcattaagatcattgttgtcactgtgaaggaaatctgcaacaaaagctccagacaacacaacctacctgtctttaccgacattttaggtgcgaatatatatgatcctgattcacaatcgcgtttgttagtaatagtcatagttattaataaaggtgtctctcatgaccatactgacaacgtctgtctcaaatattttcttaagagtttctttctccattcttaattcagataaaagtaagacctcagtattaatgcgggagaagaagaaaagagatatcatatttctcaaggaccgtatacccctcgagtttgcggtttctggttatgtgggtcttgcagctatttcaaccgctataatcccgttgatattcccaccattgaaatggtactttgtcctctgttcatacttagttgccccgggtcttgctttttgcaattcttatggagccgggctcacagatatgagcatgccttcaacctacggaaagactggtcttttcatcgttgcttcaattgtaggaaataatggtggagtcattgccggtttagcagcatgtggcattatgatgtcaatcgtctcaactgcagcggatctcatgcaggattttaaaacaggttacctcacactatcatctgcaaaatccatgtttgtaactcagcttttgggtacagcaatgggttgcataatcgctcctctcacgttctggctgttttggactgcttttgatattggagatcctgatggtctatacaaagcaccttacgcggtcatctaccgcgaaatggctattctcggggtcgaaggctttgccaaactgcccaaacactgtttggcactttgttgtggattcttcatcgctgctctgattgtaaatctaattagagacatgacaccaccaaagatctctaagttgataccacttccaatggcaatggctggtccattctacataggagcttacttcgccatcgacatgttcgtaggaaccgtgataatgctcgtatgggaacggatgaataagaaagacgcagatgattactcgggtgcagtagcttcaggtctgatctgcggagatggaatttggaccatcccatccgcaattctttctatattaagaatcaatccacccatttgtatgtactttagaccatcctagacattgttatcatgttaaaaatttgttgcattatggcagataatagagtttttatatctcactctagaacacaaagtgccaatagcaacaagtatgtggcataaagtcaaacagacaaggttgaccaacgaaactttatttgggcttattctgtaagcccatagacttttgttaagaagcccatacgaatctctttcctcgtcttttcgaccgaaattattaaaacctctaattcctcctcaaaaaccctaaaatcccaattgagaaaatttagacgctcaaggttttgtttacatcttgtccggtggcttgaaacaaattcaacttctgcgtactgtttctttgttgaatcatg

SEQ ID NO: 23115 - DNA, 3003 bp, Unknown
  misc_feature (1)..( 3003): 2750-1469P.txt file - cDNA_ID_2131093; gDNA_ID_1620363; Annot_ID_154722
catgttgatttgattgagctttggattggaatttttttttttatttttttttttttttttttttctttggattggaattcattcggtaagtaagaatatttcgtgattatagaacttctaattatgtaaaaaaaataaaataatgcgtgaaaataataaaaagttgttaccctttttttttacttaggtcaagaggtcacaacacacgccccaccttgaatctgagagagagagagaagtacgtccccacaccttgacatggtcatggagcccaagaagaaccaaaatctaccaagtttcttaaacccatcacgacagaatcaggacaacgacaagaagaggaaacaaacagaggttaaaggtttcgacattgtggtcggcgaaaagaggaagaagaaggagaatgaagaggaagaccaagaaattcagattctttatgagaaggagaagaagaaaccaaacaaagatcgtcaccttaaagttgaaggaagaggtcgtagagttaggttacctccactctgtgcagcaaggatttatcaattgactaaagaattaggtcacaaatcagatggtgagactcttgaatggttgcttcaacatgctgagccatcgatactctctgctactgtaaatggtatcaaacccactgagtctgttgtttctcaacctcctctcacggctgatttgatgatttgtcatagcgttgaagaagcttcaaggactcaaatggaggcaaatgggttgtggagaaatgaaacaggacagaccattggagggtttgatctgaattacggaattgggtttgatttcaatggtgttccagagattggttttggagataatcaaacgcctggacttgaattaaggctgtctcaagttggggttttgaatccacaggtttttcaacaaatgggtaaagaacagttcagggttcttcatcatcattcacatgaagatcagcagcagagtgcagaggaaaatggttcataaagctcaaacctttaaatggcttttaattagatatatttagcgagaatgtgattgctagtgaaatctcaaacttgatagcttattcatagcttattttacttcgatcagcaagagaacaatggttcctaaagctcaaaccttttttggcgtttgctttagattgtgcatacataaagtgagaagatgaaatatggttttgctgaaatctcaatgtgctcattcatagtttattttgctcgacctttctttaatcaatagctttgatgtactgattactttataaagttaagaagtaagttctgctctttaaactgtactgaatggaggcttctctgcataattaagcaaacactctgatgattgagtttcgttgtacaaaggaaagtttttgccttagttagaaattcatcttgtttctttgcccagaagctggcttgctgatagaatttggactacgctacgttttcttgggtgaaaaacaatccgcgtccttccacgagaacagtgaaactgtacgatgttcttattgtattgtgtcaacagcccataatcaatgaaatgggcctcaatgacagtataagccgaaaaatattcgaatgcgatctagaactaatctgaaaccaaacttctcaaatcattaacatttgattagggcctaaaagtccatccgtattttaaaaaaaagttgataacaaatgcaaaaatacaaatatacattactattaaaactcaatctttctgattatatgtggatggagaagctgttttgcagtgtggatttgaattttgaagttcttgttcaaaaaagaaaagaaacttggtcaagcttcaaaagaaagaaagaaataaagacaagtatacaaatacgttgacttcaattaatatgaagatagaagagaaagatatagaaatgcgttttaaattggcggtgggagatatgtgattcccttggtcccgctttctcgtttgattcggtaacctaaaccttctccatccaagaagacacaaacaaggaagaaattaacctacgtacgtacatcatttgaactacttatatctattataaatggaaaatctattttcttcttctctctcttttaaccgaaaaaggaaaagtcctcgaaataactctttaatataattcatgtggaaaccttctatatattttttgcatgcttttttgaaattaagtaatggcatactaattagaagaagacgaaaaataatatgtctaagtaattgagtttcgtggtcaaggcaaatcaagattgcattctttaattaagtgtacaaattatgatgtaagaaccgttatttggcataacctaatatatattaaaaactgattttttttttttttaacttctgtaagaaatggttttcttaattaccaatcatgatctattattgtaaaatgtgtaattttgtgttgcgattgaagtgttcttagataaagatatgtcatatgcatgatatcatctatttgattttgagaaaataaaaacataacatgagaacatcgtagagagtaagatacatgacaaagagaaagaataagctaagaagtcatccaaaaattgggaggcctactctcaactaccaaaaatacaagtgtttgttgtgttaggtcatttattcagtcacctaaccctaactatatgaaatacgttaaaattcatatatagaaaaataaagaagaaatactattagtcaatataattttttttaacaaaataaaaataaagaaagaaacactattagtcaatgaattaaaaaaaaaaaaatccatctttcgatcaagaccgtccaagtattctcctttcacataactcttacgttttacactaaacaagacgagatttttatgagcttgtggctcccacaacaatcctcattgatttctccatatatatcacatgagaatccaactcgacttcatactaacattcatcccaaaagttccattctttttcacaaagccattgtgctgttttctccatttggatcaaaatg

SEQ ID NO: 23116 - DNA, 3003 bp, Unknown
  misc_feature (1)..( 3003): 2750-1469P.txt file - cDNA_ID_2131097; gDNA_ID_1620363; Annot_ID_154725
gaaccaagtcgttgaagatgttgagtgatcagaaaacgaagcttctcttcgccgttgatggtagagccaagttcgagcctcaactgccaaaagggtacttcggaaatggaattgttctcacaaactccatctgtgaagctggggagcttatcgaaaaaccgttgagtttcgcggtgggattagtcagagaagccattaagatggtaactgatgggtacatgagatctgctattgattacttcgaagtcacgagagcaagaccttctctttcctcgactcttctgatcactacatggtcaagattgggtttccacacgacagatttcggttggggagaaccgattttatccggtccagtagctttgcctgagaaagaagtaactctgtttttgtctcatggagaacagaggagaagcatcaatgtgcttcttggacttcccgctacagccatggatgtgtttcaagaacagtttttacagatataatatgaacaacgacaaaatacaaatatctggcaattattgtcaaaacctattcgttttactctgtttttcttgcttccttttttttttatctttttgatttatgctgaattattattgttatcttcatcttaaacttgtctgtatcttgcatcaagtttcaaccataaatttatattatttcaaactatattgtaataatattattacttgaactgtttcagagatgttgatgtttttaacaaactaaaactcatatataaataaaataacaaaagtctaaagataaaatacagaggacaagaagacagaacagagtgatcctgttcttgtcttaaggacaaagttagagtagaaacaaacaaagacttagattattgcagtttgttctctattacttgccacacaaatgaagattcttctctaaaggtctgaaatttaaagcagtaaacccatagacacagagattagatatcttggacttaaacacaacctgctccgttgtagttctgaagccaggaacgttgcaggaatctttggacctaccgatcaagcttgcttgacaggaagccattagagaatctttctttgcttcagcggcgcaagcaacgccttccagagacgttatgtctagcttgtagagtccaagctcatttgtggttcgatttgcagagaacgtaatcatctctctagttctcgatgaagctgaattgaatctgcagattattctcacttccacacctgtatttttttgttcagttaaaacaaaagtgagagacattttaactataatttcaaacaatgttgataagattctttaccgggaatgaaatagctgtgattggagaaactgttgttggagcagacgtcgcagtaaacaagacccattacagtgatctttccatttggtttggctgaagaatgtttcagagacagagagtttaaggacagaagttgcagaagtaacagaagcattatcagtttctgcttcatgttcacaagtttcagtttttttctttatccttggataaacacttgtttacagatgaggtttcctttttgtttatgtggttgatgaaagaaacagacaaagaatgggccaagtggttaaagacaaaagaacaaacaaagatcaaacagtaactccattcaaacaaagcttcaagcttgtcttttttataaaactcaagactcttgtggaaaaagagatgagtaaagagaggcacaaagagatgagaggccaattaaaggaaaagtagagaaactgagagattggttggttaggtttaacatttattgagctctcatgctctctattttaagggtttttgtctatgaatccccttataaaaaatggctaaaactggaaaatggaagggagaaggtaagccactagtgtgtatatatatgtgtatggaccactgaaagtgaagtgtaaacatcatcaattcatcagcataaacaccaagaaagtagtcagaggatatggctctttaaatatcaatacaagaagccaaactatgatattttcccggtttactctcggttgtggctgaattctggaaagagaatttcaggttaactaactatacaaagataagctcacattatagacttttgttcgtcacattatagaacagcataagactttattgcataacaatttcaggtttaagtgtactagagaagataagcttacattacaagttcatcagttggaaacaatatatgggcttgagctttaaagaaggcccattaagcttgaaattgttcttcatgtaagattgctgcagattttactttaattttttttttctttttttcttttgcccttaaattcttgtaatgcttctaggtgactccatccactttatgtgttgtttcccaatcatttctattttcaactttattttttcctttcacaaattattttaagttttaacattattttcttcaacatacgaaatttatacagtagtttttttttgcaggtacatataaatcaatagttgagaaaaagtggaaaacaatagagataaaaaaaattagatgtaaattcgctgtaaaacaaaatgtttaaatttcttttccgttatcgaatctcttttatgaataacaaggtcgagtactcaaggtaaggaaacagaccattagaaaagtgccacgtcagcttatttcgttcttcacttttagcttctgaaaagtactttacctgaactaaaacgacggtgacagactgactccagtagctgctaacagtcgatttttaaaatattatatttatttgcaggaaaaaaaaaaagtgaaggaagaagaagaagttggagaagccaagagcaaatctaattctctgactactctcattttcatgtcggagacttgccgaaatctaaagaatttcttcaacggagactgaaaagctttctcttttcttctttcgttatcttcgttttagtgttttcccctttgcttacatttgaagaaatcgagagcaagcgatagaaagtgagagagagagatg

SEQ ID NO: 23117 - DNA, 3003 bp, Unknown
  misc_feature (1)..( 3003): 2750-1469P.txt file - cDNA_ID_2131101; gDNA_ID_1620363; Annot_ID_154726
cctttgcttacatttgaagaaatcgagagcaagcgatagaaagtgagagagagagatgtatgtggtgacgcctcctcaaagatccggttttggatccgattgtgatttacgggtttaccaaacatggaaaggaagcaatgtgagttttaatgtgaaagctttaggttttggaattacttgcttctgtgtttatacttgagctagttttctgttatttttcctattattgtgtataaattaattattaatccgttcatgggctcagtttactctgtttccaatcttgtaaagcttaaaaattgggacttgggtttgtgttagaagtgtagctttctgggtagttgtctacatttaatcatgaaatctttacctttaatcaataccttaggacattatctgaatatgcttgctacatttataggaatgcttcttcatacaaaggttatatagttgatgctgtctgtatattgctttcaatgtcgaatttaaatctggtttagtagtaacctagtggaattaaacattttgaggtttgttccttaaatccttctacccaaagtgttaacatattttctaaatttgtcccatttctgcagatattttgtcttcaaggaaggtttatcttcgggccggatgtaagatcacttggtctgaccataagtcttattgtggcacctgttacaattttctgcatcttcgtcgctagcaaactaatggatgacttctctgatagttggggagtctcaataatccttgttgctgttgtcttcaccatttatgtgagtacaaaagtttagctttgcattgtaaaacgttttgtgactggatcattcataacaattaatgcttccctcaggatttgattttgctgatgcttacatccggaagagatccagggattatcccaagaaattctcatcctccagaaccagaagttgttgatggcaacacgggctcgggaacaagccaaactccaagattgcctcgtgttaaagaagtggaagttaatggaaaagtattcaaggtcaagtactgtgatacttgcatgctctatagaccgcctcgctgctcacattgttcgatttgcaacaactgtgtagaaaggtttgaccatcactgtccttgggttggtcaatgtattgctcaagtaagtttctcggtttttcgttttcctgtccgttagtttctgacatcagtctatataattcatctcattctccttgggaatttgcagagaaactatcgattcttcttcatgtttgtcttctccacgactcttctctgtgtatatgtgttcgccttttgttgtgtctacataaagaagatcaaagagtccgaagatataagtatcttgaaagcaatgctcaaaactccagcttccattgctctgatactctacacattcatatctacattcttcgttggaggcttaacatgtttccatctctatctcatcagcacaaatcaggtaccctaatcatttgcctctttctgaaaaaacctctctcattcgatatgcgtgtttaatcgtttgatctttctttattctgtagactacatatgagaatttcagatacagttatgatcggcatagcaacccacataacaaaggagtggttgataacttcaaagaaatctttttttctccaatacctccttcaaagaacaacttcagggctatggtaccaagggaaaatccaatgccgtcgagatcagttgttggcggttttatgagtccaaacatgggaaaggccaatgatgatattgaaatggggaggaagggtgtttgggcaatggctgaacatggtgatggcaaagatggcaataacaatgaacggtttcatgttaacgacaatgagttaaacgagttatcaccagacatggggaacatagtgaatggtgatgagcaaatcaataggccaaacaatcacccgaggaacgcaaactgggaaatgtcaccagaagttatggccttatcagcaagaagagcttagaagcaggttaagagaaaattgaaaggtgttttaaatgtttgatgtattgatgtgttgtgtgtttacacgggaatcaattgtgaattggtgtgatattttcagatgttatgagtatttttagttgttcttcagacatttaaatcgtaaatcattgtgtgttagtgtaatctatgacttatctttcacagaatgagaaaacaaaatgaataccgacgattttcatactgtactttgcatatgataaaaattgcagaaactgaattttcagacaagtggaccagaagaccagacaactcttattatagtcttcattgaagcacggctctgtaataaatgcaaaagagctctaaaggcttcttatttgttcttcaaagctctaaagtctaaaggttagagatttaacatcacaagccaacatttttggtttaggaaattgaagattagcaataatataaagtttttttggcattgaacaaagacaaaacacaatgaacataatcaacaaattggtcaaactaaacattaataagtgcctcaaagtatcagactaaatcattttcactaacatttatgaaaaaataactgttattaactgaggacgaaggtaactgaccagtcaaacatcatagacaaagacaataaagagagtcaatagcattgttcataattgttatttgtatgcacatgttataaattatataaaaagactaaccttatttcaattgagatgtcactattactgttttagcatcctcttctactctttatttagaacctttagtaccttaccatgtgagtgaagagttcaaaaacctctgcaaaaactttcttttttatctctctctcttctttaaacttactttcaaacactaaatagccaaaacttaagataccaaatttcaacaggtcggctttttcgtttgtcttctcttaagactttaccaaaagagatttgtggtttctggagttgactttggttgattttggtgtatttacaggggaaaaaatg

SEQ ID NO: 23118 - DNA, 3000 bp, Unknown; identical to SEQ ID NO: 1138
  misc_feature (1)..( 3000): 2750-1469P.txt file - cDNA_ID_2131128; gDNA_ID_1620363; Annot_ID_154732

SEQ ID NO: 23119 - DNA, 3000 bp, Unknown; identical to SEQ ID NO: 1141
  misc_feature (1)..( 3000): 2750-1469P.txt file - cDNA_ID_2131145; gDNA_ID_1620363; Annot_ID_154738

SEQ ID NO: 23120 - DNA, 3003 bp, Unknown
  misc_feature (1)..( 3003): 2750-1469P.txt file - cDNA_ID_2131157; gDNA_ID_1620363; Annot_ID_154741
tttcactttaccagccttgcacatcccttgaatgatgatggtatatgtaataattccaatatccatctctctctttcgcatatcctcgaataccatcaaggctttctctagcttcccattataacatagaccatgtaacaagacgttgtaagtccaaatattgggagcgacaccatccatttctctcttttgcatatcctcaaatatcatcaacgctttctttaccttcccgttataacatagacaatgtaacaaaacattataggtcctaatattgggaggcacgccacgagaaaccatatgactaaaaacttcttgggcgacattaggtttgcccacttgaccaaaaccttggataagagtagtgtaagtgatagtgttcccagtcaatcctttttgggacatctcgtagaagattttcatcgcatcatctaccttcttacacttgcaaaacccgtttatgagagaagtataagccactacatctggaaaacaacccttggtttccatcaaataaaacatttgtctggcctcatctacacaaccttccatgcaaaacccattgatcaatgaagtataggtgaaaatattaggagctatagacatacgaatcatctcattgtacaattcttcagcatccaaaaactttccttctttcacaaacgcatcgatcaatgcattgaaagtgattacatcaggtttgattttcctcttcgtcatacccctcagcaatgaatcagcatctctccatctaccagagttacaaagaccgttcacgagagaggtgtacataacaacatccggtctaatcccgtagttttccatttgatcgaaaaggctcaacgcgtaattcacatgcccgtttttgcaaagactatcaatgattgttgtatacattacaacatcaggtttaatccccatctccaccatctgattcaccatagacatagcctcctccattctattcccgagacagaacccattgatcagagaagtaaacgtgacaatatcaggctcaaaaccaagtttcatcatcttcccaagaaaagatgaggcaagataaggctgagaagattggcagaaacaattcatcaaaagattgcaagtatagagatcatgtgaaactcccattatctgcagatggtcgcagagattgatcacaacatcaaacttcttcattttggcaataacattcaataacttagtgaaatcgataattgaaggaagaggacgagactcaaccatgtgagtgaacaaatcgagagcttcattaaactgaagagagtgaagaccatttctcaaaatctctcggtaattacaaaaagctcgaacccagaaactaagatctaaaaggcggctaaaggagagagcttttccagaattacctttcacaagacgatttcggtgaagttgaaaaaatctcatcgccattaacgcaaatcccagacgaaattgattatgccgttgatcgatttactacaaaagctacaaaaaagtttggatgagatcgaaggtcgttgtatttaagaagcctaattttcgtttacttggaagatacgaagaagatgaaatttgagatttgagtaaagaagcggcggaagagaagatggcgaatatttgtacacgtgtattggtttgacttttgtataatatcgttgacttcacgtaaccagtctacaacgaccggttaactaaatcggtttgttcatttacagatccctagaccaagacttcatgttatgcctgattgcgatcacttgcagaagaattcctcctattattgaaaggaagtataaattgaaattttgtctaatttggtctcaattttgattttagttttggattgtgttctttgctattcaaaattcttaagagtaatttggtctcaacaatatcttaaactttatatgatccgatttaatccaaaccgttcaataaaattaatttctatcaatctaaaccgttcaacaaaaataagtaaataacaaccaaaaaaaaattaaacacattttaacacattcctcttatcactagataacaaaaaaaaaatctcaattattatttagttatgtttgattaaaaaatttatatttataagtttagtatatcaaatttattcaaatatttagtataaaaactaaataaaccgattgtacgcggtaaactgcgggtataattttagtataaaaccaaaaatgaaaggaaagatcttcacaataattaaactctatggcttaagaatcttattaaacgctaattccgtaagaattatatgaaacgctaattcggtaagagtttagtaaaccagattgtaacaaacgtgtaaatatttttctggttatgaattttttaatgaaccggattaaaccaggaattaaactgtgcgtttaattaaatatgaatttaagtactcaatcagcaaattggtattgactcaacatgatggacataagaggtttgtgacttctcataagagctttgtattttattgatttgaacacttttcttagtagtaaattaaattcatggtcgaatctttgtttatatatgagtagttttatcacatagccgtaccttgcctttggttggttttgttctgcttttctaacgaaccatattaaaaccatgtatttagttatatattaaaaaggtttaagtataattaaatagcaagaagattaccaaatccggcccaaaaaaatggtagtgactcagcttgatcagagagtctcaccaggattcgaatagggatattgatattcttaacttaattataaattatatttaggacaaagaactatatcttaaatcttaatagaggtggagctatggagtgacttttgggcgactcaatcaactaggttctcgagtgagatctcttttcacaaagagcccttatcaacataacccaagactttaggtgaaagtaacgcgtaccacaaacaccggtgaaaagaaacctatatcttaagggtttgtgacgtgaatatgatgaatccaatg

SEQ ID NO: 23121 - DNA, 3000 bp, Unknown; identical to SEQ ID NO: 1143
  misc_feature (1)..( 3000): 2750-1469P.txt file - cDNA_ID_2131161; gDNA_ID_1620363; Annot_ID_154742

SEQ ID NO: 23122 - DNA, 3003 bp, Unknown
  misc_feature (1)..( 3003): 2750-1469P.txt file - cDNA_ID_2131219; gDNA_ID_1620365; Annot_ID_154801
cataaggatcatcaccaccggtcaggaatgttatctcgtcttcgctaatctgaaaaccactcaacaagacttgtgtcatttttaagtactaagaatgatctgatctttcactctagcgtaaaagattatacctttataacatcagctaaattccagatactcattatctctttcctagcagcttcttctgatggccacaacggcaatctcaaattcgggtcataagataaaagactccctgcagccttagcgattttcatagctacaagctgagtagaacggcaaggttcctcaatcaaactgatagatccgtagtgaaagatcttggcctgtaattaaacaaaatcaaaccattggacttagtctcattccaaatgtggatcaaaagatgaaaaaaatctaccttttggatgaggttcttgtcaagctcagattccaaaagaagcatatcagcactcggatgcctgaagaacaaaaactccctctctccatcacctcttagcgtaacaaaggccaaagcagtccgtgcattatggtcgaatctcatcccagagttgtcaacattgttcagccttagaatatcagctaacattcttccaaactcatcatcaccaacctgagttcataaacaaaacttaaaactaagattggattcaaaacaagagcccttagattgatcatcaatggtaaatcaaaatcagacctttccaatgaaagcagaggagccaccaagtctagagacaccaacagctacattagcaggagctcctccaggagctttcttgaaagctggtgcttcagccaatgaaacacctcccaccgtaggaacaaaatcaatcaacatttcaccgaaacataccacaagagtttctgaatctcttgtgtcgatcgttagattcttgagattacctattaccaaaagagatgaaaaatcaaaactcgaaatctaacaacttcaaagttcctcgattcaaacacttgtcgcatgtacagatttcgttcttcagcagaaacaaacagagatctatctatagaacaaaaccccaagatgatatatgatcaaagaacaaaactttaagccaaaacaataaaaacagatacttaattccatgaaaacgaaaaacccaactcgaatccagctttataaagatcattcgacagcgacagatcaagaacaaaagaaagaaagattttaaaacgaacctgagattgcatcctcacccatttgagatcttcggaattcgaaaagacgaaaacggaaacagaggggatctacgaggaacagagagaagaattcgagagagcgagagaagagaaagatttgaaaattcgtgtgcttttattttgttgctaattgttagtagagatgaagagacgaagttggttatgtattagtaaggaatttatgctgacgtcatcaaatatgtggatttttccggtctactatgttacactcgtgtgactacaaaaaaaaaaaaaaaaaaaaaaaaacgttagatcttttgatgtcataaagaaaaaaataaaatttatttttcgtatatggaaagaaacaaatgtcaaatagtttgcaacgtgttacttaccaaaaatataaaaaaaattgcaacgtcttctccaagagaaaactttaaaacccttctgaattttatttttttccggtcaacactgtagcttttaatgttttttgaatcgtaaattaaaacaagaattagtaagctaagatttgtatagtggaaaaattgcgtgcttaatgtgtctggcatgaaacatgatttggatgttatttattttcccgtaaactacgattagaaaaagaaggagaatcgtcgttctttgagtgacaagaaagaaacatccgtttttgattctagttgttatgtctttgtttatttttcttttacatttttatgagataataataaactacaagttgatggttctttattgaaagaaatagtaacgaaagcagaattttagacttggaaacgaagtatggacttgctactagagttgacttgctgctaagtgagaatgaagaggtggggttggtattttgaggattgtgtctaaaagtcatgacgaaggaatgcatgaattttgtcgatagattacatgttttgagtattagatattattatatcgttttaaagtcggttgtttattgttatgtctttaatattggagtgtgagttgtctaactagatttattttctctactaatctcggtatggtttcggttaactcgtggacaaattggttgttggcaggagaggaatttgggcttcaataagtttgaggaggcccaagatagtagtcgaaactggttgttgagcccatgaaaatttgtgaagctaccaaaattaatattccacaagctaccaaaatcacaagaattttagtgagatattttagtgtcgccatttgcaccattcaacttcttgtcttagcaacacaaaaagattcgcgatattttagtgtcgcgattttttcttgatatggagatgaagaaatcattaagcatatgcgaaacggatgcttaataactttcatatcaaaactgttactacgttcccactcaatttcactgataaaatgagtatatgtatatatagaagtagtttaaaatcacatttattttgcggaagatcatgccattccacgagctaccaaaattatcagatcttttgttcttattggagtttaacgcattagacatttaatttgcagaagaccatatggccatgctacaagtaccaacgtttttattgcgacagaccaaagaatatactaatcgaatcagtgacgtgtaataaaccgaggaggaggaaaaagaaagtgtaaagataagcgaagcaagtacatgtggcagtcctaggcttccgagcaactcaatatctcttccccagatcctcctctctcttcttcactcttttaacggacacttttcactgatctattcactcactcaaatcgccgccggagctaaatcaatcaacaatg

SEQ ID NO: 23123 - DNA, 3000 bp, Unknown
  misc_feature (1)..( 3000): 2750-1469P.txt file - cDNA_ID_2131243; gDNA_ID_1620365; Annot_ID_154809
ggttctgtagttgaagaagttgagagtgttgttactaatactactggttgtgatgaatctaactttggattcactgatcagtctccggtgcctctttcatcgccggagatggtggagcaggtgcctatgacgtcaccggagacagttgtatcggtttctccggagatgggggagaaaggaagtgtgttggaggttggtaatgtggtgaggagtaaagattggtggtggaagcaagaagggaatgttggaagagggaaagggaaggagtatgtgatgcaatggattggttctgaggtgaaggaagagagacagagtagtgattggattgctgagacggcggaaggcggtaagaaagttgagaagaagaagagtagtaagagattagaatggtggctttcgttggatgaagagaaggagaaggggaagaagaagaagcggagaatggtgagagagtggtggaaagatgagtataggaaagagcttgctaagagaatgaagaagaagaagaagaagaaaactttggagtctgagttttatagtgatgatgtgagtggaagtgtggatcaaaggcggcacggggatggagaagtgtataggaagaaaagaagaggtgttagtagtaacagtataggtagtagcatagactggtggttagatgggctaagcggtgaacaatggagagcacggcgtagaaacagtcaagattcagttaagagttgcggagtcagtagcacgccgagcatgagagggacgatgtgctatgttgctcctgagtgttgtggtaataacatagatgatgtgtctgaaaaatctgatgtgtatagctatggagttttgttgttagtcctggtttcaggacggcggccgctggaagtaactggacccgcgtctgagatcatgctgcgtgcaaatctcatgtcgtgggcgaggaagctggcgagaagagggagactcggtgatctggtggatgaaaagctgcagttgttagaccaagaacaagcggttttgtgcattaaggtggctttgcaatgtctgcaaaaatcaccggtttcacgaccttcaatgaaagatgttttagaaatgcttacaggagcgataagcccaccggatttgcctacagaattctcaccatcaccgcagactcggttcccgttcaaggcacgaaggaagcagaatcgatagagcggtttctttggtggtagatgtgtgttggtttatagcatttgtcctacaacactgtctttgttagtgatgttttagtgtttgagccacttatatttgtttgcacaacggtgttttagcttcgtatatctgattatgattaattattgtagtttagtgatcattttcttgtaaaactcaacatcaatttttgctagtttttctcgtagatttatgctgaatttgcataaaggatgcagcatatgaagagtattctgagatttgatataaaaaaatctgttgaaatctctaaaagtcatatgtttgtacaggatcctcgttattgggcctattaggaaattatagtggccctaatctagtcattacgtcttatacacttggttaggactggccctttgttgaatatcaaaatacaattggtctattgggctttggagaacgttatatttctaatttttttctaacattataaattcatgaaaccactaacttttgggcaaagccggtcttgaagatataatttttttacgacaaaaaaaaaaaaaaaaagcctccaagttaaaagaaaaaaaaaaaacatgtacattagtgagttttgaagagagaaaaaggatataatggtgggaggggtaaggtgattattttcaaaaagcttcaaaaacacgatttaaccatattggtagaaataaaatcatatgaaataacttttggccatgtttacatatctttcgttcgtatagtttttcataacgattttagttgtatggttaaaattagctgacatttaccatctataaataacatatcaatgtcgtgctggtataaacctttactgtcccacaactaccaaccatacaaatactaaaaagaaagtgtcaattatcgcataatttaccacgaacaatcacttttcaagtattttattttaggttgtatgtttgtttattctttttcaagaagtgattttcgtggaagttttagttatatataagctctatagcgttaatttcctgttttgggctcataggtgtggttcatgcgaaataccgactaccttttgccaaagatttgtaaaaccaaagtctaattgacgaaaattaccaccacctcaccttgtaagaaatggcttaataattacagtcgtactgtttaaaacggtatatcattgaatattgatgcctttcaaacgaattttgttgacatcaacaatacgttgattatatatcattttgagtatattttgttaaaattttaatgcattaattaaaaagacgataatatttaaaacaatttcaacaaaacgaatacttgttacataacatctaaccaaccggataatttggtcgctaaaatctttgttttttagtgaattgcatgtgcaaagtttatcttgagaatttggaggatgtcttaaaatgtagaatggtaataagaaaagagtaagcatgtgatctcgatcggaatagaacatcacatatttgattatattattaactatagaagaagagctgatgaagaccatcactgcgtgcgtaccctatcaaacgtatttttaattctttttccgatacgactaaccaacgtatcttcttctctctattaaataatattatcaaaatatctttttttaaattaatttgctcaatcttcaagactgcaataatttttcaactttacaacaaagccctgagctgttcttctaaagactaagatcacaaaatccgcataagatcagatcttgctgtctcatcttcatcatcagaagtagagaatcttttaaaggaatatttacttttattaatttaagaccaccagatg

SEQ ID NO: 23124 - DNA, 3000 bp, Unknown
  misc_feature (1)..( 3000): 2750-1469P.txt file - cDNA_ID_2131255; gDNA_ID_1620365; Annot_ID_154814
atacttagattaagtgtgtcactttcacataatcatcaatcatattgatatatgcagatagactcgtctgataatttcgaatgtccaacgcaaatagaaataatagttttctttatacttttttttgtaaactttcaaatcatatagtaataaaaaaaagcatactaaaacttgataaaacaatttttaaatccataaatagtttgtaaaaaatataaataatagtgaaaaaacattttcttttaattctatttattcaaagcaaactcttccattttgtaattaagtccattaccttaattacaatggaatccaagcaaacaatagaagaaataacaatggaattaatcaaagagaaatttttgtacaaatatctatttttatccagtttaactaatattttattaactttaaatcttaaagcccatgtaatattgtaaatgaaaagacaaaaaaaaaatgaattaatataaaaaacctataagattatgtgttttacataaaaatcttaacataatttctaaaatatgtccttaactctcttttgatgccttaagtcattgcttgaatagcttttgcaatggaccagtcttgtaagcacatccgctcaaaccatatgtttttttgtctttgtaaagataaatccctttaacatttacaattgagctgaaatgctcaaccaattatagtttaatctttttttcgaaaagagttttaacaaaccatcttaacatatgttgtttacaaaccgttggtagcacgtcagagaaacattgggtgaccacaacaactctttagcaaaagcaaactgaatgattgcacttttgctataatcattctttttgtcctcatcaaactcaactccaacaaccagagcaactgttttgaagaactcatcaatagctgctctgtcaactaggggaccagaccagaagcaagcaaaacatcttgtagatagtattcatctgttgacgaatcatctgagctagatgaactccaaggttccttggtagaaggttcttttgataaaggaaaaaatcgcaagtaaatcctcctttttgggcatcaaactaatggacataacacaaagttcactataatttcgacacagtccacatcttttttgagagaatccacaattagtttgatagaatccatatcaactttgattaactactggttgcagttataaattttgttcaatcgtaaatttaactactatatatacggttaaaatggttgtgattaaatacagttacgggtatagagattacgattaaatacgattacggttattagtgattatgattaatatagtgacgaaatcttacgaattatctaactttatatagcattataacatatttattttagaaaagaccattttgtgacgtaattgtttttatatgcgatattttttttgaaaacatttatctaaacgttagatattttttttgcattatacattgttttaattatatttttaaatttttaactatacggtaaataatacggttaactaacagtttgatatgtttacggttcacgtgtaacactaaaaccaaaaattataaaacaatgtgaagagtacaagtctaatctttgtatgaaccgagcaaaattttatatcaatacttttctcctaaaattgagtctacgagtaaaactttgtatgaactgttttattgtaatctattttacggttagtggttatactaaactattatgatttaacctgtggtacactacggggcaaatattttatttatatatataataatataaattttacggttttcgtttattattaaagttatataattttatattaatgttgtaactaaaaaaattggtgatgataaaataataaaataaatatttaacatgtgttatatcaatccaaacccgttctgctattcatatcaatctaaatccgtcccgttatattttttgtctcatgattttttagttttgtataagtttaaatattagttgttgaattagttgtgattgtgattttatgtcgaaaaagttatggacttttaatttcataaaatatttaaaccaagataaggaatgtttttaggtgcacatataattgggtttgctcattttacgggattgtaaatgtattttggtttgtttcacaatatttgctttaattgtttgcccaaatttaattgaaataattcaaatagttcaaattttggttgttttaagatttagtgaatattgtaggtgagataaggagaatataatttattgtgttttgcgtgacatatgggattgccatatatttcgaatctttttggtttattatacaattatttgttttaaaaatattcaaactataattagaaaaaattcaaataattaaaatccagtaacagccattataaataagtctaaactcaaggatttattttacaaaatggctgcaaaaatgtatatgtagattattcattaaacccaaagggcatataacgcgacaatatcaacagcccaaaaggcccactaactgtttgattatagacaaagaagagaaataaaccaaaacaacacgtgtacaaacgtggaagcctctgaaagctgcatcgaaacttcacacacctccatcaccgcctaaattatcatcgcaggttttcgcctatcgaatgctgatgttacggttataattttttaacacagcagctccagaaatcgatttgaaaaattattttttgtttgttgtatgatctgtcaggaatagttgaattaaccctcaaaccggccggttaattgttctcgggagcgacaataaaccgaattttaaactgaaaaaccgaatctttggccggttatttatcaaattgtaccggaaataaccgaatgaagccctcccttaaacgacgtcttcttcttctttctcgaaaattcgccaaagcttcgatccgaaaacttcttcgccaatcttccttttcttctcacgaatttctccttcaagctccgttcccagcaatg

SEQ ID NO: 23125 - DNA, 3000 bp, Unknown; identical to SEQ ID NO: 1169
  misc_feature (1)..( 3000): 2750-1469P.txt file - cDNA_ID_2131349; gDNA_ID_1620367; Annot_ID_154870

SEQ ID NO: 23126 - DNA, 3003 bp, Unknown
  misc_feature (1)..( 3003): 2750-1469P.txt file - cDNA_ID_2131363; gDNA_ID_1620367; Annot_ID_154873
tattatgcataccagatagaaaagacataaaaacaaccagaaacctttgaataaaagagtcaaatgcgatcttaggcagagccagaccgagtagaagaaggctacaaggatctttgcacgcagagaagttggagacccataaaaagcaacacaatcatttcaaactcgacccgttcagcagcttagcattcaacgctagctcagcgttccgtgcagctgataagcttgaccaaagccattttgtaggtacagctttaagtagctgttgtgatgcgttttgaggctgtgctaagaaaacagtgaaatttagacatctcataaggtgagcagccaattcgaactcactgtgacccgagaggtctcccacgatgagcatcaagttatctatttcaggattgccaattgcgcagcaaagaaagtctacaataatcttctcaagtctggcatctttatccccgagtggcctgagatgtctcccaggatcagcacaaattttgtttgggaaggtgatctgattgcccggcaaagaaattccactaaaatcttgctctgtctggtacgtctgtctcctgaaaccatattatcaactcaggatcaacaacaagatacatacctatatatatatgtaaaagatagagagagtgtgtgtaattgacctaaaggggagcacatcatcccgattccagcgtgtttcgtggccagagagtaatcaccaaaaccggtgatttcgcaccttccaagatactcaccattattcgcaagggccattctcatgttccgccaaacagcctcagcagtgagaccatcagggaccgggcaatcctcgacatcccaaaagaagactgtactatgccctcctcctaggttttaccatattacaaaactgattagatcgactaacttgctatgaaagatcgatcacatcaaattccaaactgcatcacaacagatctaacgctttcaaggacaaggagattacaatttccagagaaaacatatatatcttaccgctgaacttaggcatcgttttggatcggtcgagaaaactagatgcttgcttgctgaagattaaagagagaacaaggttggcgctaatcttcttctttttatgtttctcggtagcggtgtcaagtgggccacaaacctacgggcttggcccaataaatgggttgttgatgtctgcaaatcttagtaaaacggtaatattccgagtatgatgtctagggaagacaaatttcaaatccatgaacagaatctaatccaaataaatttagccatcttaaatcttaatcatactacgtatattgttcctaatatatgtaaatctccaaagacgtaaaaaaagataaggaacttaccggggtcaaaatattgtaatataaaaccgtatatttctctaaatacttagtcttttatataacatatcacatttaaacaaaatttccaattacagatttttaaatgatatttttatcatcatttaaattaaaaatatttggttaatttataaacataataaatgcgcatgaagaaaaagaaaaaaaaaatcaaaataattgaattatgggttatgaccaaggaataaataatactaaaaacataaaaagagatctaaaagaaggttcaaacttgaactaggtgggtcaagtcatagagatctcaaccaaatgagccaattgacttgaaagcttgcaaacaatttaatttatatattttaattgatgtcagttgacctttttctttcaacgtgggtttacttgtggttgcatcgtttcttgaatgtgacagaaaaggatcggtaaaccgttttaaaggacaaggacatatctcgtcaaaaagcttagagagtacctcacgatctctctcacttatactttccacattttgagagattcacattttcttagttatcctcgataacaacttactgcaatataggagaccaatcaaatcagcgcaaacaaaatagtataagattatgtttgtgtatgatttgtacaagacatcaagtaaacttatagattgtatagatcaagctgatgataatttttggcagatctgtgcctagggttacggatgccaaagacgatgtttttcaaaaaaaaaaatgaatcaaacataaatccaaaatttaacctacctaatattgataaataacaaatgtgtaattcaaaaaagttcacttgtgattatagattaaaaataataaaaaaaaatcaaaaaaaaaataactttaatcgtgaaatcgtcataaatatgatctttaaaaaaaaaagatgaatgagttaattatccttaaaaaattgatatcttagtctctaatttaaattcaacatattttttttttaaagccacttggctctattaaagtaaaagctctaagttttacatgagcttaatattactatacaaacaaaaattaaaaggttttaaatgttgagaatttttgagaaatgctttcttggtgtgtgttttttcttcaaaaatatttctttgagatgtgcattttcaaaataaccctttttagttaaatttgaaaaaaaatatataaagtctataaggtttttagaggtgaaatttggagctgtgcacttgaaacggtgcgtttacattaattggaaaaggaatcgcaccggtgatgcgataaccggacgttaccaatcgaatttccgataaaacagcaattttcgaaaccaaaccggttttgaacgagcaaaagcttgaaaacgccgcgttttaaacagtttctcgaagacgcattatcggttttattttaaccgaacaccaccactggttcactatcaaatactaattatgaagataccggtatctttggaacggtgtttttaaaatgttgttattaccggtgatgcgagaaccggacgttatcaaaaattccggtaaaacagcaatttcaaaaccggtttggttttgaacaagcaaaagctcgatgtccggaggaggaaagagaccgttgtagatctgtcttcttcatcgaagatg

SEQ ID NO: 23127 - DNA, 3003 bp, Unknown
  misc_feature (1)..( 3003): 2750-1469P.txt file - cDNA_ID_2131378; gDNA_ID_1620367; Annot_ID_154877
tgacacatcacgcgagtaccaacctcgagcggaagcacccccattcttctcttcttcgaagcatccgattctgaattcgtgagagcgagtatcgcaccagaagtatgattctgattcgcatctccgccgttggttgccggattattatggttcgacgccggtgtggcgattatcatcgccgtctctgtatccgcagacgatcccatttctttagtcgggtcggagattttttccgggtggattcttttctcatacggataaagaacatcatttggaaggagtgtggcccaataacaactttgaatgctcaattgggcctatctttataattggcctgtactatatgtctctcttaccgtcctttttttttgggtgcaaaaaatctcttaccgtcgttaatacacgttttataactgttggcttatgtttagttttataatcgccaggttacatttaaagaatgattagtaggagcaaacaatttataaaaactaaagagataatgagagataaataataagtgacagagtcagtattttgtcgtgaatgggaaacagccaaacaaggctttatgattcgtactaatcacaagattcacagatcaaaaaatcacaaagttccaagaagcaaagacgaaaaacacaactcatcatcgtgtccttgaagttatggtcatagattcgcacaccatgttcctctagattaaccaaaatgattttttatgaacaaaaaagattcacatggtcactttactgtatcttgtatgtgaaattttacatctcatttttcttaaagaatgttttacttttacatactatcaatttacttttatttttcggttatgaattgaagtggatgacttacttacttttgaaattcgaatgaagaaaaatagaattgattcctatttcagttgttcacatgtaaacacgttatatacttatatggcaacttgactaaagggaaaatttaaataaaatgatttaatttggtgacatatattcatctttctaatttttgtagctactacacaccgtgtatcctttttcataataatgatgtgaaattgtataattgtaagaaaaaatgagaaaagagtgacgaaatctttaaaacagacagaatttttttggttgagcaaacaaaacttagttatcaaattttggaaataacgtgttgaagtggctgattcttttacctacaatgattgattcatcgacaaatatcttgttcgtatatcatcaattctaaattcttcaaaaataaagtaaagatactcaaatgtaatgaaatgacgaagctggaaaaacgtattttaatttaattcattatttgaccaacaatttgcatcatgtgaatttaaatcttgataggtcaatattagtataaactaccacactacatgcgaaaatcattcctcatttagtgcaattacaaatgataaacggaaacgttatcatttgtatttattttgtaaaatatgtaattcaagaaactgctcagaatataaagacaagaatcctctttcttccatctctatctctccgtaaacagttgctcaaaaccttcttcctgaaatggcttcttctctcatcttcctcctcctcgttaccctaaccttttcagcatcaaccctaatctcagccaaatccaacacaacaacaataatcgaatcaacttgcaaaaccacaaactactacaaattctgcgtctcagctctcaaatccgacccaagaagtcccacagccgacacaaaaggtctcgcctccattatggtcggcgttggtatgacaaacgccacctccaccgcaaattacatcgctggaaacctatccgccaccgtaaaagacaccgttctcaaaaaggtcttacaagattgctccgagaagtatgctctcgccgctgattctctccggctgacgattcaagatcttgatgatgaagcttatgactatgcctccatgcatgtgttggcggcgcaggattatcctaatgtttgccggaatatttttaggcgggttaaagggttggcttatccggtggagattcgccggcgtgaagctagtctgagacgtatttgtggtgttgtctccgggattcttgatcgccttgttgaatgatttacatttgcattaactactttcgtaaaatctctatttaaattatcgtatttcatgaatttaatatgaccgttactttattactttcgtctttgctacaactttcaaattgccaagaagaacaatctttagagatcacctgaatatttggaatttaatatttctcaatcaattgactaatcataccaaaaattttaagtgacgaagatttgggggaaaaggcttcttaagaaatgggaagtactagagatatttgtatattcgttatatatctttaggtaactttttgctttatctgtatgcattatacgtgttatcgcttcagagatgttttacactttaaaaattgcgataaggttacaaaagtgtcatcttaaaagagaaaggtaacgtcgtctatatatttttttataacaattttaatgcagaatagttatcgacctcataaactagtactgcttttaagacgacgtcgactgctatgcgaatcaaaatcaaaagacgtatgactttttttaatatcattttaggtggaaacatttacataaattattgaaagtgaatgttcgtaggtcattgactagtctacagttttcgatatcagttcaaataatcgactcataattgaactaaaagcatcaaaataattaaaccatatacgaacactaataagaccggttttagaataaaccggactagtcggtggataaaatcgtcatttgacacggagactactatttcgcgcccaaatgatcccagaagacgcgcccagagtgacagtccttttagttattcttcttcccagtaatccacaaaccctagaaaattttctcaagaaaatccgaatcacgattctgggcattgtggaggattgacaaaaatg

SEQ ID NO: 23128 - DNA, 3003 bp, Unknown
  misc_feature (1)..( 3003): 2750-1469P.txt file - cDNA_ID_2131382; gDNA_ID_1620367; Annot_ID_154878
ctgtggtgacgagtgttgttctatgattattttgcaggggaactacttgcctcgggagcagacggtatgcctcagaggcttagatgcaatgcaagtgtgttttgcatattttgaatgagtagtgaaaccaattgtgcagttttgtttttgttatgatgcaggaggtgagctttttatatggaagttgcatcctagtgaaaccaatcagtcctggaaagttcacaaatcattatcgtgagtcctttcatctaaataataagctacgctgactgggcttctaagagccacggttttttgtgtttgaatactgttgctctatcaagaagggagaatgataccttaggctaatttggtgaaatgagaatgaaagtttcaccaaaattgcaactgtgacccaatcgaatgtaggctaagagatatattttgacttttgtttgccctgctagatttcatcgaaaggatgtcctggatcttcagtggtctcctgatgatgcatatcttatttctggctcagtggacaactcttgcattatatgggacgttaacaaaggtgaaaaagtcaaagtgtagatagttttatttttttgttggctccagctttcctgcttctcacaattttgtatttgctaaaaggttctgtccatcagatactggatgcccattgtcattatgttcaaggtgttgcctgggatcccttagcaaagtatgtagcctctcttagttcagacagaacatgccgtatatatgccaataagcctcaaacaaagagtaaaggtgttgaaaaaatgaactatgtttgccagcatgttatcatgaaagcagatcagcaacggggtgatgaaactaaggttagagagaaaatagtttcttccagattcatcacggatacacagtattcctaatttcaaaatgacattttatgcagacaataaaaacccatctctttcatgatgagacattgccgtctttctttcgaagattgtcatggtcacctgatggatcttttttactcattccagcaggttactatcccttaaaaccattcttgtttttcagatagctgtgctagatcatccacattgtttactcgggcattattcatgtctctaacagtccctgttatcactgtgttgcatgtccaggttctttcaaggtttcacccacatccgaagctgtaaatgctacctatgtcttttctaggaaggacctttcaaggtaagataatcacctcaccatctcttgtttgaaagtcgtaaggctttgtggaacatattgtaatcatataagctcttctttaagctgagccaagtggccttaactggtcaagcttatgtatgagataattagaaatcagtacaaagtctcacactagctcaattcctttttccacaagcagacctgcactgcagcttcctggcgccagcaaaccggttgtagtggttcgtttttgccctgttgcatttaaactccgtggttcaagttctggtacatattatcttatctcacaccatttttttagtttcttttatgatagaaaagcaaggccttcatgacgttgatagttttcttaaatctgttacttttggtgatctcaaatggtgttttgaatcatgcagaagagggtttcttcaagcttccttaccgtcttgtctttgccattgcaactttaaactccgtgtacatatatgacacagagtgtgtcgctccaattgcagtcttagcaggtctccactatgctgcaataaccgatataacatggtgaaaagactatgcacattcttatagatcggaatggtttttctctaaattttcttagttttaattctaaccaatgatcttttggtttgttcaaaaggtcacctaatgcatcgtatctggcactgtcctcacaagatggctattgcacactagttgaatttgaagataaagaactaggagaagctgtctccatttcaggtttgctcttagtcctttcactcttgaaccttccagaacccgattgacccatcaatccaactacagttggaaagaaacctgttgatggtgaggagaaaaagcatgatttagagaaaggcgatgaactaatgacagaaacaacaccagacgagagcaagaaacaagctgaattagaacaaaacgaagagagcaaacagccattgccaagcaaaattaccacggatggtaaggaaaaagagcatattatgcagaaaaccgatgatgaagtaatgacagaaacaagacatgaggaagagaatcagccattacagagcaaagttaacacaccggtctcaaataaaccagcaaggaaacgcatcacacccatggctattgacccctgatgtcgtcattttccatcagtgttttttttttaactctgatacaaatagctttctcataggctacatttagacatcaaaatgaatcgtattgacggccatgttggaaatggacttgtttctttagtcatacgtctcgtctctaaaggcaatgtacatatagacacatgtatgaacgttcacatgagatggttttgcgtacattgtggatcattattgggctcgtattaatacataagttagttagcttggcatcaatgtctttaaggcccaaatttcatatatagctaaatgcaacaatgtcaagggatgttgtgttgatctttaacggcccgtttaattaattgtagaataacaataatagaccagtaaaagaaaacataattttaccctaaatttaattttctaaaccctttcttccataacagccgtaaaaaaggttaaaaaataaatcaaaaacccagaaaaaccaaactctctcatcgtctcaaatggctatggctctcaatctctgaatttgatcctctgtctctttctctcaatcagatttcaataattcttacaagttcaaattttcatttttcccagtttcaattaaatttgtataaacaattcccacctatacacacaaacatatacagaaaatatcttctctctccctccaatg

SEQ ID NO: 23129 - DNA, 2649 bp, Unknown
  misc_feature (1)..( 2649): 2750-1469P.txt file - cDNA_ID_2131411; gDNA_ID_1620367; Annot_ID_154888
cctcgtcagaatctttgagaacctttggcttgatggcacagtttcccatctcgtacgttaacacagattatgagaaaaaatattttctctctcttaatttgccttttatcttccgatagattagagagagaaatgctgaaaacgaaggtaaggtatggtcaaagaagagttatgtccgataaattctctgcggccatgaaggaatatagacagacaaagattttatatgggtttttgtggttaacctaaaaaaagacgtaatttgatttgttttatagtaaggaaactatagatataattaaaaaacctctaatcatagaaaacatagtaatcgaatatttattctgatacattagtatatattttatgatactgaatcgagcaggtgatattacgagaaaaaggaaacaattataaatgatttataattagtatcttcttctttttattttagaattagtatctttttgttttgattttataattagtatctctgttgtccttgtccatttgcattccacaataatataataaaagaacttccacataaacggtcatattatacgtggccattatattaaaaaccctcaatctgtgagcatagtgcaaatagtgatgttgttttattgtctgatgcatcatcataagaattaagaagtagcaagtaatttgtttaaaaaaatcggaaaatcgcatatgagaactacaaatacgaaatataaatctcggcccatgaaagataagatttgggttaaaggatgaagaatttggcccaaaatagaaaattgaaaagagattgatactggcccgtgaatgtgttggtgaatcgatgtgaaccggttttgcaatttctaattccatgctctgtttcgatatttaaatgttttgatacttgtatcaaatttttttggcagagtggtaaagtttctgaaggcaaacgagcttcaaaggtatatgagacctgtggctataatttgtgttcttaaaactctatgagctataagctattcaaaagctgaaaatttgagaattttgattgaagatcttgtggttgtttggtttgttcagattttggaatcatgaataggaagactattattattattataactttcgtcaattttgcttatctagtttgttgttgaatttcattaagctgaaaaagtgaaaatattgatctcaggactctataagatacacatgtacggttaaggagaagcgttctgatgctaaaaaggctctacacaatcttctcttccacaccaaaggaagtagagattttcttcaggtctgcagctttgaaatggcatccagataaacacccagggccttctcaggtatatatacatttaatgtcaaaaaaaggttttgcatgttttcttgcgatcatcttcagaaactaatttggtaaatgtggtggaaattcacaggagcacaagagaagttcaaactctgccttgatgcatatcaatcactctgttcttcactttcttgatcttttacagagaaacaagttgatgtcaaaacaatcttttgaatatcttttgaatggttaaatgtttttttttcctcttctaggttaggctcatgatagagactccaataggttttatatttgcagtggcatggtggttagaaatcctcacttgttatgttaacgaaatcatcattattttgatgaaaataatgtaagcttaatcctccaatgttttgacttttaaacatgcaacattatttgtaaaaaaactttatttgtcaaaaagcttcctccaaagtttttgacttttacttaaagacattatagataaaaaaaacaatttaaaactttatttgcaaaaaaacacttttatgtaaattatgtgaaaaacatgttgaacttatgacaccacaaaaactatggaccaaaaccgggataccaagtccagttagtcttcaacgtatttaaatttaatacttaaaattaattttctttctaaacaatttgattgattaaaaaattttagataaaaataaaaacgatttacttaacttatgacatcacaagacttaaggactaaaaagaagagatgccaagtccgattaattttcaacgtatttaaattcaacacttagaattaatattttttttctttataaacaatttcgttgataaaaaagttttagtttaaaatcaatacaatttacttaaaacattatttgtaagaaaaaaaactcaaacgaagtattaaatatacatgaagatgtgaaaaacatgttggatttatggaatcgctaatgactatggttaaattgcgggatcaaaaatccggttagatttcacgacgtcatattaatttagtatttatagaactttttataattaaaaaaaaaaagagttgaaaattttataacaaaaaaaaaaaaaatgctaaatatacatgaagatgtgaaaaacatgttggatttgtggaatcgctaatgaccacggttaaatagcgggatccaaaatccagttacatttcacaacgtcatattaatttagtatttatagaactttaaaaaaaaaaaaaaaaaagaaagagttgaaaactttataagaaaaaaaaataaaaaaatgctaaatatacatgaagatgtgaaaaacatgttggatttgtgcaatcgctaatg

SEQ ID NO: 23130 - DNA, 3 bp, Unknown
  misc_feature (1)..( 3): 2750-1469P.txt file - cDNA_ID_2131421; gDNA_ID_1620368; Annot_ID_154897
gat

SEQ ID NO: 23131 - DNA, 3000 bp, Unknown; identical to SEQ ID NO: 1181
  misc_feature (1)..( 3000): 2750-1469P.txt file - cDNA_ID_2131435; gDNA_ID_1620368; Annot_ID_154906

SEQ ID NO: 23132 - DNA, 3003 bp, Unknown
  misc_feature (1)..( 3003): 2750-1469P.txt file - cDNA_ID_2131445; gDNA_ID_1620368; Annot_ID_154908
gaataagaagatgaagaaaataggtcttcacgcaagagcacttggagaaaaccgtgagaaagtaagaaatgctttcaaaagttttttcaagaagtttggtggttatctaggaggtaaaactcaccgaagagaactaactgaagctaaatacaacgcggattctcacgttggtgctgacgtaaaaggatttgaatccattatcgataagttttctgacttctttaatggttatcttggaggtcaccgaagagaactcttttaccaagtaccagcaggcgaattcgccgatgaaaaaattgctattcatgcttctttggacgccaaagctcacggaagaaaaggaattcgaagggaactatatgctcaagctcctttatttaaaaatttcttcaatgttggatttggaggtaaagctcaatacgatgccgcgggaaagatgaaagtcgccggagatgatggattcaggtcactgaacagggcacatgttaaacattttgcttcgacagaagcataattttatccattttttcacaacagaggaaggaagccatgagttcatctttattaatataatgtgtttgtttttcgacaaaatacgaaggaagggaaatgccgtgcgttatttgtctatatgtaactatgtaaaagttgcaacatgtttaataaataacgttcgtatcgcatacatattaattaatgggctcactttcgaattaatagctgataaatattttacctatagggtgatcaaatccgggcaatgagtgaatctatctaacagttctatctacatcacgttaactattgatcattttatttttatttatttgaaacgatgacaaatcaaagagatttcatttgttctcatctatcatcattattcattactttttaatctttattagtcttaaccaaaactatcataaaaattccttaatgcatacaaaaaagagaatattacgtgattagacacttttttgaaagtttatccgtaattaggcacttaaaaatcattaggcactttgaataattaaaattacttgttcaccctcatatcgtcggttttctataaccaaacaaatcaaatccattttcactaaaccaattcagatttacggagccacgattttgtagttgcctttgtgatttaatttttttttccagaatcgtaaaaatccaaatccaataaaaaatcctaaattacaatttctcgaaaaggggactccggcgacgagatatccatctcctccgtcactgtccaccaccactgcttttcacactacactctcgtttgctctttcaaccgtaaaacaccaaatccaattctcttgtcatttcctccaaatctctgcaatttcttaaatcgatttggatttactttgcttgaaaaacccttaactcgtactgtccaaattcaatttcaatttcaattgaggttacttcgagaaaagttcaagaatttcggaacaactaaggtaaagttttgtcatgttgacttcagagatcttgttcgtaattctgtgataatgtttgataacttctctgcccagtttgtttgaaattcagtacttgaggttctctattggacagaagatgaacatatggactacaacacttggacaatccgtaatggacaaccacacattttggttgcagcgtatgtgtcgttacaaaattgaaaatcaatgtccacgaccatacatgactgcacagcttggtgtttgataattcaaggaaaaagccacataaaggttctatttcttaatcttacattttggaagaaatcaaatcattgatttaagaaataatatgtaagcttggatgctagagctttaggtgatcctgtggccagattaggatattgatttaacttttcttactgctactcaacattgattgtctggtattaagttgtaaaagagtaatttgacttatccatttgtgttgatataattggttattataatgtgattagtcaatagaaaaccttagagtacataatatcaaacttttaactttgttaatttttttaggcgagtgggtgaatacatcagttagacttgcttttgcacatcatgtgatcatcgtttaattgttatatgatcggacggtcattatttctcattaacttctatttaaactgcaaatcttaccacgttcatttgatccgaattaacccattattctacacgtgtttggtacacacaattacaaaccaaaaccaatgaccggttattcttttttcgtgattcagtttatttggggtataatggtctattttcactccaaaaacaaagaaaaatatctcaaccttggaaaatacctgttttgtctaaactttttcccaaagtgccttattacggaacattccctacaaaaaaaccatcgtcatgtactggacaaaatattcttcaagtttgttttcatgttgtgttgggccgtttaattcgcatgtatcccatatcggaccttataaacttataagttataaacattaaaatataatccatttgtcaatccttttttccactttttttaattaagataaatcttaagtattaccaaatcattattaaatttttatatttattattctagctttaccatttacacatactttacccccattgtattttcattgccgaaatgtttcaaaaaaggatgatttaaggggcaataataatatttaaaaaaactgtgtttagtgatgaaacaaaacccgccgttggaaattaaaccagcccatagagagaaaaacctctcttaacgaagaaaaacaacaacatggcccctggtttctcttctctttcgaatctatcttcttcttttatccaatcctttcctatttttattctcaccttctcctcgtttttcccgaaactgttcttttgccctcttctctcaattttaatccaccaaacaaatcgaacagtgttcgataacttttagattgcaagtcctgtttttgatttggtcgggagaaagaaaactagggttttgatg

SEQ ID NO: 23133 - DNA, 3000 bp, Unknown; identical to SEQ ID NO: 1184
  misc_feature (1)..( 3000): 2750-1469P.txt file - cDNA_ID_2131449; gDNA_ID_1620368; Annot_ID_154909

SEQ ID NO: 23134 - DNA, 3003 bp, Unknown
  misc_feature (1)..( 3003): 2750-1469P.txt file - cDNA_ID_2131469; gDNA_ID_1620368; Annot_ID_154915
aaacagagaagtatggatcagtcaaaacaagagacagagacacaaaagttgaaactttgattggcaaagtataaccatgacagagatgcaccaagtttagatatttttctcattacaaaacaccaaatctcatgttatatcagaactagattgatctgcacttatgtaccataaagctatccaatttcttctcacaacactccaatggaggaattttaggtaaaacaaaacagtaaactatagtctatggatcaatcagagacaaataaagtcagaaacttttgatagcattacaaaaaaaagatgaagactttatgacagagatacttacaggaagttcatcaacatctaatttgacgaaatcaacatcattgaacttatcagccatggcatgaatcgcaggctcaatcatcctacatggtccgcaccatgaggccgagaaatcaaccaccagctttattattcacagaaaccaaatcagttaaattccattgaaacacgaaatcgattgaatcgaatcgagagtctgagagacgttaccagtttgtttgattctttgatctcgttgaaatgaagttgccaccgagcggaagagctaaactttaggacgcgacttggctcagattcggtccctgcagctgttgcatcttctccacttccaaacacagttgataaagctcctcccattatcgtctctcgtctcgcttctctctctgattgcgtttaagaacgaccctgctttctttggtcaacgatcgtgtcgtttaatattcaaacatcgtgccgtttctaccactagagctggtcaactatgggcatgcccacctcatttagcccatttaaaatctaccccatttaaaattatttaattttaagatttataaaattgcccatttaaactcatatacccatttagatataaattaaaaaagcaatttaagtgactcggaacacaaaacaactactaaatcaagaatgtgtctaaccttttataaaacaaactaaaatcaacacttaccatcaaatttcaaattcttaccaatcgaaagacactaatatctataaatcaaactcaaacatgttcaagttttcaaacacaataagtttcttattcttcttagttccaaaacatgttgcttcttctacatttgtttcatggtgcacttgaattttctgatcttgaagattctgctcgggtactaattgcaatcatccttgcatattggttgcaaatcatcaatgtcttttagggtacctacaattcaaagtatgaattcgttttaaaacatgatcactgcaagaaacctcgttttaaaacataactacacaatatttttaccttcatattccgcaaatcctcgcaaccaattatgagtacaaagcagagtctgaaagttcttcggaagcaaccagttcatgtatggactcgagacccgtgctctgatgctaaaagcagactcaaatgctactgtcgtgataggaatgctaagtatgtcatgcaccatagatgctaagttaccaaatctgtgttggttttctttccaatagctcaaaacatccaaatttcgaaaagcctttctatgtaaccttggctcatccaaataaacatctaattgcgtcttcatgttgtccacatcactttctaagcttctttctagctcaaaaaggattacaatatcattttggctatgggtgcaatcttggatcctagatgaagttgcagattcttgaaaaaacttataagcttatgagtatgtggatctttctacttctaagtcgaaagctaaagaactcaaaaatgtattgaaagaactctacaaagattatgagaaaaggaagttggcaagtttatgtggagcttttgtcggctctctcaactatgattcgcttgtggagctttttttgactctctcaatattaatgtgaaaaataaagaaccggaccaaactgaaactgtataatcaaatcgaaccaaaccgaaatattaataccaaagatttggattgtagctctttcgattttagattttgttgtaagtatggtttttttaagagagaatgtaaaatttattcaatctttttaaaaatgcatcagtttacaaatgtatcaaactactgttttcattttagtgtcgcaaaaaattagtcgttaaagcatagtataacacataatgtgttattgcatttgaaaatttttatttgttggcaaaatgttcaccaagttgtattttgttgtggagcattcataagctttggaaaaaagtatgaaaaatttaggagataaacaattttgttaagaattaaaagataaatttgtacaaagatttcatttgatgaattacggatcaaattatttaggtttcagtttataggacctgaatcaaaaataattttaatttaagtaaaactaaattgagctgaaaaataatagagtttattaaaaatatatattttttagtttttttatctattatatcatcattagaaatatttgatctaatcctattatgaagtagtttacctacaataataatgtttaaaacgataaacaaaaaaaaaaaattgaacataactatcataaattgggttaattggtattgttccgtcagtcagcttaattagtattgctcagtcatattaaacgttacaaagtccggatcgaattctgaccgaattcaaacggtaaataaatcgaacttacttattacatggatttaaaagcaacccactataaagcccagtggggttttagaacccaaataggaaaacgacgtcatatcatatgtaaatctcacatcactcacgtcgacaaatcggcatgaccaaacaacggcagagttctctcgattctcatcaccggtgaaccaaaaggtttagggttttagcttcatccttctgcttcaaagcttcaatcttttctctcgattctcatttccaatttcataactgattcacaaatgcaaagcttcgtatacccataaagttgaatttgtcgtctgcaatg

SEQ ID NO: 23135 - DNA, 3003 bp, Unknown
  misc_feature (1)..( 3003): 2750-1469P.txt file - cDNA_ID_2131473; gDNA_ID_1620368; Annot_ID_154916
tggttatgaataaatctgaatcaatcggctctcttgatgaagttgcttcagaggcccttgcactaggttttggcgagcctatagctatttcagccgagactggacttggtatgaccacactttatgaagttctgcgccctctactagaggattacacggtcgaaatgttaaacggtaatatacccgtatcaagataatcatacctcccttaaatttcttcttcactgaacctcgcagtcttataatagatataggcagtcaagatgatgttctgaccgatgagaatctctctgatgaaatcgacgagtccaagttgccattgcagttagctatcgtaggtaagcctaatgttgggaagtcaaccttgctcaatgcattgttggaagaagagcgtgtattagtgggtccagaagctggcctcacaagagatgctgtgagagttcagtttgagtttcagggtaggaccgtttatctggtaagattagaattcttatttttcttatactctgactccaactattattctcttgatgttagacagagaagtggaaccagcgttcaatattattcactttgtttgatgtttataccggatatctgttaaggttgatactgctgggtggttggagagaacagagcgagacaaaggaccagcatctttgagtatcatgcaatcaagaaagagtcttatgcgggcacatgttatcgcgttagttctcgatgctgaagaggtttgtatacacacatactctcgtgattcatgttttttttttcctgcagaactgtgaaaacagaagaaagaaaatcaagagatgctcacgctatgttttgtatttgcaatatccagatcataaaagctaaatgtagtatgacacattcagaagtagttatcgctagacgtgctgtagaagaaggacgtggtctagtcgttatcgttaacaaaatggatcgtctaagaggtagagagaactctgagatgtacaagaagatcaaagaagctgttcccattgaaattcagacagttattcctcaggtaataataaaaattgcatcttttattaattctcatttcttcttttgccattcttcgtatttcccggtgatggaaacataatatttgcttgcagataactggaataccagttgtgtttatctctgcattagagggaagaggacgtatggaagtaatgaaagaagtcactgatacatacaagagatggtgttcaagactttccacaggccgcctcaatcgctggttgcgtaaggtttgtactttaaatgttacagactatagtatatacaacaaaacatatgacatcattatttgcttaatcgttttttgtgtgtgttggcgtaggttatgagccggcattcatggaaagacacggcttcacagccaaagatcaagttctttactcaagtgaaagctcgaccgccgacttttgtagcgtttgtgagcggtaaaacgcagttattggaaagcgacataaggtttctgactagatcattgaaggaagattttgatttaggcgggactcctattcgaatcatacagcgggttattcctcgtgcaccaccctccggtacaggtggtggtggaagcggaaacagctcgagtcgagtagtgcaaagaaccacctcagacaaacggactctctcggcctaagaacccattacaagtgaagaaattttccctacattaactagtttgtgtcccgttttgtatgatcatacttaaatacatctttttcacctatacacattcgaaaatctaaaatagttggatggagtttaaccttaaacttcattagtgtccattaggtacaattaatagcagtaatataaagaatctataatattgtatagtacacgaaaaatatgtcatcgtatgcaaaatatttggtcatagaaaaacaaaattttaactaagaaatatgtatatagattcactttttatcacgtagatcattgaaatagtcttcgtaagctttgataggaatacgagcatccatccacgaaatcttcaacatcttacgttgtgagtccaaactcatccacgagactagactcggtaaggttacaatggctccaatcatggctatgactttcgttgcgatatcgtaaaacaatgtccagttctcatctttgttatctttctcctggtcgttgctcatactgattacaaagatctaacttcttctgctctcctttttttttttttttggttgtgtatgtgttttgatttataatttcaaggttgctaatgtgacgcgacctttactattatttattgggatctctgaagacagtcccgaaaaggaaataatataatttgacaatatcaaaaaaggaaacatttaacaaagaatctttcattaattaatttcgagcaattgtgtcaacaataaaaattcataatcatcttctgacatgactttaatgtataggaagctcatgatggagaaagcaaaggcaattaattacactatcggacttgtccaagattgcttagcattttttttgcacagagcttgaagattgtttatctctatgacgttttgtttacttggttatgttttttattttcagtgcggtgacatcatcccttgttgttgggatcaaataattgaattgaggatgatgttctgttctttcttgtttttaaagtatggagaaagacacaagtttgaaatcaaggtcagctgatttctttgacgccaataattcattctgtattattttattggctttaaaccaatttgcatattagatttattaaaagattctgctagttgtctgcttaaaaagtctccatttatttaaaagttctaatcagttcttgtctggggctttggtcttccctttgatttcttggtaagagttccattcctgtggaatctgtaaacagaaatctctatgagctatcttttttttttccagattgttttcatcggtagatgctagactcaaaacaactgattctttgttgttgaaagaagaatg

SEQ ID NO: 23136 - DNA, 3003 bp, Unknown; identical to SEQ ID NO: 20478
  misc_feature (1)..( 3003): 2750-1469P.txt file - cDNA_ID_2131596; gDNA_ID_1620743; Annot_ID_166548

SEQ ID NO: 23137 - DNA, 3003 bp, Unknown; identical to SEQ ID NO: 20623
  misc_feature (1)..( 3003): 2750-1469P.txt file - cDNA_ID_2131704; gDNA_ID_1620763; Annot_ID_167250

SEQ ID NO: 23138 - DNA, 3003 bp, Unknown; identical to SEQ ID NO: 20623
  misc_feature (1)..( 3003): 2750-1469P.txt file - cDNA_ID_2131704; gDNA_ID_2926194; Annot_ID_201300

SEQ ID NO: 23139 - DNA, 3000 bp, Unknown; identical to SEQ ID NO: 1208
  misc_feature (1)..( 3000): 2750-1469P.txt file - cDNA_ID_2131758; gDNA_ID_1620372; Annot_ID_155022

SEQ ID NO: 23140 - DNA, 3000 bp, Unknown; identical to SEQ ID NO: 1214
  misc_feature (1)..( 3000): 2750-1469P.txt file - cDNA_ID_2131772; gDNA_ID_1620372; Annot_ID_155025

SEQ ID NO: 23141 - DNA, 3003 bp, Unknown
  misc_feature (1)..( 3003): 2750-1469P.txt file - cDNA_ID_2131826; gDNA_ID_1620372; Annot_ID_155040
ctcttggtccatccaagtccacaggaggcagcaacaatagcactaataacaacactaactcatcgttccatgggaatctaatgactcccgtgggtccttgtgtgcctagatacagtttggttgctggaaaccaggttgattcaagcaatatacatgttcctgcttatccaaccaccgatctttgttatgatttttttgctttacaagagcatggttcgggctctagtcactcaaaaagtctcatctcaaaggggaaaaacaaagtcatggtgcctgaagatgatgaggatatcgggatgataaggtggttgcccaagaaaaaaagatcaagaggagagtagtaatttatctatgtccctttgtgtttttcagttttctgttttctattgaggcctatgttcacctcttctttttttcatgcaattgtttttctctttttgtttctttgttgtctttttgatgattttgatgtttcgattaattcatcaaatccctttttcaattcctacatttcatgattgttcttaaatttttgagattttcagaagtcattttcgtaagcgaacttaattttttcaaaggttagagagaatctgcaatttgcttaaaaacattagttaaagagacattatctcttcattgacaatttgttagccttggaaaattgaaaaaaaaaaataagaggcagaaagaaggtctatctgatcttctattgttgtaattgtaacctcacaaaaaaaaaaaaaaaaaaaaaaaaaaaaaaaaaaaaaagaggcagtggtttccttttgacgattagggtttcgctggttccagtttgcccggttttcttccttgacccagatccgatttactagattgtattacaaatgtaatcatctttcaggatatttgtaacaaaaagatacaactgttatccaataaaactgttattttttttatgtattaatataatcttgtaatcctagtaagaatttataaaacttaaaaacctgtaaggctgtaactgatgtttgcatctccattctccaaagatcttttctattgaacaaaaatcaaaactatttttgtttctcttgttcaagagaaatctccttttaaagataatttcctgaagacatttattccatagtatgaagatcgaggtctagaagttgatagtattgaaaattgtctattggatcaactggattgttttctcaaacaaatgaaagtcaatattgaaaaacacaagtgctttttcttccaagcaggagattgataattttgcatttggagcttgtgcagatcatttatatattaatttaagttcgtgaagatttaggtttatggttgtagatacctcacacaaagcttacatagtagttacataggaataataccgaacatcgtcgcttcatttgagatgttgggttgatagacccaacaataaaatcatcctaaaagaagtaagctacgtacttattatttataaaggcttgtcctcctcccttccttaaagccaaagccaactctttaagtctcgctctcactgcttctggcgaaagctcaagttgaggatgacctctcagaaaatcatcgcttccatttccatattcctcagattcaatcttcttaaagcacatatacaatagcaaaacggaatctagaattttatattataaaaatgttgccacgatttttaccaatatcttattcaatgtcgaccaaattaactattgaaaccctaatatcactgcttttatggaagtttgtttttcttgttcaatcatcgtggtctagaagttgatagcattgagagttgctatatgatgaaactttatagtttttgctagacaatgagagtcaatattgaatacatgaggaatatgaatacttctcaacttgcaaatttgtatttttacttcgcaaattaacaatcttttatgaaattttaaacaagttttttgaaaacatcaacatagatggaaaatctgactaggaatttcacagaaatatgtaaaatcgatttctaagttcttgttgttagttttagatgttatatattaatgttcaggagataacgtcatcaagcggggatagctcagttgggagagcgtcagactgaagatctgaaggtcgcgtgttcgatccacgctcaccgcatttttctttttgtttttgaaattttatttctcgttgcaaaaccaaacgacgccgtataaatataaaagaacaaattgacttggagcgacgttgcttcgttagaacgttaggtcgcacgtgtaattgacttctctaagaatcaaattcattgggtttcagaaaaaaaaagttataaactttccatagagaataatacaaggtcgaaaaatgacaaattcttaattctttacatgaaatttaatatttctgaaattataatacttggttcacgtataaaatcatccatagataagtaataacaccgtccatgcatgaaccaatattataagattctaacaggtaacagattacatataacacatgctcaacaaaatggcatagtcatatttatgaggaccgagaaatgtggatcactctgctttctttgtaacaatttagaacttcgttcatacatgatacatatcgaaatctacaatgtctataattttttttttcttgacatatatatgtatttaccgttgtataaaacattaaatatctggatttatgatacagtttgttgtcattacaaaattaatcttaaaacgataccttaaactggagaaatagtcatactttaattttactttgaaacgaagtcaacgaaggttaagtaaaattgttaatggtgtcaccgcgaagttcgtccaaaggcacacagtctccaacatgtatctcaataattaattaacataatagcccctttattaagcaaggatttgacttttcaccactataaattcacaatcaacaattctcattatcatcaaaacaaaccaactttccttctctaatcaaaacaagaaagacacaaagatg

SEQ ID NO: 23142 - DNA, 3000 bp, Unknown; identical to SEQ ID NO: 1238
  misc_feature (1)..( 3000): 2750-1469P.txt file - cDNA_ID_2131856; gDNA_ID_1620375; Annot_ID_155123

SEQ ID NO: 23143 - DNA, 3000 bp, Unknown; identical to SEQ ID NO: 1244
  misc_feature (1)..( 3000): 2750-1469P.txt file - cDNA_ID_2131876; gDNA_ID_1620375; Annot_ID_155128

SEQ ID NO: 23144 - DNA, 3003 bp, Unknown
  misc_feature (1)..( 3003): 2750-1469P.txt file - cDNA_ID_2131947; gDNA_ID_1620376; Annot_ID_155152
gttatgacaaaacatcatgtcatatgtactgatgtacacggtctgacattttggcaatgcaaatcacttcatattatcccgacaataaaaagctaaaatgaaataaaagaaaaattaaagttgcagttaagtgtgttaccaaacattaaaaccaattaaacgcaacacaatatgttgaccaaacaaaatctaaaaaaaacaccattcagtaagaaaaaaaaaacgacccaatatacaataaatttaactattatatcaaaaaatattataatcgacgatcaagacttagagcatgttcataagtgatactcacaaagtatcattaagagtttttttagtattatttataatgtttgtttaataaatctatataatattttttgtttttgtcaaatgtgaccaatcagaagaagtcacgtcagatgatattggtatcacaaatattagtgggctgatactgatcaagaatattctaattgctttactaatataaaaataatttttggacttgtgatactctaaaaatatcacccatgtacatggtcttatatcctcttgacgaaaaaagagttatatcctaatgtattatattaatattgttatcgcgtcgcaactctaattcagatatgggtaatagcttgtgtgggaagtgggagattttttcatttggactactgaaattcaaatactacaattcacatagtcgagagtttttaaaaaattatatgtttgaatatctgattggtatggaaaatttctagatacatacacctatttatcccttaaaaaagaaacgaaagaaaaaacagttccatgtgtttttaatttagcaactgtatcggagcgtgtctcagcagaaattcttgggcctatttttgtccaaattccaatagccgaacagtcaattgacacgtgtataagacatcaccatcccaagtaattactctctattgtactgtacagattggtttgatgataaatattcaaatatatgccaaacagtaaataataactaatcaattttttaaaaaaaaatcaacgaatattttctttcataataaaaaccctaaataaggaataacaaagtaaaaaaacaaagtttttaaaaaaagatataataatattaatactattttggttattatggcttcatcattgatcctttgtgcataagaactaaatgagtaattgagtactatataatactgcacaaggctctctctgtgcaattgactgtccctaccaaaattaactctctctatctctctctctttctttctctgtgtaagaagagtctttaaaagtgagtatatttcgacacaaacgagctctgtctgtaatggcatgcttagaaatgtacaactccaatggtggtggtggaactcccatgagtcctagaatctccttctctaacgatttcgttgagattaggccagagacgaccaagacgacgagatcaagccctctctctaaacaagagggttcttcttcttctttttcagataatttcgagttctctgtctcaaactacacaatgatgccagctgatgaacttttctctaaaggaaagcttttgcctttcaaggaaaccaatcaagtccagagaactttaagagaagagcttctcgttgaagaagacgaagaagaaggtccacgtgatgctaccaacatcttctctctcaagccaccaatcttctcatcatcttcttcttcttcttcttcttccaagggaaggtggaaagggcttttgggccttaagagggcccatgttgggtctaagaacaatgaagagcgatttgttcatcatatgattaacaacaacaaacaatctcaggtactttctctgatctgccttggatttgttcatatatatgagcatggtgtcgatgaaagtcgtgtaatttgtttttatttctcttaaatacgttatgtaaaaatacactttttgttctcgaaatgttcataggaagcaattggtggaagagaagggtcaagttgcagggagatgaagaagagtatgtagagcttaaaaacaaaaaaggctttcacttggtttttgtttttttaggaacatggctgcttccaaatttttaaaaatttagatttatgttaatcttagatctgaaaaattactaaaaaaaaagacacttatgtgttgttgacggagatggtttatttcattaactgttttccactacacatgtttcatcgattcttctgagtttttatcttgttttttctttttcttttgaagggtgtgagtattagatctatctttgtcgactatttggaatggatgtagtttttttttttgtcgttgtacaaaagaaaaaaagaagaacagagtgtgagtagttcagaaaatttaagttccagttgttttttaaaattgaagcaacgcatatgtctattgtcttcgtctttagacatctcttgtctgtccattcgttattagctattaccattcaactccaacttctctctcgttgactgtgttatctagtgattactatgcctcagagattcagaaatatgtcatataaaaattactagcgtttctttattgcagtttccccatataatggcaatgcagcgagaaatttacatggtttcctaaaatattgaaaggcccaaaaattattgtttggtcttgttgggcctgaaatggaaataagcaaatacatattcatatttttttattttttttcaaagaagatattcgatatttatcaactgatataagataagctattgggcttctattttaacagttgtaacccgccagtaaaaaatgcgctagcttatattattaccgtgactcgatctttcaaaatgccacgtggcatttattatgtggatttggattttctaacttgttctcctcacgaaacaaaattcacccacacaagacaaagcgatcgtcgatcccacccacaatctaagatcgccggccgattctcgtcgccgacaaaagaagaaccgaggaagaggaaagcaactatg

SEQ ID NO: 23145 - DNA, 3003 bp, Unknown
  misc_feature (1)..( 3003): 2750-1469P.txt file - cDNA_ID_2131961; gDNA_ID_1620376; Annot_ID_155157
tatttgaagattcttatacaagcttaaagacacttacatttctctatcttaaaccccaagaaaactttaagaaacagagagagacttcttactattatttttgacttgattcttgacatttttgactaacaaaaactcaatcatcatcaatggcaaaagctctgttcttcaatttctgcatatctcttcttattattgccatacttgtgagccatgaaatcataccaacagaggcaagacacttgaggacccatagaaagtcaatcaagaacagtactcttactgtacacgaaggagccggtggcttgagaaccggtggtggctctgtgaagactgacattagcaaagaagaacatggcgttgatgagttccggccaacaactccgggaaacagccccggcattggccattgatccattagaacctaaataattacaatatttacaaacttgtgcatagtgtaccaagcttaatgtgtttgtctttctgatattctcttctcttttcgtttcatttttctttttttttacaattattggttaaagtgtattatatcttgtaaatacaatcaaattattattcgtagcaacctacgttgggaattgatgtttttaattaggtttgctaacataagaagtcatatacggagatggaattacctttaacccaaatgcaagaaaaaaacttgctaaaataactcaagtattacttaagtaaccaatttatagcggtaactcactaatgttaagagattatatatggttcgaatcttcttagtcatggtcgttgttagatctatgtagatataattcaaattcaaggagacaaaataagatgtttacggacaaaaaacattccgtaaatttatttattgttgttgacaatgtaaatatttcattaaaatgaaaagagtttggtgatctctacaaacaatacaaaaaatctgttaggtgagcactttggagttgagtgagtgatgtaaaaagtaaacattggttgatatctgtatatactactactccacacgtgtgactaaagctcggtcgatcttttaaaagtaatttgtaactacaaaatcaaataaaataaaatatcttcggaagttcttattcaaatcttctttattatttgcaaagttgctagcatgcgactgctgtacatatgctttccatgcttgagagtctgaaagacatgctaaccaacacagaactagaaaaaaaaaaaaaaatacctttttctgggccgtattaaaaagtgatggcccgttaattttccatcaatatgagcatctagttaaagcccattagttgtgcacaaaaaaaaagagttaagcccaataaaggtataatcgaaacccatttatacatcctccacttttttggtttttttcctctcttcttttttccttttaacatacatccttcgttaccttcactattcagtgtctgtaaataacatatataatatcatcataacaatattttttcaacttctcttatttataattccatagtttgtttgtttttttttatggtaaaatacaactccctagtttatatatttttttttttcccctttaacttttcattttatcaaaaaatgtttttaaaaagagtagaggactcataaagcttcgtacttgttttatttatataattaataactcgtatcaatgtcaataactatcatccatcccttttttcttcctagttcaaaaaccttttaatattgtttgtataaatatctagttatctactattagaccattaatacaagaaaacaaaacttttaaactgtaaatagtggcttgattttgaatgacgagacttgtatgtatacgagtggggtctagaatattagtcgctgtctagtacatggtttaatggttcggttggtgcaagtaattaattatgagaatctttgcttattttttaaaactaataattccacaagtaaatagtttaatacgtcaattatatatgtctttgtctaatgaaaattttaaaacttccacttaattctcagccgtccgatcatccaagatgtgaccttttcatgggcctagaaccgcgaatcgtagcaatgtgggcaacacgtcgagaggaatctcttagacgaagtaaacgccgttagacttcgagattccccgttattaactccgttagtgaggcaaccgttggcaattgtaccggaccgtaccggtttttgtcgtcgtacgcacacaaaagtccaacacactcgcatagcaacccaaacatgtgtaacgccgattttgcccccaaaagtctcatacggattctcatgccacgttccaaacaaaagtatttggctttttctttacttttcttttttgctattagtatattttgtttttgttatatcattttaattacaccaatttaccacgaatctcgtaataataatagtataatactatacacataatagttaatatctttatcaaatttaataagcttttaaaatatttttgatatataattcattgttctgtttgtaaatgtatttgtagctcactctgctagtaaaattaaattacagctttagccaattgaactacaaagtttaccacttgaaatataaataaacggtaagtatatgtaaaacaaaataaagtagaaatacaatcacaaaaactaaaaatttgtcttaaaatgtcattatgtaaagaccattttaaaacaaaaaaaaaggtaaaaagaagacgactgaataatattacgaaaggacccaagccaaaagattaacagttaggtcataagagaagggtaataaagtaatttaaaggaagagtatgtcatcttgttcctctcctttaattttccagtctattggtcctcagcctcccttctccttcaggtggcgttgctctctcgtccccaagaaaatcgcttcttttatttttttgtttactaaatcttcacataatctttttaaaaaaaaaagtcctaaatttcagatgattcgatgttcttttcagacatg

SEQ ID NO: 23146 - DNA, 3000 bp, Unknown; identical to SEQ ID NO: 1250
  misc_feature (1)..( 3000): 2750-1469P.txt file - cDNA_ID_2131969; gDNA_ID_1620376; Annot_ID_155159

SEQ ID NO: 23147 - DNA, 3000 bp, Unknown; identical to SEQ ID NO: 1251
  misc_feature (1)..( 3000): 2750-1469P.txt file - cDNA_ID_2131973; gDNA_ID_1620376; Annot_ID_155160

SEQ ID NO: 23148 - DNA, 3003 bp, Unknown
  misc_feature (1)..( 3003): 2750-1469P.txt file - cDNA_ID_2131982; gDNA_ID_1620376; Annot_ID_155162
ccggataaataattagggtttcgatatttgtttcatatagttttttcttttcattttctctgcattttgaatgttctttatttatggtatagtacagttacagtggtacagaggaggttttgctctttatatataacatttaatgaaaaagccttgtcatttcttcaataactctcctgctcttatagccatagcccatatttttaaactacttcctttttgttggattctctgaacaataatgcattaactaacctagttattattaataatttagggtttaaaagaaaataaatcgtggtgggtcacatcacttcaccaattcttgatatggtaattatttgatatatgttggctttgttctacctactagagatgaaaaagagaatttgtgtgtatcagagtctaagatttgcttacacctttctgtctggaaatcttttaagtgttgtcccagaagatgcactttatacttgcatgtattatcaatttagcatcaatcgcatcgatcaagttctttatattaataatattgtttcttaagtctctcttttggttttacttatatttcctcgacttttcttgcagttggaaactctgactttgctcaaggcattatggacgcaatcgagtttttctttcttcctgattttgtcggacgtccaacagcgaaaagacactcaccacgtaaaagtcaaacgactaacaaagaagtcagcttatttggttgattttgagtcctgcagacagttttggtataaagtataaaccaaaggcctcgtatcaatttgaacaaaagatctccactccatcccgaaacaaatactaccttgcttttttttttctttgtaccctattaatatttttttgacatttcttttggttcaagtaaaaaaaaggagaaattagtgtttttggttgcaaatctatttgtaaattagatgtcaagagaagtgttacttgccctagtggtttatcacatatccgacgtcaaccggaaatattaaattaaaaagtatgaataatctatctttgtatatccgcatttacatttttttttgtttctggaaaagtatcgatcctgttatatatacctaaagtttaaaatgcgaaataagaaacaaaaagagtttagtttatgaaaacattatcataatgataccaaaaaggctaaggaaaaacaaattacaaaaaggctacatcattttttaaaagagagtgtgtgcttcacatataaacaaggaaacgcatataataatcatcaagtagctagatgaagctaaagaagtagttaagtgtgaatgcttggcaattaagattgtgttggttcatttattaacaatctttgaccactcactaatttatttttggctctctcttctatatcatcaccgttttatctttataaaccatccctcaagactctcccaatattacatgatgtgtttaatcctcacgaattcgcatgaatcaaaaccggctgaaaaacagatgtaacatttaagttaacatactcacaccaatctaaattattagactttcattcactttaacacatttgtccataccatgatgatcataacaatcagtagctaaatcaatgtgagtgtggcttagatatttgatctgaatgattcatgagaaacatggatacttaatgttcatgtgcatgtgcatataatagtatattaatctcaccagtaggatgcttagtatagcaataaagagaaggtggtgaaattgatgagcatcggccattaaattaagcactgacccattaattgcgcacttacccataaacaccattcactccttttcattaacttaagagtaaaattatacatacacctcgctatctctaacactagtcacactagtgtaccttcctcggtactcttatcaatgtctcgtgtcgcaataaatccatataaagatttctaactaggtcaatccaacatccaatttaatacaacagtccttagtagattctaatttaagtgtgtctctatatatatatggaccgacaaaatcaatgacctaagatttgactatatatttcatgcaaatatgataaaatgctattcatccaattaatcatcaatattgtaattgggctggccttttgcttatatctttaggcattttctttaacaaaattagagccaggcccatcaattaaattgaaaaatgcttagaagttgtcacgtcactgtccatgtcatccatggtgggattgggctggcctaaaggacttttctatgtaaaaattagaggcaggcccatcaactaaattaaaaaatgcttagaagttgccacgtcagtgtcaatgtcatcagtgtctatttctaacgccgtcaagtaacggaataacgcaaccgaatattctttcatcacatggccgcttctgcagcacgtgactttcaagcttctgttttccttatgaactaagtttttctgtttcctccaaactattttttttaattagaatatcttgttatttataacgaatatatcttcttcttttacttatttttaacacaaatatttatttgtttgatacgaattctcaaaatgagaaaaacgaagaaaaatagaaaaaaatcgaaacggataaatacagagaatttagagaaaaaaggtttgtattttaggagacaaggacgagtgaagtcgtgctttttctttttttatttcatgttaattttaatatttttgggttatagtttcttaggaagcaacatcaatcatcaaaacgcggcggctcttgtcgtatcaaagcaactgaacgttgtcgttttgggacaatccttatctcttggggcaaccaattattgccttttttcttcctctctttccttattcgttctcttcttgaagatatttttccatttattttctcgaatcttcttcttcttcctagattccagcgacttaacaacaacaacaacaacatattctctgctgggtattagattcgaatttctctttttgtgatcagaaatg

SEQ ID NO: 23149 - DNA, 3000 bp, Unknown; identical to SEQ ID NO: 1246
  misc_feature (1)..( 3000): 2750-1469P.txt file - cDNA_ID_2131990; gDNA_ID_1620376; Annot_ID_155164

SEQ ID NO: 23150 - DNA, 3000 bp, Unknown; identical to SEQ ID NO: 1248
  misc_feature (1)..( 3000): 2750-1469P.txt file - cDNA_ID_2131994; gDNA_ID_1620376; Annot_ID_155165

SEQ ID NO: 23151 - DNA, 3000 bp, Unknown; identical to SEQ ID NO: 1218
  misc_feature (1)..( 3000): 2750-1469P.txt file - cDNA_ID_2132042; gDNA_ID_1620373; Annot_ID_155057

SEQ ID NO: 23152 - DNA, 3003 bp, Unknown
  misc_feature (1)..( 3003): 2750-1469P.txt file - cDNA_ID_2132046; gDNA_ID_1620373; Annot_ID_155058
cgtagttagctctggctactggatggtataagcaatgataattttacaagtactcctttagtttctcgaactaaaatgccctgtccataaataataaattaccaagtctacaaatgcacgtatgatctgaataattttatgaggttattcaatggaatgacagtaacaatagtattcctttatcaaatttacttcttaaagatatgcattttccaaaaatattaccagtcgcaaaggagggcagtcttggcacaagatcagcagcatcatttgcagtccgcctagagatcctgaaattaccaacttcatcaagatcatcatcgtcttcaaaatcatcaatgtcatcaacagtcagctcttgagcttttggtgaatcaaaagattctgatcgcatcaatggtggcgcagatggtgactcacaccactcgggatttgtaaccatgggagaagatgaggaaattaatacaggaataggcggtggggccctttttggaggtgagccagaagattcaggaattgtagccaaaaagaattcatcagcagtacccacgctgttctgaaatatacataagactcaagcatttagaaaatgacttatataagtcgatggagaaggagtccgttatatgttaatagcaaaaggttttccagaaatgaacaggcattatcctagaaactgttgcaagcaactcctagtaatgcttaacaaaagttagaagtatcaattaagaaagcaatatgttacatgtacacaccatataaggcaatccaatgtgatcatgatagtcccgaatcgcttcagcgagttcgagcattccacctaaattgaaacaatacacactattaatctgaaagaaaaaaaacagaacgatcacgaaaacaaaagaagaaagaagctagtagtacctttcttagcacagttaatgacataatcaacactaacttgatctaaatcaacatcgtcaagagtcacagcaccaggaggcattataactttcttgattaagctaccagccaacataaaatccaatagcttccgcctatcccggcgatatctctgaagaatctcgacagcattttctctatacacgcaagaaaatacaacagcacatcgatcaaaatgcaatagcaataaaacgaagaagattgtacagtagcccaaaaacaaaatcaaaagaagaagaagaaagaaacatactcttccatctcgatccagctgcaataatagtcacacggattctcagatttccaattgacctgtgaaatcaaaagccacgaatcagtaaatcaaatcgaatcaagtctacttcaagtacgagaactagagactacatttgaatgcagatttagttttagaagtagagtttaactgaactaaccaatcattttatcagattcctcgcaaacaccggaattatccaaaggaaggattgatttagtgagaatttagagacgactgaatacgaatatgatctggtaaatgtagatgaatgaactgttttggagaacttcgagcagaaatttcgaggtggtgatgagcaaatctagagaatgcgccggggccgaaagatctatctgtatattattatttgggaaaaacaaaatgaagctgatttgtctcaactttaatttactctatctccctaattttctttctttgacttcttttgttattccagaacaccgaatttgtcaaaattgaagtctcaacttcattcatagtgaagaaaatatactatgggagtataatattaattttcattactgattttaagtaattagataattatttagctttttagtattcctaaatcttatttcttaatgaagatttgaattaatttggaaatcttaaaaagattaatgttattcaattatcactgattttaatattacaagttgaaattcctatgcttttcactaatgatatgaatattgggccctcatgggccaccttcttcctaaacttatcttctttacttctttcacaagccttgtatacaagggcaattgcctccacatgaataaacaagaaacctcacaagaacttctatgtttttttgacatggtatcagattagccaacacatctttccacattgtttatgttttcgaattttggaccgaactggatataaacatagattttgtcaagcccatatgattttttgtcaggcccactatatcatatattaaccttacgaagtaacaagcaaaactggattaaccactttacctataagatcgtcggcagctgggtggattttcaaaatacctcctataaaggacctaaaccaatttccagttttaaaagttttgcttaagagagtgagagcctgagaggaacattatccactgcatccccatgagaccatgggtcccactccaccgcaaaacagtctgtcacgtgtcatcacctccctatacctacaggacacgtgtctacaccaaatcgagtgaacatgtgacgtgtcgtcaccaaacctgagccgctaaccactgcctgatctggagggtatatccgtaacttaaaatccttttgtcgtctacccgtaaacagacaacttttaagaactacaaaaacgtacaagttggccagttgtgtcttgcaagatttaattaattttaattcaagtgccgacctcacacagaaaaagatatgtttaacacgtggaccaatgaaagagttgctttagatggaggagtaatctaagccacaaatctcgtttgtgaattctaagccactaactaaagttcaaactcacgcgctctccacttcctctcttcaacttgcttctttgtcttctctctctttcctccttcgcactcacaaatctacagaagatagaagaagatagactcataatcttttggatttggatttagatctgatcataaaggtgacttcttttgattattttattcttaagaattcaaatgtttttctcctgttggttgctgaatatagtgagtgacttgttagcaggttaaagtatcattcatg

SEQ ID NO: 23153 - DNA, 3000 bp, Unknown; identical to SEQ ID NO: 1219
  misc_feature (1)..( 3000): 2750-1469P.txt file - cDNA_ID_2132070; gDNA_ID_1620373; Annot_ID_155064

SEQ ID NO: 23154 - DNA, 3000 bp, Unknown
  misc_feature (1)..( 3000): 2750-1469P.txt file - cDNA_ID_2132084; gDNA_ID_1620373; Annot_ID_155069
gttcagtttgtaaactcaattaaaaaaatccagggattaaatatttaataaacaactgcttttaatattaggttttatcgttggcacacacacaaaaaaagaggcttttatcgtcgacataaaataaaaaataaataggaggatttatcgttttaaaaccacaaaataaaagttaaccaaaaagaagaaagaaaaaaaaaacgatcgccgaccaaaaaaaaatcaaagatcaacggcgcatatagcgcgttaggtggacgagcccacgagcaacaaataccctctgcgactctctctaatgtctattcacttccacgcaactatttaaaaaggaactcttagattttcctttatttcttttttaaaacataaaatccaaaaatataaataaaaagaatttagacagaggagcagaactgagtccactagtcaaccaaacagagagatccgttcgttctcttttgtctttcggattcatccctcaattcggtttcatcatacaagagagaagtgactgtttcttcttcctttctctttcgagtggtttctcttcgtcttgcttctcaatctttttgttacaggagatatcgaaatcggttttgtgttgttggtctaaaaggttagacttctgagtcctgatcctattgtgcttttttgattcagtagtagttaacctaacttgatttggaatcaacaaactgggtttaaaaactcaaatgctttgaggtagtagtttgaagtttgtagattttaaggatggagaacaaaccaagtgtattaactgaaagatatgaagttgggaggttattgggtcaaggtacttttgctaaagtgtattttggaaggagtaatcataccaacgagagtgtagctatcaagatgattgacaaggacaaagttatgagagtcgggcttagccagcaaatcaagcgagagatctctgtaatgaggatcgctaaacacccgaatgtcgttgagttatacgaggttatggctacaaagtcaaggatttactttgttattgagtattgtaaaggtggtgagcttttcaacaaggttgcaaaaggaaaacttaaagaagatgttgcttggaagtatttttatcagcttattagtgcggttgatttttgtcacagccgcggagtttatcaccgcgacattaagccggaaaatcttttgttggatgacaatgataatcttaaggtatctgattttggtttaagtgcgcttgctgattgcaagcggcaagatggtcttctacatacaacttgtggtacacctgcttatgttgcgcccgaggttattaaccgaaaaggatacgagggtacgaaagcggatatttggtcttgtggtgttgttttgtttgttcttttggctggttatcttcctttccatgacactaatcttatggagatgtataggaagataggtaaagcagacttcaagtgtcccagctggtttgctcctgaggtaaagagactattgtgtaagatgttggaccctaaccatgagactagaatcactattgcaaaaatcaaggagagttcttggttcagaaagggtttgcatttgaagcaaaaaaagatggaaaagatggagaaacaacaagtcagagaggctactaatcccatggaagctggaggttcaggccaaaatgaaaacggagaaaaccacgagccgcctcgacttgctaccttgaatgctttcgatatcatcgccttgtctacggggtttggtctggcaggactttttggggatgtatatgacaagcgagaatctaggttcgcgtcgcaaaaacctgcttcagagatcatttctaagctagtagaggttgccaagtgcctgaagctgaagataagaaagcaaggcgcaggcttgttcaaactggaaagagtaaaggaaggaaaaaacggaattttgacgatggatgcagagatattccaagtgacgccgacgtttcacctggtggaagtgaagaaatgtaatggagatacaatggagtatcagaagttagtggaggaggatcttaggcctgctttggcagatattgtttgggtttggcaaggcgagaaggagaaagaggagcagttactgcaggatgaacaaggagagcaagaaccatcatagcaagttcagctacaagcctacaactgcaagcacatgaattgttgcaggaacatgaaaatggtaaccctcttgcgacttcagctgaaacagaagcaagcatcaagaaactctaacgaaaacagaggaaggaaaacaataacaattgcacaaaatggattctttttgcatatagactacaaaaattgtagatagttgattgatttgtaacaactacgagctttttttttaccttgcctcttgtgaagttttgaacgtatattgtttcatgagtacagtaattgaatttctttaagagtttggtcgatacatagcagcaagatttgtgaaattttggtttactaaataactatttttccagtttccatctagtctttttgcatcttaaactctgtttcaatactcatatgtattactggacaatcattactgataggacataacaactttgtcaattaaccgactaagaaactcaaaaagaagaagatcaaagaagaaaaatcaaggagttgttgaaacatttaaatcctaagaggctaagatgtccccggttcttttaaatgtcgtctgtgttgattgattgttgaaactttgaatctgaaggaggggtacttttctactaatcaatgttcctgttaacaatgtttcaggatttttgaaatcaaagttcgtattttgatgatgaattgtagactattatgtgtctgtgtgctgaagattttgaaagtttcttaatgcttgagccttaacgggcccagtttaaagcccaataattggtaaccctaacccatatttttaagagaaattccaaatcgatttggactttggcctataaaagtagcgtcacgagattgatatctagtaccgaagaaaatg

SEQ ID NO: 23155 - DNA, 1581 bp, Unknown; identical to SEQ ID NO: 1186
  misc_feature (1)..( 1581): 2750-1469P.txt file - cDNA_ID_2132128; gDNA_ID_1620369; Annot_ID_154931

SEQ ID NO: 23156 - DNA, 3003 bp, Unknown
  misc_feature (1)..( 3003): 2750-1469P.txt file - cDNA_ID_2132171; gDNA_ID_1620369; Annot_ID_154944
tctctctcatctgttacatatcacaatcttttgctttaaattgagatccttcttcaaagccgtatctctttctctagtgtaattctcctctgaaattcagccttagttcgtctctttcgttctgggtttctctgtaattgtagcccaattccaatcctgggcatgtatttcaaagtgtttccatcttcttttgtcaaagttgaagactttgctcgttttgaatccgtccgctagtagaatcttcttctttgaatcgattttgatatctctgctttatgggtttccacacttttgccagcaatgtctaagcttccaagaacatgcctttgactagattttcccggtaaagctttttgcttttacttcttttttcctggcacgagaaattaatgggttcagttgatgaggttgagatatctaagactagggtttcatgtcctcctgctctctcaacatctcataagattctcatcagtgaagagaaacctaggagatggtccgagagttcgttgcctgatgtctctaataggattaagcttttgaaatttggttccccttctgctagactcaagagaatggctgaggaaagagatgaagtttcacgctctgtcaacagctcaagctctagcagccacgatgtggtgtcttcccggaaaatcgagtgggcttgtttgatgaaaatgggtaagcaatggctacagaacccgttgaacatggttatgtttttgtggatctttgtggttgctgtctccggtgcgattctattcatggttatgactggtatgttgaaccatgctttgcccaagaaatcacagagagatgtctggtttgaagttaacaaccaaatcctcaacgcattgtttactctgatgtgtctgtatcaacacccgaaacggttttaccaccttgtgcttctctgtagatggaagcaagacgatgttacaacgcttaggaagatattctgcaagaacgggacttacaagccaaacgaatggatacacatgatggttgttgttcttttgcttcacttgaactgttttgctcagtatgcgctttgcggtcttaacttaggctatagaagatccgagagacctgccattggtgtagctatatgtatatcttttgcaatagcagctcctacggctgcgggtttgtacactattcttagtccacttgggaaagattatgatcctcaaggagatgaggagaatcaagtgcaggctgtgggagaaggaccggttagtaatcgcaagttatctcttgaaaggagatattcatttgcttctaatgatgtgagtaatcctgaatggagagagggagttcttgacatatgggaagatatttcattggcttatctctctctgttctgcactttttgtttgtttggttggaacatggagaggattgggtttgggaatatgtatgtgcacattgcgacttttgttctcttctgtttagctcctttctttatattcaacttggctgctataaacattgataacgagatggtaagggatgcacttggatatactgggattgtgctttgcttgtttggtttgctctatggtggtttttggagaatacagatgaggaaaagattcaagttgccgggctataacatctgttgcgggagacccgcgattgctgattgtacactctggttgttctgttgttggtgctctttagctcaagaagtccggaccgcgaattcttatgaaatagtggaggataaattttgcaaaagaagagaagaaaatagtaagattgatgatgaggttgtcgtatctgcattgcctcgtgaagacggtgtgtttgatccgagttgcttgcctaagaagatgaccacgacgatgatagctagctctactcttagcccgagcagacagaaagatgaaacttgcttgggagagaaaggtgatgaagctctaagtccaccttctcctccattcatacacagagaagctagttagaacttagaactaacagattttaatgaaagtttgttaatgtaaaaccagatatactatatctaattgaaagtaaagtttaaattcgttttggggtttatggaatttacgagttataaacaatgtaaaacaggtttagttttctttgaattttcacgtaggaatacaagtgttgtttgaagtgtttcagttagagaattatgtttcttctcatcatctcatgtgagcttaaccacattacgttgatttggaccttaaagtgaattaaaaaaagaacaacttagcattagttgcttatgcgatcaatggtctcatcacgaccctgatgagaatcgtgtctaccatccacgtaaaatcaacagctgataaagtattaaaactttggtcaagcgaacatgtagaaacgattttcttgttcatatttgatgcatgtgtagcaactggagttttagccaatgttttgtttgtgtagcaattgcagttttcttataattcttctaatttctgcaattcactgaatttttcttacaatacaattttttgccttgatatacatacttcataatacatcaacaaaacaaagaaatgtggcagcaattttgttggtgttttatgcaatatgcatctcaatggcaattaaattccaacaaacaaagaaaactgataattatttgctttttatttaaattttgtagtgtaaagaaaatgattgaacatgaatttttcaattccaaatttcttcaattgttgttgtcaattgtcatacctatgaatatatgtatgtccatgataattcattagccaatatatccatttgagagatgttcattagctactatttttcctagttgataaggtcttaattaattatttatttaaattgtaaatggtctttattttgtgctgctatttctactaaaaattttattaaagaagaagttgacaaaaaaataaaagaaaaataaaaaataattgatcgcactgtcaaaccaaaaaaaattgaaaaccctaaattggttgaatgggaaaatcgatg

SEQ ID NO: 23157 - DNA, 3003 bp, Unknown
  misc_feature (1)..( 3003): 2750-1469P.txt file - cDNA_ID_2132179; gDNA_ID_1620369; Annot_ID_154947
tgagaccttgtggtgaatcttctccggaagatccttccaaagacccgtcatgatcttctgctgaaacggcgataacgcgtaaaccaccgccttcaatttcaccggctgctttcccattttcgacgaccaaatctccgatttcgataaatgcaactaggagacttttcaagccggctaatatgcatctctccgtcacaaaacgctgccgtttaagtgtaaaggcttttaatttcaatccacttaagcccaatggttagaatatgggccttttctttatgaatttgctaaaatccacgtggacggtagagatgctacgatgcagagagcggtctatggtgagggttattacacgagatcatgacgttaacacgggaaacaggttgcttcaaaagaaatcaattcattcgtacgggcctttaatccacgcgccttcttcgcatccccacgcgcagtcgtgtgtgatgatggctaatcctccaacgttaccgatctcagaccattccggtggtggttcccaatctcagcaacccgtatcaacaccggcgtttcgcacgttcctctctcgcctctcgtcgtcaatccgccaaagcctatcgcagcggcgtccatggttagaactcgtagatcgaagcgcaatttcacgtccagagtctctcaccgatgcgtattctcggatccggaggaatctcccttacttcaaggtaaactacgtgacgatcgtctccttggtgctcgcgctctcgctcctctcccatcctttctctcttctcgttctcctatgcctcttctgcgcttggatcttcctctaccttttccgtccgtcagatcaacctctggtcgtcctcggccgtacgttttcagatcgtgagacgcttggtgttttggtaattttgacaatcgtcgtcgtctttttaaccagcgttgggtctttattgacctctgctttgatgattggtttcggaatcgtatgcttacacggcgcgtttagagtcccggaggatcttttcttggatgatcaagaacctgctaacaccggcttattgtctttccttagcggagccgccacttccgccgcagttgccgccgcatcaactcctgcgtcaggtcgtgtttgaaggactctcttctctgtagacaacaaactcaattactatgattcttttattgtatttctgaatgcgactatgtaaggggaaatgtagaattgatcttcttggttttaagctgagaaattcttatgattcaaacattaaatggattcaacaatatctcgcattactcttccttagctctttttgtgacaaagattatggaatggttgattactattaagctttgagactaattgtgtttagtgtgtttagatgttgggaactaaaagtgtccgacgtaaaatggcagtgtcatcattccggctgttttaacgaatctcgtgtaaatacttttgtttttggttatggaaaatgacatgtgggataatcatcgagacaaaggagtaacgtaacaaagaagtttatcgtgaatgtttgttaaaatgcattatgaaagatttgaatattacttcaagagaaaaagtctatttcgttattggcagttagtttattgtttgaacgttacactctagtacagtgcataatatgctatgtttgttaagaaaaaaacaaaaacaataaaatgaaatcatgagattgttaaaccaatatgacccaacgtcccaattcatccgtgttctgactttaggttttctgcatctagatgttgtttgtattccaaattcatctttagagtttgagtctttgagatatgaatcttgatttacatttatatatattttttaaaatgaatggatttagacctacatatattattatgcaatagtcaattttcttataaataattaatattgttaagttattgagaaattcgtctaatacgaatagaaaattatttacccattttttagagtttggataaccaatagaagatacaacaaaatcattaatctggttacatataattaaataatatacatgtgaccttgagtttttgtttacttttgtttgttaaaagagtggccttggtattaaattgccaaactattcttactgatgatgattaatgatcatttgtgtatttggtaagacaggaaaaacttgggatttaaggaagaagcttgagacacaagcactagaacgtctagacgtgatatgaaatgacttgagttcaattcaactaaactttgttgaaattatgctaagtgttcggtgcaacaacttaattacctcaactaagtctttgctccctttcaatgtctcaacttcttctcaatttcggatggcgccaaaagaactagtaaactatttttcaagtttataacttatggcgtggaatataaaaaaacatgattacgcaatatagaaagtattcataaaactaataatgttttgatgggttaatatttaaaaaaatatcaagataactaaaacaacctttaaagggatactaaataatatcatttttactaacatccagatatttatttggcactcgaatcatttttaagaggtgtttaatctaatttctaaaccaacattatattttgaaaatggtatcatcatgatcctatgtccattaacatattttaacatatattttctgccaacatttttgaggttgatcaactcttaaaatagaagaaaactaaaccatggttttccatttgaataagtgtgaaaggaagcaagaaaacatagccaacgaactgataaagacacataaatatgttggtgaccggtaatttaatttttttcttttgaataatcagcacctaattcttccaacccctaaataatttagtaaaaaaattaaattcaatttactttaactataaaagggatatttccctcttcataattctctcaaacccttctctcatatatctcttaatctcataaacgttaatctcaaatttttcgtaatctcaaagcttaaacacacttaatg

SEQ ID NO: 23158 - DNA, 3003 bp, Unknown
  misc_feature (1)..( 3003): 2750-1469P.txt file - cDNA_ID_2132221; gDNA_ID_1620370; Annot_ID_154963
atatataaatttgtttgcaatctagttattcttttataattttaatatttttatttaatagaagaaaatatattaagatgatttacctccacgtctaggcgacccttatcaacataattttggtcgattattatcggatttttggtttctctaaatgtaagactcttaaaaagtatattttttgcgtatccctttccattctaaacaaaaataaataaaaataaatatcacttaaataaactatatcaatattgtcacaatagatccagctttagtattgaaaaactatttaaattttttattaccggccatgtcttaattctagctccattatccgtcctaatgaaagtgcaattagttacttggacattctcaactatagattcttctccatctcttcctacacttcccacactgtattttaattttatagataaagaagaaaatgtaatatatatatatatatagaatatataaaattagtatatgtacaatgctattgatgaatcacacacatatataccttattccatgaccaggtccacaattcatccttgcgatattgatattcatacttccgctgttaatagctacacaatcatctcctggaaagttttataagaaattttaaaattaaataatcttaaaataccatttgagattactttttaattagtgagtgtgcaagagagatatctagctatatataccagttccaataactgtgtcgtatatatcgacatcacttgattctgagatattaattccatcagtgttaggactatcgtggggtgctacgagttttatcttcgttattttaactcttttgcattcgctaatcgatatatggttttttggactgttgaatgaggttattccagttatcatgagatcgttgcatctttgaaaatgcaattgctgtaagaaaaattgaaagaaaaaaagaattcatcatgaactttccaaaatattgacgacgatcaatgtatataaataaataaaatattttcattttagaattcagaatgaattttagtgagaaaaagataaactcacggtaggccgtttagaagcaggcagtccttgctggatatattgaatatgaaaaaaagaggaaatattaaattaacacttttgtttatatataattaaaaatcatatcttttattgtgtatataaatttctttcaagattgccaaaaaataaaattgtttcaccttccaaaaagacgagccacgtccatgaattgttcccgaaccattgactgttaaaccgattatttccttaaaactaacccatctaaataacttatagtccgaccaagctgctttatttataggtgcaacaatctttccgtcaaactgcataaatgaatacatatacacctttattaatcagataatttgcacataaaattgtaaaaagatttataaaaatatcgataattaccttaacttgtacggaaggagatttacaagggccttggaaagtaagaggttgtagtaaaaatgttttgtttgatggaataatgaatgtttttgaattcccaccactaccacacatagcgctccatgctttcacaaaagcctatttattttatcaaaaaatcaaatgtattagaattcttaataactcaaattttgtgacaaaacgtatgactacgttgtaggaaaatgaaaaacctaataatagttatgtatactcaaaggctgtatgatattatattggtttgaatttttttttgaaaacttacaaaattcagatattttcataatataaaacaagataaaattttgcaatataatacctttgaatcatcggtaataccatttccatcggcaccaaattcaagcacatcatagatttggccgtttacaagaatagaatgcagtaaagtcaacaagaacacaccacgtagtatgatttcctacaacatacaaaatcaatgttagaaagaaagaaaacatactaacttttataaaaaactttactaacttcttatcattgtgtgatgatgatcagatgtaactcttaccattgtgtgatgatgatcagatgtaatgtagtgtatatgtatgtgatgttgatcacttaaatatacacatacaaaatcatgggtatatcttattaaaacatgttcatggatatagttttaaactttacatattttatgcctaaaatcattagttattatggatattatttcgcatataagtgatataatctctcttttatataagatttagaaataaataaaatagaatttgaagaaatagtaaacaaatacaagttaaaatagaaatgaaaatacttgaatataagggggtactaagtaaaaaacattttggaaaactcaaaaatagaattaaatttggatattgtgatctcattgcattattaacttatatttaacaaatacgagtaatattctgtgtaactacacagccattgacattgaaaactaaaatgcttttctaattatttggtagtgtgatttgcaatatatatagacagtaacttgaactaaaatctgatatgatgaacttattaatataatgtattaatcggtttgatgtacgataaaatgttttaaattatccactagtagggttgcatacatggtacattcaatataaccctttcaacgacaagaacaagcactaggtttctgattttaagctctaaactatgtgatttaatttatttgtttgaaaaaaataaagtgtgctagaatatgggatcatgatcatttccattctgaaaattaacgatgtacatttttttttaaaagatagtgtatattaattagtttgttatagttttgaccaaaaaattaaaataaaattatcagttagttaaatttaaaatccaatctgaaaaagatatatatgtaacaaaatttgtttttttaaaaaacactctctgcgtctggaaaaaaaaaaaaagattaaaaaccaataaagaaagtttcggaactaattagggcttccttttgcttacatg

SEQ ID NO: 23159 - DNA, 3003 bp, Unknown
  misc_feature (1)..( 3003): 2750-1469P.txt file - cDNA_ID_2132235; gDNA_ID_1620370; Annot_ID_154971
gtttcaatgtcttgaggacaaatgagtttgagttttgtgatattagcccatgacaaatcttgaattttgaatgatattgggctggtttgaatttggtccattagttttcatcaaaacacaagaggggtaaaacggtctttgactatttgctgtattagaggagggctgtattagagaggacagaagaaactaccctatcagcctattttttaaaaaactgtctagttctcaaattatttctctaaaaactgcctagttctcaacttatctcattatacttctaatctagaagggcatatttttagtcataactcatttttcactttttgttgtttacttacacatattaatgcattttaactttatttgtctttgcccatcaataattcaaagattattattctatggtttttattgtccatgcacttgtttttaactatttttagtcagttttaatcatttctttatacatttttagactttgaatttcagtcacaatagtttatatatgatctgatttgtgttgttaaaaatttatttataaattattccggtaaagttttcttacttaaatattgaactacattttgtgtgatatatagttgttaaaaaatcatttttatacattaaattatatttttattttgcctatggcatcaaaaacctttggcacggctctgtgtacgccgaatgatgaatgtgtaagtgacgaggaagaagatgaaggcactgggcttactaatgggctgcgtccgagacagtcctcacgtgtaaggaagcccaataagaagtatttggattaagagagacttcgtctccacattttcaagttctgcaaataagtgtggaagtggtctccctaattgttaggaaccattatcacctctttcccattatttcccaaattgtaggactggtgttcactccattgcattgttgttttgttcttctatttaagaaatgaaaaagccaaaaagaggcaatatcgattgcccaaaaatctgagtctcattgttctttctttcaagctttcttttaccttcggtactaaaattgtgatacgacgaggtcatatctatcaccgaaccaggtaactattaagtggataacgtctctgttgaagcgaatggccatgaaacctttcggtaaaaagtcctggtttaagataatacagattatagttctatcataattttgtcagtttgcactgtaaccatttgctttaaaaatgtgaagatttaaaactggtttgtcttgccttattgattaaaaagcaaaaatcattaataagatcctctctgattcattttatttcttctacattgggatcttcatacgaattgggcattggcaagacacggccgagctgcagaatatctatagccaccggcaatggattgactagtgtcccttaagttccgtgaagttaattaagaaaatagccggctttacccgggacacatatgcatactactcaactatttttttaaaacaaatattttaacaaagatttaatgcgttctaaatcccagggcatttttgtgtgttaacgtcttccgcaaggtacctccgaccagtgaccaaccaccgttctatcgccaactttagatttcgaggggtcaatgtctgtatagatggcttcaagcggaacaggggaaacttacaagttacaacacctcttgaaaaaatttatgtactcgaaatttcgggtttgatcttctccaagaggttcccaaagtcaaatagtgcttggaggaactagtgaagattgactgcaaacataaccgcccacacctcagaaagtcagagataatatttcgtgatacttcatgaatgatggaaacttggggtttaattaggtcccaaatttttcggtatatgtgattaaaagggtttaaaagtcttaggtaaagaaacattaaaagccaattcggttttattgtttgtgttatgttactagagtaccttacactatttcgtgtctttgatcttaattttaaatcgcatggatgatccctagctagaataattgtatcataagcaaaatgatcaagagtggggctcacttgtctaatgcgttttttgcagcatctctaaccctactctattttttctctaaaactctattttagaatacattggcttcaacttctctctatatgttactctaaaatatagtaaatggtaggattgttctagatatatagtaactctattttatttacactgcctctattttagagtgatacattggaaagaaatcatgctctattttagaattacattgagatggtctcaatgattttttttatatcttatgaatgccattatgacttgtgatctgtgtgtggatataagtaaagtctaactatacaggtggggtattaattgatttcttgatgatttttatagttgatatatatgtgattatttttgtctaactagcagctagctatgagaacattaaattaatttattgtcttataaccgagaagagtactatatacttctgttggcccggtctcgttggtttctctgatgcatattgcgtaacgggttttggtgttttcgtggagagttaaaagcggttaagaaagagcttcacatacatgatcagtgattagcaagttttgttgcctcgcaattggttatatgagacattttaagaatgctaagtggttatttgattttcttgttttagttgtatgatattttattgtattgacatggattactactgtgtctctttgtctagtttttgttttgttttttgattgtgtaaccaactacccagttttgcagttaagattatatggattaatttaaggctcactcaaatccggtcaactattctaatcttctttgtagatcaatgattaataatggaatcaattatgattaagtaaaacacaatgaaaccattgaatcaaacgttcttacagaaaaaaatacttcttgtttttcctcagcaaatagtttcctcaaaaaccattaccttccatg

SEQ ID NO: 23160 - DNA, 3003 bp, Unknown
  misc_feature (1)..( 3003): 2750-1469P.txt file - cDNA_ID_2132238; gDNA_ID_1620370; Annot_ID_154972
gtcccaaatttttcggtatatgtgattaaaagggtttaaaagtcttaggtaaagaaacattaaaagccaattcggttttattgtttgtgttatgttactagagtaccttacactatttcgtgtctttgatcttaattttaaatcgcatggatgatccctagctagaataattgtatcataagcaaaatgatcaagagtggggctcacttgtctaatgcgttttttgcagcatctctaaccctactctattttttctctaaaactctattttagaatacattggcttcaacttctctctatatgttactctaaaatatagtaaatggtaggattgttctagatatatagtaactctattttatttacactgcctctattttagagtgatacattggaaagaaatcatgctctattttagaattacattgagatggtctcaatgattttttttatatcttatgaatgccattatgacttgtgatctgtgtgtggatataagtaaagtctaactatacaggtggggtattaattgatttcttgatgatttttatagttgatatatatgtgattatttttgtctaactagcagctagctatgagaacattaaattaatttattgtcttataaccgagaagagtactatatacttctgttggcccggtctcgttggtttctctgatgcatattgcgtaacgggttttggtgttttcgtggagagttaaaagcggttaagaaagagcttcacatacatgatcagtgattagcaagttttgttgcctcgcaattggttatatgagacattttaagaatgctaagtggttatttgattttcttgttttagttgtatgatattttattgtattgacatggattactactgtgtctctttgtctagtttttgttttgttttttgattgtgtaaccaactacccagttttgcagttaagattatatggattaatttaaggctcactcaaatccggtcaactattctaatcttctttgtagatcaatgattaataatggaatcaattatgattaagtaaaacacaatgaaaccattgaatcaaacgttcttacagaaaaaaatacttcttgtttttcctcagcaaatagtttcctcaaaaaccattaccttccatgggcgcctccttctccctctttaccgacgttggaccgatcccgcctcagtatcaagtgttcatcaacttccgaggcgaaaaacttcgtgatgggttcctagggtttcttgtggatgctcttttaaaagagaatgtcaacgtttttatagatgatcatgagcttagaggcagagatcttgatcatctcttcagtaggatcgaggaatcgagagtcgcattgacaatcttctccaagaacttcaccaactcaagatggtgcttagatgagcttgctaagatcaaagaatgtgtggatcaagaaagtcttacagtgattcctatcttctttaagatgaaaacagacgatgtgaagaaactgaaggggaattttggagacaacttccgggacctgaagttaacgcatcgcggcgagcctgaaacttatcggagatggaaagatgctatactgtatgtttctaagaaaactggcttgtcttcgtcacgatacaggtctggactttgtccctttgcttatgttctttgttggaaacttggaatactctgtttcttgactctgttcttggttagttcaggacataagcttgttcactgacagatcttttgaactctgttatgacagtcgccagaatgatttggtcaacacaatcgtcgaggaggttaagaaagttctaaacgatatcgccgagatcgaacgacaaattgctgaagagaagcgcaaccatttggcggcaagaacagatgaattgattagacttgttgtccggttcctaagtctgtttcttctttttacaatagtttttggtccttatgttttaggccttctcacttttttctcttttcttgtgggtcgtttgataatcaatcgagctgtggaaagtgagtggtgaatggtaacgtttgcgtttctatgagaatacgtaaacgcaaagaatctgagactgagagtttcattttggttacacattgttgcattcgatatttttttctatgaaataatttgatttcgattagtttgaccttgcatcaattattgataaaagtgattacgattaataacactatctcctttataacctaccacctaagacttttggtcaactactagatcaatgagacttccacatgttttatttggttatgatcttgaaatagaagaaaaaatacaaatctaaagataaatgtttctttcaaagtaaccacttttcactcttttgctttatttttcttgtgcaaaaagttcccaaagtctccgcttctctattccaaacagttaaaacccaaagaaacacatagtctcttcgcttgaccaaagctcaaaaaaaggtcagaataattcatatgaagttgttgagtgtccctaaaaacacgagatgtctaatgaagtcatcaagcagctcggtagtcgtggtcgtgcttgaccaaagctcaataatggatccagcacgaccacgactaccgagctgcttgatgacttcattagacatctcgtgtttttagggacactcaacaatttcttatgaattattatgacctttttttgaaaaaaaagtagttaaatctaaatatctaatacaagaatagtttaaggatagtttacatttgttcattgaatatagatgaacaaatatctaaatatttgtcctatatttccaatttttccataaaaaataataaagaagacagttgccaagagttgacttttgaaatgaatttttcctaaaaaagaaataaatgctttgacttttgaaatgaattggtccaaaacaagaaatgaatcttttacttttccagcttcttcttctccatatattcatgaagaaaaattaaagcaagaaagtctcaactctcaaccctcccatg

SEQ ID NO: 23161 - DNA, 3003 bp, Unknown
  misc_feature (1)..( 3003): 2750-1469P.txt file - cDNA_ID_2132260; gDNA_ID_1620370; Annot_ID_154978
gctacagaacaagaagtttcttccatatatttcggttttcttagtttgttgtgatgtagatatgatctccgtagatattctaagatagtgtttgtaatctatttaaacgcttgtaatttcagttctgaacatatcgaaaatacatttctcttccattatgatctctgaatctatagacagtagccctaggaatcgattttgatgttgttgttgttgttcatgctctagggatggatcgcgattatatcagcgaattgccggattctttactaactcagatactcttagagcttcgaaccaaagattctgttaagacaagcgtgttatcgaagagatggagaaatctttggttaaacgttcctggactcgaattattcacccttcaattcacatatcctgatcgcgaagaaatctttgtaaggtttatggacagatttatggagtttaagtgcaggtcacgcctgaaaaagttcatgataacgtatgtcgattgtaaaggttatcgagatcgattaatggagttgatcggtacactggttgatcatggacttcagcatttgtatgtttttatgcatacttttgacagagttgatttcaaacgtcaaaacatttacaagagcaagacattggtctctttgaagcttcataacgtagagttaaagaattcagactttgttgtttctctaccttgtctcaagatcttgaaactggagaatatttgtcacggtgaggatggtcctttggttgtggagaagctcatctcaggatgttctgttcttgaagatcttgagctgattaggccttttgatattaggacacataaagttcttctgcttctgcgtgtgagctctcagactctgaaaagctttaccttacattttgcgatctataaggatcgtacagatttttcagttgagattgatgctccaagactcaagtatatgactgttgaacagagtcaatctgatagcattgtggtaaagaacctgagttccttgttcagcatcgacattggtactaaatttaatcctttgagacatgaggatctaaggatgcgtaatgttttctacgattttttaaccgggatatctagtgtaaaacatatgatcatctgtttgtggagtctccaggtatgtgtttatataacaatttaatgtattaattctcaatgaaacatatctgatttgcatttattcttcttgcagaggttttctccttattcaaaacccggactgattcccaaattccagaacttgtatcatttaaaagcacagatgtggagctcatcaacacacttattggaagcgtttcttgagagctgcccaaatctgaaaaacctcatcttggtaagaagaatctgtgattttggcaaaagaacattgttgaaacatatcgtaaaaactcagcttgttcatttcgcaggaatataatgttgaattggatcgagagcaagtggactttaccaacgtgcctcaatgtttaatatcgacgctggagtatgttgagattaaagaaccgaatgagaaaagtacgattaaactagtgaactactttcttgagaattcagcagtcctcaagaaacttactctacgtttctcatattcatcttctatctacctaaagagctacaagaagcttcttacatcaacaaagctttctcccacatgtcaagttatctttggttgttgaacattgtttcagtgacgttattcctgtagtttggctttttgttgctttgatttcaatttcaggacagagtttcagtttaattatagttttctcttttttttttaataaaaatttttattttcaacataataattgtagtttatatacattttaattaataattgcatttctctggttgtataaaattctaattgggttttggattcataatttatttgctattaaaagcttacgttactgttggtttaatgagttcttcagaatcctaccttgatcgttacgtttctgtgtaatttttggcagaaatttattaaaagctttccttactattcgtttggtgagttctacagatatgctattaagaacttcactgaaagatttcttgagtttaacagttcaagatgaagaatgatcatcacagccgttgatagcgggattcaacatctagatgttgagacacaaaatcctagtcctaggtatgttatagatggaatacctatgaacatttctaagagcaggacattggtgtctttaaagcttctataagaagggatgtagaatccggagttttgtgtttctctaccttgtctcaagatgaagcatcttgaaaatataattttatacggaaaccatggtcttgtgaagaatctcatctcagggtgtcctgttcttgaagttatcatttctaaacatgtatctgatgtcagtgagagcatgaacattatcattatggtttacgatgttaaaaatcttatggtgttaattataatgtcttgtacagagttggattgtctcatatgcttgaaaagtcgtattgatctctgtttcttggagtagtttaatcatctttgcattcaaagtggtttcgaaaagtcccatggtcaattgtttaatatgttggtatggttgacttcaaggttctctgttcgaaacatttgtccaaagaaacaacattttgttttttagaaataacatttgtcaaaagacttttcttctaatccaagaagcttctttggctcgccaatattgactcaaatattttcacctttatcaattacgtaccatctaagaaagcagttgaagactcgctcgctacatcatcctggtcaatttctgatcgaaatcgtatcttgcattcatttttgtgttaggtgcatatttactttattcattcttgatcacttaagtttttgtgtgtgtttctggttaggttgtaccctgcagatttaattgggtaatctatagtttcacaatgatgttttaatattataagctttgtgttttttttttactctccagtgtacatcaacaatg

SEQ ID NO: 23162 - DNA, 3000 bp, Unknown; identical to SEQ ID NO: 1205
  misc_feature (1)..( 3000): 2750-1469P.txt file - cDNA_ID_2132303; gDNA_ID_1620371; Annot_ID_154987

SEQ ID NO: 23163 - DNA, 3000 bp, Unknown; identical to SEQ ID NO: 1206
  misc_feature (1)..( 3000): 2750-1469P.txt file - cDNA_ID_2132317; gDNA_ID_1620371; Annot_ID_154992

SEQ ID NO: 23164 - DNA, 3000 bp, Unknown
  misc_feature (1)..( 3000): 2750-1469P.txt file - cDNA_ID_2132402; gDNA_ID_1971812; Annot_ID_175798
agttgacaaagcttaccaagaaggacattccattttaatggactttatgaacagaggaatcttgaaaatacaagaagacaacatggtggttccagagttctccatgagcaacctattagatcttcaagattgtggattctttggaagatcttctcttggatttgacagagtttacggtggagacaagagaaaggggctagggaaaatcatcttgatcgatgatatgatacagacaattcaatcgaagaagaagaatatcacgacgattatcgctagcggaaaccgtttacgtagagaggttcatgggaagttctttgagaaaccagagatgcaagatcttgaagttgtagtcctctttgagccaacgttccatgaacttgttctgtctttatctaagctaaagaaactccgagtacttgttatcagagactgtgatctaatcgataacatcgataagctcagtggtcttcaaggcctacatgttcttgaagtctctggtgctagctctctagttaacatccctgatgatttcttcaagaacatgactcagcttcaaagccttaatctttcgggacttgcaatcaaatcttcgccttccacaatcgaaaagctaagcatgcttcgttgcttcatcctaaggcactgctctgagctacaagatctgcctaacttcattgtggaaacaagaaaacttgaagttattgacattcacggagctaggaaacttgagtcttactttgatagagttaaagattggaaggactataaaggcaagaacaagaactttgctcagcttcagctgcttgaacacctagacttctcagagactaaaatcatccgtctgccgatatttcatctcaaagactctactaacgatttcagtactatgccaatcttgacccggctcttgctgagaaactgtacaaggcttaagagattgccacagcttaggcctttgactaatcttcagattcttgatgcatgtggtgctacagacttagtggagatgcttgaagtgtgtttagaggagaagaaagagcttaggatcctcgatatgtcaaagacaagtcttcccgagttagccgacacgattgctgatgttgtcaatctcaataagcttctgttaaggaattgctcactgattgaagagcttccaagcattgagaaactgacacaccttgaagttttcgacgtttctggttgcattaagttgaagaatatcaatggatcctttggggagatgtcttacctccatgaagtgaatctttcagaaactaatcttagtgagttacctgacaaaatctcagagctatctaaccttaaggagctcatcataagaaaatgttccaagctaaagactcttccaaaccttgagaagctaacaaatcttgagatcttcgatgtttcgggctgcaccgagttggaaacaatcgagggatcattcgagaatctgtcttgcctccacaaagtgaatctttcggaaactaatcttggtgagttacctaacaaaatctcagagctatctaacctcaaagagctcatcctaagaaactgttctaagctaaaggctcttccaaatcttgagaagctaacacatctagtgatcttcgatgtttcgggatgcaccaatctggataaaatcgaggaatcattcgagagtatgtcttacctttgcgaggttaatctctctgggactaatctgaaaacgtttcctgagttgccaaaacagagcatcctctgttcttcaaaacgtattgttctcgcggattcgagttgtatagagcgagaccagtggagccaaataaaagagtgtttaacaagtaagtcagagggctctagcttctctaatgtaggggaaaaaacccgcgagaaacttctttatcacggcaatagatacagagttattgatcctgaagttcctttgaatatcgatattgttgacatcaaaagatccactgatcttaaaacagagtatatagccaaagcagagtatgtctctatagcagagaatggatccaaaagcgtatcttctctcttcgacgagttgcagatggcatcggtaaaaggttgttgggtagagaggtgcaagaacatggatgttctcttcgaatcagatgaacaactagagaaagagaaatcatcatcaccatcattgcagactctttggatctcaaatcttccattgctaacaagcttatacagtagtaaaggaggattcattttcaagaaccttaagaagctaagcgtagattgttgtccaagcatcaaatggctattcccggagattcctgataaccttgagattcttcgtgtgaagttctgtgataagttggagagattgtttgaagtaaaagcaggagaattatcgaagcttcgtaagcttcaccttcttgatttgcctgttttatcagtacttggagctaatttcccgaatctggagaaatgcacaattgagaaatgtccgaaattgaaagctagagaagatgaaccgaggattggagcaaggattacagatgaaatttcagaggatcaacctcacaagtaagtgaagttaacaactaaacaaatcgaaactttattttgttttcacactctctgttctgttcttcttcatgtgcaggaatactattgggcctgaaacccaaactcctacccagcccacaaaagctacagacacagtttaatctctctgttcttcttcacacgacgaggatgaagaaacaaaatttccgctgatcttatattatctcaccgttaataattatccaagtcttgaactttgacagagcttgtaattcgaaacttttcaaaatggttactttgtgttgtgttgtgtgaactcttaaaataaagaataaatgaatgttattttatttttagtcgtcttcaagttttggtctgcgatcgtgaaatttacgcagagagagatcagaatcgaagaaaacattgcaatataaaagagtcaccttcgagttcgtgtctcactccgataaagcaatg

SEQ ID NO: 23165 - DNA, 3000 bp, Unknown; identical to SEQ ID NO: 23164
  misc_feature (1)..( 3000): 2750-1469P.txt file - cDNA_ID_2132402; gDNA_ID_1620707; Annot_ID_165323

SEQ ID NO: 23166 - DNA, 3000 bp, Unknown; identical to SEQ ID NO: 23164
  misc_feature (1)..( 3000): 2750-1469P.txt file - cDNA_ID_2132402; gDNA_ID_2926173; Annot_ID_199630

SEQ ID NO: 23167 - DNA, 3003 bp, Unknown; identical to SEQ ID NO: 20076
  misc_feature (1)..( 3003): 2750-1469P.txt file - cDNA_ID_2132434; gDNA_ID_1620707; Annot_ID_165338

SEQ ID NO: 23168 - DNA, 3003 bp, Unknown; identical to SEQ ID NO: 20076
  misc_feature (1)..( 3003): 2750-1469P.txt file - cDNA_ID_2132434; gDNA_ID_2926173; Annot_ID_199644

SEQ ID NO: 23169 - DNA, 3003 bp, Unknown; identical to SEQ ID NO: 20416
  misc_feature (1)..( 3003): 2750-1469P.txt file - cDNA_ID_2132471; gDNA_ID_1620735; Annot_ID_166230

SEQ ID NO: 23170 - DNA, 3003 bp, Unknown; identical to SEQ ID NO: 20416
  misc_feature (1)..( 3003): 2750-1469P.txt file - cDNA_ID_2132471; gDNA_ID_2926170; Annot_ID_199420

SEQ ID NO: 23171 - DNA, 3003 bp, Unknown; identical to SEQ ID NO: 18298
  misc_feature (1)..( 3003): 2750-1469P.txt file - cDNA_ID_2132547; gDNA_ID_1621126; Annot_ID_172317

SEQ ID NO: 23172 - DNA, 3003 bp, Unknown
  misc_feature (1)..( 3003): 2750-1469P.txt file - cDNA_ID_2132580; gDNA_ID_1620660; Annot_ID_163780
tggctccatgtaactaagaatagaagttacagaacaatcgtaattaccaaaagagacgtcttcctttattcttttcctgttcagtagctcttcttcttgtacacataaacggcctctcttggacacaacaactttatccaaggcggtttcgtttagttctgtatcttttccagatatctctttctcaagattattctcgtgtaacccatgcaacctacaatcattctcatctggtgcatataacaagctcatcccgcatttcaccacctcacagcaatctagttttcttttggctctgccatcagtaacaaaaaatttgaacgaggctgtggtgttgcaacatctattgagatcatcgtttttcttggcatggtaacagttgctataactgatgaacacatgatcagagctaagtcttcttgattcttcatggctagacgatccacactgctctttccatcccccaagattacatgtaaagctgatgtaatcaccgtcttcgtttctgaacttgcacttgcatatcacggagaaccggctggttctatcttcatagtccttgaaagagacaaccgtgcagagagaaagaccaatgaatttatcgtcgcaccagtgtgaaggcaggttggtttccattgaagatccaattctctgatggcggaaccatagtggcaaatcattccctggaaaacttacagcagataaaggttccaaaactagttcctggaaaaaccattaaggatagcaatgtcactggaataataacagaataaccagagattggaccttatgattaagttgaaaagatctattcgccagtatttgactcttgagctgagtatgagccacaattttttcttgtgcatctcggtttagcttgtagcaatccgtgaatacgaaagtagaatgggtcttttcagctatcactagaagcgtcatgggttttgaaactgtttcgagtgagatacagccatgaacatccaagtactgatttgatggaagcactggaagagaaatgagatttttgcaattctttaagtaaagagatttgagatgatgaagtttcttgatgcttcctggtagattctcgatactgtttcggctcaagcataaagactgcagcgaggataagcagctaaaattgtccgggaatttgtacagattacaatctgtgagatacatgtctgataactgagagcaacctgagaaaggcagcaactccaaacctctgaaatcttggactttagatccaccaaacgaaaacagcttgagattactcatacacattgttctgggagtttgtttgatggatgtatcatccattagcagaatctctaagcttcccatgtttgtttggggattccatgttttaccagatgcccatgttacatgcagacaggagactgcaactttggtattacagtatgtgtaaattccatcatccgagtgagagagaaacccatgtccttgagacctccttaagctccaaaggcctcccttcacggacggtgagccatttcttaaactagcagtagcaatctagcagacgttagttttctttgcttcaaacctcattcttttgaactaaccaacaccaaaagcttgttcgacttcaaactgaactctgtttttctaatctcattactatcatctgtgtttatcgcttgctcaatttttgctccaatctttcgacatggagaacccgtgtgtaccttatatttttacagtggaaactgcagctccggtcccacttgtatctttgatcatccgatgttggtatcaacacacaagaacatatcttccatggcttccgagacacagcacttgaatccgctaggattgtcctcttcacttggggcttcatcaagtgatattgtggaagcatcagccaagaaacccagaatatacaagaacacttcttccgtagcgtctgatacaccacactcgaatccattaagattttcttctccaattggagattcatcaagtgagcttgtggaaagatcaactaaagaaactgtaatcaacaagaacacaccttccatggcttctgagactctgcatgctaatccactaagattttattcttccattagagagtcatcaagtgattgaagtgaacttgtggaaacatcagattagaaacccatagtgcataagaacacaccttccatggcttctgagacaccgcacttgaagtcggtaggactttcttcttcgcttggacctttatcaagtgagcttgtggaagcatcaactgtgtctgaagtcacacaagaaaccgttagtagaggtgtcattgaagtgaagacttaaaatttttgtggttaaacaaaatgttgtattttaaaatattgttcttctaatatatattttctaatattaacatatgcttgatccaaaaatttccatgagtaatatatgaaaacaacataattaagtaaaaaaaatacaaggcatttttccaaattaactcaaacaaaaatccataggatatttttcaaaagtataaacaaaacaaggcatttttccaaattaactaattagaatattacaaattttgttagagaactatttgatttattgaattgaaaagatatttgtaatatagtaatattaattttactagtaatgaaaatcagttattcataattacagaatcaaactgacatttatccttttctgtagatgacgtggatacctaatgcaccgtcgattaaatctgcgtagtgaaaccccgcactgctcacagcaccacctctctcgaaccatcgagtctcgaacccagagaggactttcctcagtgagtcctccgttccttagcttctcttccagatccaaactctcaccaaactttctcacaacacacacacaattcgattcgatccacactcttaaaatcccaaagatctctctgattttgaaattcgattcttccccagatcaacttgtgaatttttccacaattttggttcatgattttgatttcgtgaaggacttatg

SEQ ID NO: 23173 - DNA, 3003 bp, Unknown; identical to SEQ ID NO: 23172
  misc_feature (1)..( 3003): 2750-1469P.txt file - cDNA_ID_2132580; gDNA_ID_2926174; Annot_ID_199702

SEQ ID NO: 23174 - DNA, 3003 bp, Unknown; identical to SEQ ID NO: 17818
  misc_feature (1)..( 3003): 2750-1469P.txt file - cDNA_ID_2132651; gDNA_ID_1621089; Annot_ID_170621

SEQ ID NO: 23175 - DNA, 3003 bp, Unknown; identical to SEQ ID NO: 17818
  misc_feature (1)..( 3003): 2750-1469P.txt file - cDNA_ID_2132651; gDNA_ID_2926192; Annot_ID_201162

SEQ ID NO: 23176 - DNA, 3000 bp, Unknown; identical to SEQ ID NO: 6335
  misc_feature (1)..( 3000): 2750-1469P.txt file - cDNA_ID_2132684; gDNA_ID_1621089; Annot_ID_170634

SEQ ID NO: 23177 - DNA, 3000 bp, Unknown; identical to SEQ ID NO: 6335
  misc_feature (1)..( 3000): 2750-1469P.txt file - cDNA_ID_2132684; gDNA_ID_2926192; Annot_ID_201175

SEQ ID NO: 23178 - DNA, 3000 bp, Unknown; identical to SEQ ID NO: 6346
  misc_feature (1)..( 3000): 2750-1469P.txt file - cDNA_ID_2132692; gDNA_ID_1621089; Annot_ID_170641

SEQ ID NO: 23179 - DNA, 3000 bp, Unknown; identical to SEQ ID NO: 6346
  misc_feature (1)..( 3000): 2750-1469P.txt file - cDNA_ID_2132692; gDNA_ID_2926193; Annot_ID_201208

SEQ ID NO: 23180 - DNA, 3003 bp, Unknown
  misc_feature (1)..( 3003): 2750-1469P.txt file - cDNA_ID_2132716; gDNA_ID_1620686; Annot_ID_164607
gtaatcggtttagcaacacgaggagtagcagcagagacggttcgagccgtggttaccacccttggaacagacggtttctgggcggcgcgtaggttaaggtccagtgaagacgcgcttctcattatcattgttagttcttgtggggaatatttcagtggaggaagagaagagagatgaaaagatatttagactgcaaaaatatcatggagtttccggttcttgtcaagccccacactattagtcaatattatcaaattgaccccaaagttttatcatttttggttacacccttgcatcattacatgttcattcaaaacgttatcgtaatacaagaatagtaagttaatctctaactttagatacgagaacgaaactaaaagctagttagcaaataaaacattttgaaagtatttgcattatcaggccaaaaacataagtagccttttctgtaaattctacgactatcttaactagatatcatttttggggattgttcccttatttatatatatcaaatcttatcggaaaacaattgttataggcttcaggaccaccataatcgaatacccctaaagaaaatatttcaatttgattggctacggaaagacgtaagtaactggatcaaagaatttgattctgtcccacaaataagttactttttgcattcttgaacttatttccacggtcatgagtcatgaccaaaccaagacatttggatttggatatatcgaataattttgctagaattgatgagaaatgactgacaagctttgatagtatatttaatgactaattgctgatgattttttacaatgacctaacaataacggaataactatggaagttttattattcaagataaaaccagttaataagtgttcacgatacaaaaaatcgattttcatcatcagtagtataaatgtggtataactaaaaaaataaagaaattgaccataaggtgatccaaatttcctaatttcatttataaaagggcaataaatatacactaaaaatgatatggaacttgaaaaaagcaattaaactgtgtttttctgctttctttatatagtataaaaatatttttttaatgaatcatatgtacaagccttcttcctcccaaacatcaacaaggaaatgcaccatctcctgtaccaatatcatcatcaatttaaaaaaaactttcctagcaacaatgatatatactagattcaaatcctgatatgaaaatgttctaagggggataaagaatcttctgctgtaagttaattaaaattaagagttatgattagcagaaaacaactaattaaccaaatcaaatcaccttaagaggtattggttgaggaaaaagcttgtttgtgctcaataagctatcatacgtcgagttccagctgaaatcatatgaattcaaagtttcattttaacattgacgaattcagtagaccaatcctatataaacataaaaatagttcgttcaatattcgtaactgtttgtggttgtcaccttattgcaggttctggaactagacattgttgtctggttaagcattcacgccattgttgtctcgtgtggttccacaaaataagtccttttatggaaggaaatgaataagtagtagtgtatcttttagtgtatagaataactgaatgagtaataaatactgcttgcttcataacataagtttttggcatccaaaacaacctaggccttagaagttagaacattcaaaagttaccatggtttacaaattcggtagagttgcttgtgctgcattggggatcaaaaggcgggtttgaagattgggactgaatcgttatattgtggtccatatcacacgtacttgtgctccagaagtcatctgatgaagcactatctttcttcactatctttccttggattttgagtccctttgatggctcatcgacttccacaactaaacgcctttctctgttgcagcatccgaaacagtttatgctctgaaagattgaacattatgtcaatcatttgttactatggtctaatatgtttgatctacttggaaagaaatcaatttggttctccgggtcgctcacattgatgagagttttgcaatttgatcgtagagattccattagccaaaaagggagagtttggaagtaagctgccgggaattggaagaaagagcaacaacgcttcttactaaattgtgttcgtaattttagcaagaatgaataacaagaacacatagctagctaatacatgacaggacaaaagcacaatgaacatgaaagagaattaaggaaactcaaaaaagattagcaaggaagtgtagtaatatgcctcatatgacaagcaaacatatgcatttaagcacaaaaggaatccatatgttataacttacaagcaagtaaggcatattatgccgcataattacatattttaccttgatttagtacaaagtctgtctctgaactgaagcacatatatacatccacatgatttaatagaatcttgaaaagaattcaaaagaaagaaaacaaaagtttaaacaccttccaacaaagggtattgttaaaaacactcgatcattattacgttgattttatatttcttctcttcttcacgttatttacagtttttttttcatgtaaaaatgatcttttcgtttgattcctatcgtaattgtaagtaaacaaaataaattttagtattattttaagatgagacttatatagatatgaatctatgtgaattattaaatttaatgataataaataaccaaaaactttaataaaataaactgttacatattgtaaaaaaaaagatttttataaatgtttatattcaaagagagaatctttattgagtacaaaaggaggaatatatgtgatagatctaattacataatctactttacataaatagaagaagatatcgtggagtgattgatatgtgattgatctagtcagatatcatgattgatccttaacaacttatatagtagttatgaatctacgtgaactatg

SEQ ID NO: 23181 - DNA, 3000 bp, Unknown
  misc_feature (1)..( 3000): 2750-1469P.txt file - cDNA_ID_2132716; gDNA_ID_1620621; Annot_ID_162300
atcggtttagcaacacgaggagtagcagcagagacggttcgagccgtggttaccacccttggaacagacggtttctgggcggcgcgtaggttaaggtccagtgaagacgcgcttctcattatcattgttagttcttgtggggaatatttcagtggaggaagagaagagagatgaaaagatatttagactgcaaaaatatcatggagtttccggttcttgtcaagccccacactattagtcaatattatcaaattgaccccaaagttttatcatttttggttacacccttgcatcattacatgttcattcaaaacgttatcgtaatacaagaatagtaagttaatctctaactttagatacgagaacgaaactaaaagctagttagcaaataaaacattttgaaagtatttgcattatcaggccaaaaacataagtagccttttctgtaaattctacgactatcttaactagatatcatttttggggattgttcccttatttatatatatcaaatcttatcggaaaacaattgttataggcttcaggaccaccataatcgaatacccctaaagaaaatatttcaatttgattggctacggaaagacgtaagtaactggatcaaagaatttgattctgtcccacaaataagttactttttgcattcttgaacttatttccacggtcatgagtcatgaccaaaccaagacatttggatttggatatatcgaataattttgctagaattgatgagaaatgactgacaagctttgatagtatatttaatgactaattgctgatgattttttacaatgacctaacaataacggaataactatggaagttttattattcaagataaaaccagttaataagtgttcacgatacaaaaaatcgattttcatcatcagtagtataaatgtggtataactaaaaaaataaagaaattgaccataaggtgatccaaatttcctaatttcatttataaaagggcaataaatatacactaaaaatgatatggaacttgaaaaaagcaattaaactgtgtttttctgctttctttatatagtataaaaatatttttttaatgaatcatatgtacaagccttcttcctcccaaacatcaacaaggaaatgcaccatctcctgtaccaatatcatcatcaatttaaaaaaaactttcctagcaacaatgatatatactagattcaaatcctgatatgaaaatgttctaagggggataaagaatcttctgctgtaagttaattaaaattaagagttatgattagcagaaaacaactaattaaccaaatcaaatcaccttaagaggtattggttgaggaaaaagcttgtttgtgctcaataagctatcatacgtcgagttccagctgaaatcatatgaattcaaagtttcattttaacattgacgaattcagtagaccaatcctatataaacataaaaatagttcgttcaatattcgtaactgtttgtggttgtcaccttattgcaggttctggaactagacattgttgtctggttaagcattcacgccattgttgtctcgtgtggttccacaaaataagtccttttatggaaggaaatgaataagtagtagtgtatcttttagtgtatagaataactgaatgagtaataaatactgcttgcttcataacataagtttttggcatccaaaacaacctaggccttagaagttagaacattcaaaagttaccatggtttacaaattcggtagagttgcttgtgctgcattggggatcaaaaggcgggtttgaagattgggactgaatcgttatattgtggtccatatcacacgtacttgtgctccagaagtcatctgatgaagcactatctttcttcactatctttccttggattttgagtccctttgatggctcatcgacttccacaactaaacgcctttctctgttgcagcatccgaaacagtttatgctctgaaagattgaacattatgtcaatcatttgttactatggtctaatatgtttgatctacttggaaagaaatcaatttggttctccgggtcgctcacattgatgagagttttgcaatttgatcgtagagattccattagccaaaaagggagagtttggaagtaagctgccgggaattggaagaaagagcaacaacgcttcttactaaattgtgttcgtaattttagcaagaatgaataacaagaacacatagctagctaatacatgacaggacaaaagcacaatgaacatgaaagagaattaaggaaactcaaaaaagattagcaaggaagtgtagtaatatgcctcatatgacaagcaaacatatgcatttaagcacaaaaggaatccatatgttataacttacaagcaagtaaggcatattatgccgcataattacatattttaccttgatttagtacaaagtctgtctctgaactgaagcacatatatacatccacatgatttaatagaatcttgaaaagaattcaaaagaaagaaaacaaaagtttaaacaccttccaacaaagggtattgttaaaaacactcgatcattattacgttgattttatatttcttctcttcttcacgttatttacagtttttttttcatgtaaaaatgatcttttcgtttgattcctatcgtaattgtaagtaaacaaaataaattttagtattattttaagatgagacttatatagatatgaatctatgtgaattattaaatttaatgataataaataaccaaaaactttaataaaataaactgttacatattgtaaaaaaaaagatttttataaatgtttatattcaaagagagaatctttattgagtacaaaaggaggaatatatgtgatagatctaattacataatctactttacataaatagaagaagatatcgtggagtgattgatatgtgattgatctagtcagatatcatgattgatccttaacaacttatatagtagttatgaatctacgtgaactatg

SEQ ID NO: 23182 - DNA, 3003 bp, Unknown; identical to SEQ ID NO: 23180
  misc_feature (1)..( 3003): 2750-1469P.txt file - cDNA_ID_2132716; gDNA_ID_2926202; Annot_ID_201912

SEQ ID NO: 23183 - DNA, 3003 bp, Unknown
  misc_feature (1)..( 3003): 2750-1469P.txt file - cDNA_ID_2132747; gDNA_ID_1620621; Annot_ID_162317
gaccacagaacggcatgagctactaggtaagcttaagcttgctcttccagtttcgtgcaatacgaacatagcctggatcaatacgacttcttcttttaatactacttgagccacaaccatctgaagaacttgatgaatacagagacaaccgatgccacaaaatgtaactaatacaaaagccctaggtacctgcagtaacagaaaagataatatattccaagcaaagacagtgtgttttgcagtagtctccagcactttgatgcagatggtactttgagacagtatgtgaggaaaagattttggtgatcaattgttttcaacattaactgatttaacacaaatctttcattggcgacatcatagaatagcgattagggtatgaatttgatcacaagtgtctaaacatagataataagattatgacatgaaacatgacacaactagatacatgaaaggattaaaagtttctctccaccagattggaattcgtcaatgagttcttgtttgattgccaacaggtcctttgtgcataccctccaaataatttttcagtttctcccaactttgcaacgtagattcccaatcctggaacatggaaaaggcaaacaattcaaagtctttacttcttaaaatctaaatgagctcaatgtaatccaaaaaggattttacctcaaggttttccctaaactcttcgttgtcaataggaaaaaaatactcagctggaacaaaaaaaaaaaaacccaattcttaacaacaacaacaacaacaggaacaacatcaaaaggctaaagaaaaaaaggagagaaaagaaatcaatgttcgtgacatacaggctttgtatcctccataacctgctgaacctgtgcctagccatttgcacaccatcaaacccttttccggcaatcctgctgctgcctcaaccaatgaagaggacatggtggagaaagttctatctttagattggccagacctcttagtgctataggatctcgttccgcggccaaactgtaaacatccatcaaaaataaatcaatcactggaaagaacaagaccaggaaacattcatatgattcatgtcttcggctcaccttcgcgcacacggatccgaggttccttcatatcatcatcgtcatcatcgtcttgctcctccagccgaaaattagggcttttttgctccttccctcttttaataatatttcgatcgattgggaatttttattatttttgtactactgaacgaacccattcaataactttgctaggtgaccggcccaagcccatacgtttatactattgttcttttctttttctctgttttgtgcaaaatatttatatcattcttacgaaaattgatatgaggtacacatttttaatttttttcatatcattttacttttagtttttcaaattttaaaaaccaaatcgtttctctattttttattattattattttattgctctaatttttgtttggtgagtatcaaaataattgaatgttcttcgaattatttaataagctttattgaaataatgaactttcctaaagaataaaattaattttgtaaacaattaataaataatctgtgttgctatgaatgaattacagcttggacgcggatgaagatcgtatatggctggtagatgttaagatttattattaaggaggagcaagaagagtgaaggcactgcgtcatttgctgtttttactgtgctattttctatgataattatgtttgatagaagaatttgatatttttttatttatttcttgtcaataaaccttaaacatattaactgaaaattctacgattttttaattaatcatagtttatttgctttctacattgttatattaataagattatatatatatatataaatgaattcaaattaaatatttttcctttttcttttgtcattgtagattttattaaaaacatgttggtggaattacataaaattagaatatttttttatttgtttatttcattaatattgttgacaaaaatagttaattaagtaattttataagtttctatcttaaattaatgtcagattcagcagttaccatttgaattctaaattattcaacgagattccacaaaaaatcacaaaaacaaatagtgagattcagcggttaccatttacacaaattgttgaattcattaaagttagagtcaccgtgtttagtacttggttcattaattatatagttctatagaggatcatgaaagttatgtataatctaatgcatatatgtaattagtgaaaacaccaaaaaaaacagaaaatatggtttagagggattgacatggcataaaaagcaatgttggatcgctgaattattttttcttggttcggtaggactcggtccaatgttggatttgcgaatcgctgaaataaagagttttggttcggtgggacttggtattggttgggctaattcagcgtgaataaaaaggcccaaacgtatttaaatattgggccgggtctgtgggaaaaaggcccaaacgtaaaccgaatcgtagattgaaatgaccggtctagtttcagtcttgttcgcgagcgtcgagagaaatcgagaggaaaccctaatttggcgagtggaggagcaagatgatgaggaacattggatctgcgtgtgcgaaggtaataggaaatatcggaattgattctcatgtttcaacggaggttttgttgcgtctcttatcttcctcaaaatatcctcaggaaccttccatatcgtaaaaacaacacaatgtaattagtgaaacaacaactagaaatagaatcatgtacatttatgaatcttaaagaaacagaacgtaccgcaaaagctgaccggagagttctatcgtcgaaacccaataaaaggtctctaacactcgagtaggctccaagacatggatcgtttaaacacttccccacattaaagattgcgtaaaccctaagtttctcgtttctatcgatgattaataagaaacgttgatctgtgttgcgatg

SEQ ID NO: 23184 - DNA, 3000 bp, Unknown
  misc_feature (1)..( 3000): 2750-1469P.txt file - cDNA_ID_2132747; gDNA_ID_2926201; Annot_ID_201877
cacagaacggcatgagctactaggtaagcttaagcttgctcttccagtttcgtgcaatacgaacatagcctggatcaatacgacttcttcttttaatactacttgagccacaaccatctgaagaacttgatgaatacagagacaaccgatgccacaaaatgtaactaatacaaaagccctaggtacctgcagtaacagaaaagataatatattccaagcaaagacagtgtgttttgcagtagtctccagcactttgatgcagatggtactttgagacagtatgtgaggaaaagattttggtgatcaattgttttcaacattaactgatttaacacaaatctttcattggcgacatcatagaatagcgattagggtatgaatttgatcacaagtgtctaaacatagataataagattatgacatgaaacatgacacaactagatacatgaaaggattaaaagtttctctccaccagattggaattcgtcaatgagttcttgtttgattgccaacaggtcctttgtgcataccctccaaataatttttcagtttctcccaactttgcaacgtagattcccaatcctggaacatggaaaaggcaaacaattcaaagtctttacttcttaaaatctaaatgagctcaatgtaatccaaaaaggattttacctcaaggttttccctaaactcttcgttgtcaataggaaaaaaatactcagctggaacaaaaaaaaaaaaacccaattcttaacaacaacaacaacaacaggaacaacatcaaaaggctaaagaaaaaaaggagagaaaagaaatcaatgttcgtgacatacaggctttgtatcctccataacctgctgaacctgtgcctagccatttgcacaccatcaaacccttttccggcaatcctgctgctgcctcaaccaatgaagaggacatggtggagaaagttctatctttagattggccagacctcttagtgctataggatctcgttccgcggccaaactgtaaacatccatcaaaaataaatcaatcactggaaagaacaagaccaggaaacattcatatgattcatgtcttcggctcaccttcgcgcacacggatccgaggttccttcatatcatcatcgtcatcatcgtcttgctcctccagccgaaaattagggcttttttgctccttccctcttttaataatatttcgatcgattgggaatttttattatttttgtactactgaacgaacccattcaataactttgctaggtgaccggcccaagcccatacgtttatactattgttcttttctttttctctgttttgtgcaaaatatttatatcattcttacgaaaattgatatgaggtacacatttttaatttttttcatatcattttacttttagtttttcaaattttaaaaaccaaatcgtttctctattttttattattattattttattgctctaatttttgtttggtgagtatcaaaataattgaatgttcttcgaattatttaataagctttattgaaataatgaactttcctaaagaataaaattaattttgtaaacaattaataaataatctgtgttgctatgaatgaattacagcttggacgcggatgaagatcgtatatggctggtagatgttaagatttattattaaggaggagcaagaagagtgaaggcactgcgtcatttgctgtttttactgtgctattttctatgataattatgtttgatagaagaatttgatatttttttatttatttcttgtcaataaaccttaaacatattaactgaaaattctacgattttttaattaatcatagtttatttgctttctacattgttatattaataagattatatatatatatataaatgaattcaaattaaatatttttcctttttcttttgtcattgtagattttattaaaaacatgttggtggaattacataaaattagaatatttttttatttgtttatttcattaatattgttgacaaaaatagttaattaagtaattttataagtttctatcttaaattaatgtcagattcagcagttaccatttgaattctaaattattcaacgagattccacaaaaaatcacaaaaacaaatagtgagattcagcggttaccatttacacaaattgttgaattcattaaagttagagtcaccgtgtttagtacttggttcattaattatatagttctatagaggatcatgaaagttatgtataatctaatgcatatatgtaattagtgaaaacaccaaaaaaaacagaaaatatggtttagagggattgacatggcataaaaagcaatgttggatcgctgaattattttttcttggttcggtaggactcggtccaatgttggatttgcgaatcgctgaaataaagagttttggttcggtgggacttggtattggttgggctaattcagcgtgaataaaaaggcccaaacgtatttaaatattgggccgggtctgtgggaaaaaggcccaaacgtaaaccgaatcgtagattgaaatgaccggtctagtttcagtcttgttcgcgagcgtcgagagaaatcgagaggaaaccctaatttggcgagtggaggagcaagatgatgaggaacattggatctgcgtgtgcgaaggtaataggaaatatcggaattgattctcatgtttcaacggaggttttgttgcgtctcttatcttcctcaaaatatcctcaggaaccttccatatcgtaaaaacaacacaatgtaattagtgaaacaacaactagaaatagaatcatgtacatttatgaatcttaaagaaacagaacgtaccgcaaaagctgaccggagagttctatcgtcgaaacccaataaaaggtctctaacactcgagtaggctccaagacatggatcgtttaaacacttccccacattaaagattgcgtaaaccctaagtttctcgtttctatcgatgattaataagaaacgttgatctgtgttgcgatg

SEQ ID NO: 23185 - DNA, 3003 bp, Unknown; identical to SEQ ID NO: 19834
  misc_feature (1)..( 3003): 2750-1469P.txt file - cDNA_ID_2132751; gDNA_ID_1620621; Annot_ID_162318

SEQ ID NO: 23186 - DNA, 3000 bp, Unknown
  misc_feature (1)..( 3000): 2750-1469P.txt file - cDNA_ID_2132763; gDNA_ID_1620621; Annot_ID_162321
aacaaacaaatcaaccggtcacatataatgagagtctgtctttacgtttctatttcgcaagtgctagtaataaaaggtacaaatatgtatgcagagacaacataaatggaatgttgcataaagaaaggtcttaccttgagcaaaaaatttgctccagaaacaagacaatgcatttcatcttctttctcaatactaacgcccagccgttccttgaacaagtctgcaaatttaaatgccccgccacctgtgacctgaaagatacacgtacgcttgactcatatgtttaaaacaagtaataatcaactaatcaaagccgaatcagcaaatcacattacatggatatacaagacttataaatataaaaaacgtttcacctaaaaacaataattatgagggtcttaaatgttatctggtatctcaaatgaaagagcgagctaaatatatgcagaaggagcctcaaaaggtgataaagataaaaacaatcaagtcataaaaatgcgattaccttgataacaccagtccccaaaggcaaggtctttgaactccaaggataaggatctattcatttagttgaaaagaaatggagaagaagacgaattgaagagtaaatcaccagaaattgatcttataatacaaaacaacatttcatacactgaaaaggataaaagtaataatacctcggcgatgaagctgcttggaatgaataaaatccaagcactcattaattttgtgagtctcaaacttgacaaaatgaagtctaccaccaagaacaggataacttctcaagttgccattggtaatacccaatctctccttgatcgtcctcttccgcttatcatcatcattagagtagtcctcatgtcgtgaaaaatacaacaactttatcaaagaacctgcaaataaacttaaaagggttcataattctcaaacatagcacttaagaaataaacatcgaaattgccaaaaccaagaagtgacaccaaatactactggaagaaccacaagcactagatcaatggtcaactacagtgaaaataaaaaagaagtgaaatttgttgtcacctccgatatcaagagccaaatgagagatatcatcagactgattaggcaataaaatggtgggatctctctcctcgaggttcccctgaatttcggctttgcttagatcaagctgaggtctagagcctgatctgtggatcggagtaccagaagtagaaggagccatatttttatcagcagcaacagaaacctgagattttgcttcagcttctcttttattgtcaagaattggatcatactcatcctcttgacccgccattttttttttttattaaaaaataaaaaaggaacccaaccaaacccagaaaaatcggatcaccaacaattgcctaattctcccaaaccaccacaaaacccttccttgcaaagtttaaaaagtcaaacgacacgaactgatgatgataagactttccagggtaaagaagtaaactgttcgagcttttgctaatacgattatacgactaagcttagaatcgcttaagcaggctgaagcggacctaactccaaacaaaatttgtatttatatataattgtttgttaactaattaactaccacataaatttcccaaaaaaaaaaaaaaactaccacacaaatttgtagtttttaatgaatttgtaagtggattaggtttggtgtttcacaataatgaccaaactcgaactccacttgccacttatgagtttttccaagtcatagatgaggattactgtgttggtttcgatatcttaattaatccgtcacacttaattctttatgttttacgattttttgaagtttaagattttgctaacattacactattcacgataaatcactttttcagatttaagatatttttcgccggaatttagaaggtaggatatcctttaaaatgcttttgtgaagatggattatattatacaattggactatttggtgtagataaaatcttatgtgggaaacaaatattttaggaacactaaaccaaaaataccattgttacattttttaatgataaaaaagttcacttgcaaatgtaacaagatacaacctcgttgggttgatatgttaagaaaactagctgatggattggtttttcattgggtctattgggccaatgtcatgggcctgatgacttttattcagtttcttaaatttatattccagtttaatataacatactctttagtgtgtaagcatttctaaccacgcgactagccgactacgcgaaagaaagagaattgtcatactagaaaaccgttaccacgtacgtaattaagaagagtccattatttttacaaatagatcccttggccgtgtatttggacaatgccgacatgcatcttatgaataagggcaaaaaggactttcgagtttactggcgaccacaactcgcaagccaacgcgagcctctatttattattttgtatccttttttttggtaaaagaattttgtaacaatatccattccctagctagattcttcttcttcttccttggatttgttctcgtaagcattcttctccaaaacgcccacttgttaaatttgatccagtggatttgggttttgttccgtctttaagctccatggcgattgcataattatgctctcaggatgggtttctctcaggccattcgcttgaatcttgcttccttctcctctccctctccctgcgatgtttgtttccttacctttctctatattatcccctatattttcatttatatatcgctgctgattcacaacactttacttactcttaactttatcaaacttgaatttttgacttttgctggccttgttctgattgttccttgttctggcttaaaaagattgcaaatttcaatactgttcctttaatttgaataagtttgcttgcatccatattgattagtgtctgtccaaaataatcaaacttttgattttgattttgatgtcggccatatgattttttcttatg

SEQ ID NO: 23187 - DNA, 3003 bp, Unknown
  misc_feature (1)..( 3003): 2750-1469P.txt file - cDNA_ID_2132763; gDNA_ID_2926201; Annot_ID_201874
ttcaacaaacaaatcaaccggtcacatataatgagagtctgtctttacgtttctatttcgcaagtgctagtaataaaaggtacaaatatgtatgcagagacaacataaatggaatgttgcataaagaaaggtcttaccttgagcaaaaaatttgctccagaaacaagacaatgcatttcatcttctttctcaatactaacgcccagccgttccttgaacaagtctgcaaatttaaatgccccgccacctgtgacctgaaagatacacgtacgcttgactcatatgtttaaaacaagtaataatcaactaatcaaagccgaatcagcaaatcacattacatggatatacaagacttataaatataaaaaacgtttcacctaaaaacaataattatgagggtcttaaatgttatctggtatctcaaatgaaagagcgagctaaatatatgcagaaggagcctcaaaaggtgataaagataaaaacaatcaagtcataaaaatgcgattaccttgataacaccagtccccaaaggcaaggtctttgaactccaaggataaggatctattcatttagttgaaaagaaatggagaagaagacgaattgaagagtaaatcaccagaaattgatcttataatacaaaacaacatttcatacactgaaaaggataaaagtaataatacctcggcgatgaagctgcttggaatgaataaaatccaagcactcattaattttgtgagtctcaaacttgacaaaatgaagtctaccaccaagaacaggataacttctcaagttgccattggtaatacccaatctctccttgatcgtcctcttccgcttatcatcatcattagagtagtcctcatgtcgtgaaaaatacaacaactttatcaaagaacctgcaaataaacttaaaagggttcataattctcaaacatagcacttaagaaataaacatcgaaattgccaaaaccaagaagtgacaccaaatactactggaagaaccacaagcactagatcaatggtcaactacagtgaaaataaaaaagaagtgaaatttgttgtcacctccgatatcaagagccaaatgagagatatcatcagactgattaggcaataaaatggtgggatctctctcctcgaggttcccctgaatttcggctttgcttagatcaagctgaggtctagagcctgatctgtggatcggagtaccagaagtagaaggagccatatttttatcagcagcaacagaaacctgagattttgcttcagcttctcttttattgtcaagaattggatcatactcatcctcttgacccgccattttttttttttattaaaaaataaaaaaggaacccaaccaaacccagaaaaatcggatcaccaacaattgcctaattctcccaaaccaccacaaaacccttccttgcaaagtttaaaaagtcaaacgacacgaactgatgatgataagactttccagggtaaagaagtaaactgttcgagcttttgctaatacgattatacgactaagcttagaatcgcttaagcaggctgaagcggacctaactccaaacaaaatttgtatttatatataattgtttgttaactaattaactaccacataaatttcccaaaaaaaaaaaaaaactaccacacaaatttgtagtttttaatgaatttgtaagtggattaggtttggtgtttcacaataatgaccaaactcgaactccacttgccacttatgagtttttccaagtcatagatgaggattactgtgttggtttcgatatcttaattaatccgtcacacttaattctttatgttttacgattttttgaagtttaagattttgctaacattacactattcacgataaatcactttttcagatttaagatatttttcgccggaatttagaaggtaggatatcctttaaaatgcttttgtgaagatggattatattatacaattggactatttggtgtagataaaatcttatgtgggaaacaaatattttaggaacactaaaccaaaaataccattgttacattttttaatgataaaaaagttcacttgcaaatgtaacaagatacaacctcgttgggttgatatgttaagaaaactagctgatggattggtttttcattgggtctattgggccaatgtcatgggcctgatgacttttattcagtttcttaaatttatattccagtttaatataacatactctttagtgtgtaagcatttctaaccacgcgactagccgactacgcgaaagaaagagaattgtcatactagaaaaccgttaccacgtacgtaattaagaagagtccattatttttacaaatagatcccttggccgtgtatttggacaatgccgacatgcatcttatgaataagggcaaaaaggactttcgagtttactggcgaccacaactcgcaagccaacgcgagcctctatttattattttgtatccttttttttggtaaaagaattttgtaacaatatccattccctagctagattcttcttcttcttccttggatttgttctcgtaagcattcttctccaaaacgcccacttgttaaatttgatccagtggatttgggttttgttccgtctttaagctccatggcgattgcataattatgctctcaggatgggtttctctcaggccattcgcttgaatcttgcttccttctcctctccctctccctgcgatgtttgtttccttacctttctctatattatcccctatattttcatttatatatcgctgctgattcacaacactttacttactcttaactttatcaaacttgaatttttgacttttgctggccttgttctgattgttccttgttctggcttaaaaagattgcaaatttcaatactgttcctttaatttgaataagtttgcttgcatccatattgattagtgtctgtccaaaataatcaaacttttgattttgattttgatgtcggccatatgattttttcttatg

SEQ ID NO: 23188 - DNA, 3000 bp, Unknown; identical to SEQ ID NO: 4809
  misc_feature (1)..( 3000): 2750-1469P.txt file - cDNA_ID_2132864; gDNA_ID_1620733; Annot_ID_166147

SEQ ID NO: 23189 - DNA, 3000 bp, Unknown; identical to SEQ ID NO: 4809
  misc_feature (1)..( 3000): 2750-1469P.txt file - cDNA_ID_2132864; gDNA_ID_2926179; Annot_ID_200058

SEQ ID NO: 23190 - DNA, 3003 bp, Unknown
  misc_feature (1)..( 3003): 2750-1469P.txt file - cDNA_ID_2132868; gDNA_ID_2926179; Annot_ID_200059
attaggggtcaactttactaattgaaccatcaatacattttagtttaaaattgagtaaaactaaaaattctgatcgaggaactagaatttcaaaccgtatcataattatgctcgaagttacgaggctcccattagtaacgattttctaaagcttggtgagtggtgacgagtgatattttaaacccaaaagaaaagaaaaagccttcagttttttaatttcaagggtaaagtgatgaatgtgaggattttggttagttgagacgagtttgataaagtgctcatgcgtaagcagaatttaacttcagatccagcagccatcataggatcggatgaactagcgaaagaaaagcttcttagtgggccaagcaaaccaccagggacatgaattttttcctttcttttgcttgattataaattcgtttttaacataagagtgatagaggcattacaagttttaaaaggcttatctctttaaaagtttttcttctttaacttaacgtcttatatttaatgtccatttggatcctccctttttttttttttcttcttataacccacttgggaatattaactatttttaatggttttgtttttgtctcacatgtaaggtgagattacacgtccctcaacaatgtgtgtaaattggtgctacgaacactactgtgaacccccaaccggatgtttaactaacccaccctggaggacattgacctcaatctctataatgaagctagagctaaggttaagattgtatcacatttacgttacctgtcttcaacaaagaacctctagaaaacaatgtaaacaagtgtataaggttactggacctagcgctaaaaactgcttcgtcgattgttggtatgtatggcgaaatttgcatagtttatcggaacaagtagaatagcagcaggttatcttccacgacctaagggctctataaatgaagctttccatgtgacttcaaatgctatcttaagcacaagacgcattcgatgaccatggagaatatgttccacaacatgagagtttaagagaacatccaactggctttacaatagtatgatgcatccaaagccaaaagaatagagagatataaaaagcaagacaacccataattcgaatatttcggggtggtcttggacctcttggtgcatacccatgccaaaactctggttgacaccaggtgctttgagtcatttcttaaatcattttatttttctctgcaaactagtaacactattaactttaccagcctgagaaaaatctgccatgacgatacaaaaagtctggagactttattcaacgaccttattattaaccatcaaaagtaaacattagtctcacagaaaaaagacaaaaacacagtacgagagagagacagaagcatcacacaacacacctatattatcacgtctttttttctgtgatcatattattacagggtcggattctctggtgtgaacttgagagagatactgtttacacagtgtcgctcatcggtaggagtagggaaaccttctcctttaaaaacgtgaccaagatgtcctccacaagcagcacatgtgatctcgattcgtctcccatctggatcaggctgggtaaaaatgtaaaagctattagtttctcaaatcatataattcccagtgataatgatcttttgattgagaaatgttacggttcgggttatagctccggggagtccatcaaagaaagctggccagccacaaccagagtcgaatttggtggtggatttgtagagaggagttccacatcctgcacaacaatagatgccatcgtcgaatactttgttgtattctccagttcctggatatctacattacatatagtagaccgttagaataatgatatgttaacagatttacagagcttatgaccttgctttagctctacttcacactctaagatattcattgatcctttaaactcagagaagaagactctacttaaactgctttggcttctcggtggccattaaggtagactaagctaagacacaagactaactgagtattttcatgtcaccgagagaacaatcctaatagtaaggttcatagcaactgagacaaccatatacaacagcaagtcagcaacagagttttagtgtaagaagaaaaagtgataaactttgaaaaaatcactctaatctttcatagaatatatctcctaatcgttaatttaaggatcaggtaacaacatttattccacaaaactcaattttcaagttcaatgcatcaaatctctccaacaccaatcaccaagtaaacttgaaacccataaagcattctcttttataaatttatgatcatcaatttccaaatcaacacatgcaagaacactatctgaagcagaacactcaaaaccagatcaaaactgagtcacgaaatcacttactcagtgcctttctgtctgagaatcctaaattgttcaggagaaagaatcgcacgccactcttcttccggcttattgaccgattcaggagcagaagaacccattgccacaatacgaccaccgtggaaacctcgacggagcgacggaaatgacaaaggagatgatgagaaacgaaggaggttacgacgagacggagaggccaaaggaggtttaacgaaagcagctttaatggtggaaacgaaagtgagagacgtggctgaataaacacgaccaggtgttatgatattgaacgccatttgtttggctttttatctcctctcttccttcttctcttgacaacagctttttctgactctctctcaatcttttctcagatttttccttttctctggaacactcttctaatttgggccttacgtttgggccctttagcccaatatacatacactcgaaattgcattattctctgttcaagtttagctatgccatccttgtcggaatcattcgtgtacctggttcaaaccctaagggtggtttaatgaggccatgtgatgagcctctgacaaaagagaagttcgaagttaaagtcacatg

SEQ ID NO: 23191 - DNA, 3003 bp, Unknown
  misc_feature (1)..( 3003): 2750-1469P.txt file - cDNA_ID_2132902; gDNA_ID_1620733; Annot_ID_166167
tagtttccagatatactgatatagtgaagaatatgaactctgaagtagttgccatgtcttctagttcccttctttaaaagtagcaaccgctatatatagcaaagaaggttccaaggaccgtataaattccatgtgatatgagctagttgaaggatttaagcattataagaacaagatttgatcggataacacatttctctttagttatagatgtgacagctttatttcatctctttgtaaagttaatttagcaaccattttttttactttcagtagatttaaagccatcatttaatcaatagatactgtgtggattgtctgaggaggttagtaggttacacttccctcttaagagagatatgagacaaaaccacccaaacacacaaatctcaacattaaccaacaaaatcatacccaatttgagtaataactatgggcctgaaaggcccaatgaagcccatcacaaatatccagtgagccaatgttctggatgtaagttacatatcatgtaacagaaaccgattaaagacaaagtggggcttttcttttgtggtacaaggtttgtgtcttttgtggttaattcggatcccgtggctcacacgttatctcctcactcactctaaaggagagagatctgtgacatcgatggaaattccaggggaccaattgcttaggttaacgactaaagaagggaaattaaaacttgcaagaaaaagcggctcggacacaaacaactgatctctcaccgattttgcagtttgtcaggaccatgtactgagattctcgataactatgatctgaacagagttttatatgacgacgtaaagttaattaagaacacatgagagattcttgaaatgcatgagattatcttgttgccctgatagattcagagttacttgttgttacaaggtctacgaaaaagtgaataattgagactcttttaaaataatttcgtgcatacaatgaatcagtcaaattttcattatttttcgtaagaaactgtaattaattaggaagaagtgaagttgcacatatcgtggtatccactattactagatatatctttcgaaataaagatatatagcgattaacgcacacaaagtccataacatttgggatttggcaacctcatgtctcaaatatttgtattaaaatattaaggcatttgacagactacactcaatcataataactcaacactaagacaatcataatgactcaacactaagacaatgcttagttccacactgacttacttttaagttttaactacataaagtcttagaagttacaaccaactccacagtagtacactatacctgtgttataattaatgaacttggttagcttgttcgcttaaagagaccaaactataaaatcattttctttgtatctatattttttttttttcataggctctttttatatttcagttacccctaacacatactttcctcgtacccatagctatgaaatgtaccttcctatctttaacgagttacaaaaaaaaaaaaaaaaatcgtttccaaaacatctctccatctccaatttttatgattgaatcttttgtaaatatctaatttatatttaatccgcctatcttacaccatatcatctcttatcccaacatcttatgcactttgatcctctcattttcaactgatttttaaagatatcaatatcatactgcaaaagtcaccccttggtcatatatcgaacgattaattccattccgcttatagacatcgttcttgttccaacaattgttgtactttcagcatgttgaagaagctgtgtaggttttttaataattaaacaagataataattaagatctttttttctaagctggactgacaattttgaggctctttacaattattacaacaattaattctttacatttcagggtatgtatgtatttgtattttataaacttcgaggggtcaaataagaaaatctgaaaattagaggtcttgtataaatgttacagatcttaatgcatcgtgctttggaataacgtccctggacccttgcgacgagacccatgaaacgttggattggatatatagcctaacaaattacaaaatcgatttgattcttaccccaccacaaagtctcatgtatttatgtgtgtacggacactggattcagattttttttgcgtgataaatacatatttattactatacttattctcgcagaagatcaataattattcatatagcaatagaaaaagaaaaaccctataactacatattatatatatatatatatatatatcgttggttttcaaaaaaaaaaaaaaatttgatcaagcaagattcgtaatttcttatgaaggacaataatatcacaagccttttcgagtaaattaacattgtcctcttcaaactttaacaatatctataactatagccaaaaaagattagaaagtgtaatttgaaaatggcttaggcaaaagcataatttaagataaagcaagtcttttcatatagtacatagttttttgtcttctagcatgaatcagactctatcaataattttggcaggtcttagtagaaatagtaccaaaggctaccactcctctatctaacccttttaattattatttatttttcacaaaatttaattcatagttatggcaccccaaaaaaaagtacgaaattattacagttttggaggtttctgaaacctctgcctattgtggaggcttttgattcctttgaagcaatcaatgacctctctgtctctcatttgccagcaaagagagattgtttaatgttgtttatggttcacatttttatacaatatcacattttcactgaatcttcctctgcgtctctcaggtaatttaattctctcttttctctcccatcactctgtctcttctctttattgggttttagataaaatgatggaataataatttcatggattcaggaggaagaagatcattcagttgaagcacacatttaaagggttttgttgagaggcaatg

SEQ ID NO: 23192 - DNA, 3003 bp, Unknown
  misc_feature (1)..( 3003): 2750-1469P.txt file - cDNA_ID_2132959; gDNA_ID_1620694; Annot_ID_48636
tgaattattgtatacattctatcattattttcacctcttacgtatgatacaattctgacatacataaacatccaaaagtatcaaaacaatttgccaactagttcttactattcttctactcgcttttccgggagaaaaaaaaaataaaaaaaaattcgttgattaacatttttaataaaaaaaattgttcctgaattatgcctttattagttgggttaaaatataattatattgacatatctaattaaacctctttacactcaaatcaagacctacaatttcacaagtttaaggttgggattactcgatatatagaatgaaactattgcaacaaaaaaaaataaaaaaatgaatgaataggattgatggtgtgataaaagaagagatgaatacaaagaagaaacgaacacaagtattgtgaacaagtcaaagcctaactattgaacaactttagaagacaagccaccaaatgtacaaacaaatcctcccaataacaaactacaaaagagaaattaatcaattagaaatcataagacatatcgacacatgctaatggtattatctacttacacctcatcaaactcgtgcatgggctattgttatccacatatgtatacagtcatggttatgtcccctcaatctcttccagcttgagaactatttgtaaaccactagtcaattatttcatattcagttcatagatagcctataaacattacatattatatctctagagataacaaaggggagcaggaagtgttagtactgtcgaccttatgcgcccatataattcttccatagctttagattttagtgtttgggctattttaattgcacccgaataatgacaggtaggggtccatgcaaactcatattcatgtgcatatcatcataaaatatccaaaaatctatcttatctatataacttcattgaacaaaacatatatatattcatgcagacgtatggcatgatacagttaatggtctgaattgctcaacgtaaaccatacatgcactagacagtttcatgggaagactaagattttgggactgcaaaattcttcttggaattgtgtagcggctttcaacgtatctttaggttatattcggtgaaccctttatttaccggcacagaatattacggttgatattcaattgatcaaacaatgtgaattagacgtctaattattgatggtcgccatatgaatatcttcttcttccttttccaaaccaacaccaacatcttttaatcgatagaagtgtcaattcgagctcgactctcacatctaatgcgtcattataagattgaaaatcagagacttgaagttttcgtttaggaacttaaaatgaagtttataactattgcttaacgtttttgttgttcatcccaagaaataattgacgttttcaagttaggtttttccaacccaatttattttattatccaataatattataaattctctagtgaaatttcattccttagcttccacgcaaagggtcgcttgagttttgagtaacacaagattggagagatcaatgagaatgttggcattggatccaatcctactatttgggaccagcttcactcgattcatcgcgtcctatttttgtccgtttacacatcttcggatcattcaattcttgtttaatcatcttcattagtaataacgttgccactttatttttaagacggatttatcttctgcaactcccaaattcatattcgctaaatcttctctaaactcagcataatagttaacttgaaaaagaaaaaaacgaaaacgataactaagatggtgaccactcgcatggtttagtgatgaatttagttaaaccgtatgttaatttccttggttaggctcttcaaacagaaattcgaaaacgatatcaaatgctccatgataagtttatgatttcttagcattgtctaatctaagagactagtaagaacatgaaaacaatattcgttaaaccaagtggtaaaacaactatatacagtatgtgtttttcgattataatgttgttaacttttaagattattatattttatattatttcttaaaatatgttgaggtttaaaagatttcttttcagaaaaggattaatgtcttcagcaatatatgctagtaatttactaagtgatattttgcaagtttgttggcaatatttaaccttttctgaataaaataaattcaatattaagaaacaaaattatatacatatagtagtatttaattgttatctatttttaaattatatgtgaataaaacaaagcaagtgtaactgtgtaattataacattggtacacgcacgggaaaaaacacagctagcaaattgaaacgttaatttggtaaagaagaaaaatattttatttttaaaaacacttaatatagttttaattggtgattttcccaattctgaacatatatatgatgataagttttccatcccaagttgttttttctcattagtcactggaaacattaattaccagcaatcagtagttactttggtattccccacacaaattcaaatttaaaagaaataattagtagtacttcttatgactgttttttttactgaataaaaaagaactatatataggttgttcttaactataaccactaaaaaaaggttctaaaattaattttaaaaagaaaaatatatgaagttaacttttatatattacacatcaaattccaatttcaggggctggtaatttggtaataattaaagaaactcaatggcaatgatttaagcacttctttatataagtccaccaaactacactgatctcctcaacaccacacacagcaaaacaaaaagctctctacactcaaaatataacgaaagaacaagaagacatcatcttagctcactatggctttgaagacggtaacaatatacaaactttctctattttttccacttttgatttaatgaatctaaaagaaaatattttggatgattggtatataggcgacgagtggtatgtggatg

SEQ ID NO: 23193 - DNA, 3003 bp, Unknown
  misc_feature (1)..( 3003): 2750-1469P.txt file - cDNA_ID_2132959; gDNA_ID_1620694; Annot_ID_164869
gtgtttaaagctgggcctggaagcatctgtagcttttcacttgaggtttttctagactttatttatatgatttttagttcactctacttcagttatgtagatatatttattatgagttgaattattgtatacattctatcattattttcacctcttacgtatgatacaattctgacatacataaacatccaaaagtatcaaaacaatttgccaactagttcttactattcttctactcgcttttccgggagaaaaaaaaaataaaaaaaaattcgttgattaacatttttaataaaaaaaattgttcctgaattatgcctttattagttgggttaaaatataattatattgacatatctaattaaacctctttacactcaaatcaagacctacaatttcacaagtttaaggttgggattactcgatatatagaatgaaactattgcaacaaaaaaaaataaaaaaatgaatgaataggattgatggtgtgataaaagaagagatgaatacaaagaagaaacgaacacaagtattgtgaacaagtcaaagcctaactattgaacaactttagaagacaagccaccaaatgtacaaacaaatcctcccaataacaaactacaaaagagaaattaatcaattagaaatcataagacatatcgacacatgctaatggtattatctacttacacctcatcaaactcgtgcatgggctattgttatccacatatgtatacagtcatggttatgtcccctcaatctcttccagcttgagaactatttgtaaaccactagtcaattatttcatattcagttcatagatagcctataaacattacatattatatctctagagataacaaaggggagcaggaagtgttagtactgtcgaccttatgcgcccatataattcttccatagctttagattttagtgtttgggctattttaattgcacccgaataatgacaggtaggggtccatgcaaactcatattcatgtgcatatcatcataaaatatccaaaaatctatcttatctatataacttcattgaacaaaacatatatatattcatgcagacgtatggcatgatacagttaatggtctgaattgctcaacgtaaaccatacatgcactagacagtttcatgggaagactaagattttgggactgcaaaattcttcttggaattgtgtagcggctttcaacgtatctttaggttatattcggtgaaccctttatttaccggcacagaatattacggttgatattcaattgatcaaacaatgtgaattagacgtctaattattgatggtcgccatatgaatatcttcttcttccttttccaaaccaacaccaacatcttttaatcgatagaagtgtcaattcgagctcgactctcacatctaatgcgtcattataagattgaaaatcagagacttgaagttttcgtttaggaacttaaaatgaagtttataactattgcttaacgtttttgttgttcatcccaagaaataattgacgttttcaagttaggtttttccaacccaatttattttattatccaataatattataaattctctagtgaaatttcattccttagcttccacgcaaagggtcgcttgagttttgagtaacacaagattggagagatcaatgagaatgttggcattggatccaatcctactatttgggaccagcttcactcgattcatcgcgtcctatttttgtccgtttacacatcttcggatcattcaattcttgtttaatcatcttcattagtaataacgttgccactttatttttaagacggatttatcttctgcaactcccaaattcatattcgctaaatcttctctaaactcagcataatagttaacttgaaaaagaaaaaaacgaaaacgataactaagatggtgaccactcgcatggtttagtgatgaatttagttaaaccgtatgttaatttccttggttaggctcttcaaacagaaattcgaaaacgatatcaaatgctccatgataagtttatgatttcttagcattgtctaatctaagagactagtaagaacatgaaaacaatattcgttaaaccaagtggtaaaacaactatatacagtatgtgtttttcgattataatgttgttaacttttaagattattatattttatattatttcttaaaatatgttgaggtttaaaagatttcttttcagaaaaggattaatgtcttcagcaatatatgctagtaatttactaagtgatattttgcaagtttgttggcaatatttaaccttttctgaataaaataaattcaatattaagaaacaaaattatatacatatagtagtatttaattgttatctatttttaaattatatgtgaataaaacaaagcaagtgtaactgtgtaattataacattggtacacgcacgggaaaaaacacagctagcaaattgaaacgttaatttggtaaagaagaaaaatattttatttttaaaaacacttaatatagttttaattggtgattttcccaattctgaacatatatatgatgataagttttccatcccaagttgttttttctcattagtcactggaaacattaattaccagcaatcagtagttactttggtattccccacacaaattcaaatttaaaagaaataattagtagtacttcttatgactgttttttttactgaataaaaaagaactatatataggttgttcttaactataaccactaaaaaaaggttctaaaattaattttaaaaagaaaaatatatgaagttaacttttatatattacacatcaaattccaatttcaggggctggtaatttggtaataattaaagaaactcaatggcaatgatttaagcacttctttatataagtccaccaaactacactgatctcctcaacaccacacacagcaaaacaaaaagctctctacactcaaaatataacgaaagaacaagaagacatcatcttagctcactatg

SEQ ID NO: 23194 - DNA, 3003 bp, Unknown; identical to SEQ ID NO: 23193
  misc_feature (1)..( 3003): 2750-1469P.txt file - cDNA_ID_2132959; gDNA_ID_1620624; Annot_ID_162453

SEQ ID NO: 23195 - DNA, 3003 bp, Unknown; identical to SEQ ID NO: 23192
  misc_feature (1)..( 3003): 2750-1469P.txt file - cDNA_ID_2132959; gDNA_ID_2926208; Annot_ID_141846

SEQ ID NO: 23196 - DNA, 3003 bp, Unknown; identical to SEQ ID NO: 23193
  misc_feature (1)..( 3003): 2750-1469P.txt file - cDNA_ID_2132959; gDNA_ID_2926208; Annot_ID_202400

SEQ ID NO: 23197 - DNA, 3003 bp, Unknown
  misc_feature (1)..( 3003): 2750-1469P.txt file - cDNA_ID_2132963; gDNA_ID_1620694; Annot_ID_164876
cccgaattccagcacagaattacacttaaaccttgcgatgcttgaggtggaagacgatgaaactgcatcaatcagcagcatggagagaagtaacaacagccttttttcttctacttgttcatctagggagcttcaaacataaggaattatgcttttagctaatagagaggttaggtacttaggttagaggtttgtttcttagtgtatggagtttacttgataactttatgttagacctgagctccctgctgttatctggaccagaaaattcattcccaagacgaatcattctcaatatcaactatgcctatctttattaggcatttcctcaaagtgccatatcttatgttttcgtttttctgaattaatcaaaatcgaaaaattctctaaaaacctactttagatctagggaatgttactaagttttcggatgaaatactaactttttaaggaagcactcacaaacttgaagtaactacatatatgtttaatttcatcgaagtgcgtaattttgtttaactcttatcgaagcaaatttatgtaagaagtctggttagaataaattgatggcttgagacatgccacattatttttcgtatatatatttgtccgtatgtattcgggttgcttgagatctttaaaatctgactatttcttttttttgttaaacggttttcttaaataaatgaaagaaaagtttacaaagaaaaaatacgaaactgttacaaccagaaagataagaaagaggactagcagactatttcatggtgtatataatcattttttattttgtcaaacataatcatatatattatatatataacatgagggattatattattgcttggacgactttcgtaacatataatagtaactatatatattattcattattacatgtatacgtcaatgggttatgctaatttatttggcgtttacgggtcggcataatttttttttttgttctaatggtaatgttggctctaatgttctgagtattgtttaatttgttatcaattaaaatattttatattttaagctaaataggagtacaggactatagaaggcgaatggtctacaaatgtgaaattgacacgttaactaagacctaattcgatttgagcatcttggtattttctttaatattcgtagacctccgcaatgcctgaaattagagcatcttactgtcgcctaacatttatgcgtcttctatattagtgttcatatgttcaagaggagatctacgttgtacgagttgtttttttgtaatggttaaaatgagtatatcttcacacatctacaaatctagagcttaaacaggcttaaaatcagatctcaataaatcatcatgtatccaaagccaaaggtaagctgatttcaaaggtgtcggaggaagaaccaaaaacatagagaatatcgaatacataaataaatgaattaagtacccccacttgccacaagaatataaatttgcatcaaactttctcttattttacaaaccctaaaagagctacatctttcgcgatcactaatgtttacatcaatcaactatttaagtaatagaagctttccaaaaagaaaaataacaagttgaagatagtcgatagtgattatgattaagtctcactttttttaatacaaaagataaagtaggtctggtgataaacaatccatttgatttttaaatcacaaaagatatatttgtttttttataacaacggaacctacttgtgttataaatatatgaattacaacaatacatattgggaattttacaacacttggatataatcttactaacaaaagctatattcaagttcttcttgtgaatctttgttatttggtttttgaaaaacattatagattataatagaattttatgcgctacatgataaaaaattgtcaacgggtatatgagtaaacacatatcacatatatatatgatatgaacgtcgaagctgtctttctactttttgtggtcttcaacattttcgggtcgatgtctcaaatgttgtttgttttttactaaacaaaagaaaaagaaatcatagaacttattagtaaggactataactttttaaaagattttggttgtagaaattaggctgatatttattttgtaaaaactataagattttgaatttttgactttgacatgaatattagtagggtattacgtaaaatttgcaagaaatgagaattcaaaaagagccaacaaaaccaagtcctgaaaatggacatgactaattaaagaaagaaaatgaaaaaacaaataaacttccttactatagaaattattgtttctttttaagtcaatggtttgtttttttttggtttttttttcatgttacttgtttgtacatccatattagtcttctattatcatcatgataatacaaagttttgactctaccaaattataaaaatcataaaagacgaggagctccaatcacgttcaagtaatagtatagatatatggaaaggaaataattaaaagaccctaattaaaatttagttcaagacctactttaaagccttttacaaaaaaagaaaagaattctctaagtcgaaatcgttatcgtagtacgttcatgtcttttctccggccaccgaaacgatgccatctgtttagtgcgcctttataattcaacgaccctttgtacttttccgattcctctttctctataacttcatctctcccattctcttcactcttctcaaaaattcgatctttagggtttttcttttatcctcttatcgctaatctggagctctatagagactataaaggtatgtttttttttcctcaattacaggctcggatgctcaaattttgtaaaaaatgactattttctattgctgaattgctcgaattgttgtgaatttagggtttttgattgattcgggagctcgagatttgacttcttttagctgattcggcaagtttgtatctagaaaggatcgattggtgaggtcaatagtggttggtgggttttagtaatg

SEQ ID NO: 23198 - DNA, 3003 bp, Unknown; identical to SEQ ID NO: 23197
  misc_feature (1)..( 3003): 2750-1469P.txt file - cDNA_ID_2132963; gDNA_ID_1620699; Annot_ID_164995

SEQ ID NO: 23199 - DNA, 3003 bp, Unknown; identical to SEQ ID NO: 23197
  misc_feature (1)..( 3003): 2750-1469P.txt file - cDNA_ID_2132963; gDNA_ID_2926208; Annot_ID_202407

SEQ ID NO: 23200 - DNA, 3000 bp, Unknown
  misc_feature (1)..( 3000): 2750-1469P.txt file - cDNA_ID_2133014; gDNA_ID_1620377; Annot_ID_155183
aaaaaaccaaagaagaagatatgcttcaaaggacgtgtctaacgatacgtatgaggacacgtgttatcccaccaacctccatcgcacaaagagctcaactccggtcaattgatcatcgccggaaaacttatcctaacaatgaaattttgtttttgctcaccgggtaaaaaaggacaaacatcaattaaccaattttaactagttgctataaattccagcaaacttgggtaaagataaattgattaaattgaagagtccataactgatggtctaccatattgaaactctaaaaaccatagaaccagcgacgaaaaggcaattaacatcagcataggaaaagaagctataatcaccaaacaaaggcataatcgaaaccatgaaccgtcttgagtttaagacaaagatgaagcggcagatccaacagagcaaactataggagaaaccgcacaggaaacaaaaacagtaaacatgaagaagcaaacggcaaagaagccgatacgaagccggccatcgctgctttgaaagccatcaataccggacgagagctggccaacatcactaaaggagtgaggagctgccagatgataagcccgcatactcgggacatgtaaaccggaaaaacctccggacggcaagaagttttatcaaccttctctctctaaaagatttttcggagagaagagagagaagttttttgttgctgctttttatcacacaagtgttaactatctataatgtaaagtgagacttgatgatcaagacattgatgacatggcaagagaagaactaactatggttaaagcaaaccatggttgagttagttccttggaccacttgacgctaacggcctcctgcaaactcagaaaaacaaatttgtttgtcttggaggcaaaaggaaggttgattgtcatgttgtgacagctcaaacttggaggagcgtctggggtcatctagaagagcctaaggagtgacagctcagcgattagggttttttttggcataagggtttagagtctccactataaagaggaactctaggcaaagagagaggggtggtgcgagttatactaaggtgtgagagaagagagaaactttgttagcataagcttaagagcattgtattctcttattcaagatacattacagagtgaacctaagtgctagtgaagggcattaggtgttcacttgcgtgttcttgtttgtaaacaccaaagtgatctatgtggatgtcggattcggcccacttcggcgcaatccgcattcaataggcttcaagacgagttaggcccaattcacagcccagcatgggccaggccgcttaacaggtgatccgacattaataaagaaacggaaggatcacgacttaaactgcgcattaaatcccgagttagagattcgtaacgtacgacgtaaataaggcgagatctgcggcgtgaaatcaacaaacagtttaatacgttcgattcgatgtattgagtataaatatgagttgatgacatttgtaaaagtgacaatataaaaaaaacacgaagactatacacaaatttcagaagcacattcttctcttttcaattcgatcattgctcgtctaacaagaccaaaagatccccgttaaaacaaccacaagattctaattgcggattctgacatccacaatctagtggattccgagcacagtctcggcccagacgtagcctttaataggtgaactgggttactaaagtcttgtgttctgtctctcttttacacacacaatctctctctgttctgtctctctctgtttctctattctgtttcttgtgttttgtggtttgaacaaaggaaagtcgacgccttgtgttcagtaaacttaacatataagcaaagccaaaaataaaaactttcttaggttgtacttggaagatgaaatgtaacatgattcgaaggcatctcactgatcataaaccaccaaatccacatctgcttatttactggtgtgatgtaccgacgcattattattgttgctactaattagtgtcaaaataattaggcacatcctttatattccatcactatgcattccaatgaataatgttggttatctgcaggggatttgccaaatccatttaactgtccacgtcatcatttaaagaaataataatactaatcaaatagacccacgtgtttagtttagttatagaatttagagcaaaacgagttttgatttaaaaagcataaccttatcctccacatcattaacataataataacattatttattagggataaaaaatctcccggtaaagaaagaaaagagccattgacgtctcctctctcgctctccatcattcttcttctacttttgtgctctgcttcactttttcttctttccttttttctctctctcaacgaccaccaccatgcccggagttgccttctcctgtgttcctgcctccgatctgggaatcttcatctccgaatccaccaccttctcacgctccatctccgcctccctctcatcttcctccagttcaccctcctcctttcgctgttgcaccccattgaacctcaaatcgctgcgttctcatcgccgtcctaagatttctcatatttgttgcgacggaagctctatttccggatctggcctcggcgatcccgatctcgagtttctccaagcctctgtcctcgttgcaggtccaccttttcccatttccaaataaatgtgactattctcttatttattcaaatttccggtgacgtttactcgtaccctgtgacgtctgttgcttttgcccaactctgattgcgatttccctccttttttagggttacctttatggagtttgtttgtgattccattttattattgttgccacaaacctagatagatcccttttaatcacctcaacttaattcaatttgtgctgattaaaagggattgtagcattagcccattcaattttatttcattgctcaacttgtgctccttttttcttaacaacaataacagagacaagtatg

SEQ ID NO: 23201 - DNA, 3003 bp, Unknown
  misc_feature (1)..( 3003): 2750-1469P.txt file - cDNA_ID_2133032; gDNA_ID_1620377; Annot_ID_155191
aatgttcagttccaatggttccctagctaaataaaattcagtggtgagtagtaacaacaagtagttactcttgagatggtgaaagagatgatcgttgacaaaacgggaggtctcagggcctccgtggccgtcatagacgccaacaaaggttccatagggaccagaagaagagagggtggtcaaaggaccggattcgacctggctctgatcctcgaggaggttgttggcctggacaacggccatggagaaatcaccaaaaaggtggtgagcagagtctttgtaccagagaaggccgtcttgtttgcctttggaatcagaataagtgtgggaagtggtggaagaagagggccagagacaagaggtcaaaaagttgaagaaaagggataacatcgggcctcatctcatatcatccccaaccaccgattgttatgctaaaatgaatgaatgaagtatgttgaaaaaacaaaagaagagagagtcggaaacttccattcattcactcacacaaagaggagttttgtttagtaaaaaaagcaacagctggatggagatctcaaggagatatagagaaactattaagttgtaagtaacatgtgtggagagagatagagtgaaagaaaaaaagaaaagactctctctgtttttgatttcagatatttattaggaacagaacagaggaagcccttttccttgtatatgagaacagaggaaaagaagagagacaatttatggatcacaagatttccagagcctctctctctctctctcaaataactcttcttctatatttgaccatcaaagaaaggacaagaagacacacatacgtgtgcacgtgcactccttaactcctcccatgtgggatttacaaacatacaatagctgttctcattattattatttccttcttgccttgcaccaccattgttaactctattcaattcaaagtttcaaaccctttgaccaatgcatccccttattgggctttgattatatgggccctttctatttgatatttttcaatatatggcccgttaataaatttaatatatagcttcggccttataagaagaattcaagcccctcaccgatactctagtccaagccgtgggcagaaccaaaataagagaacaaaaaaaaagtttgttttctggaatcgtcgcgatagttgctgaactccgtcgcaacttcaatggcatctgctcactccatagccgccgtttctgttctcgatgcggcctccaagcaagcaacacttccttcttcttcttcttcttcctctgcgctctaccctctttcttctcttcgatctaaacctcgccagcagcttctctccctacgcagtgtcgctctcaaaggtatcttctcttctttttctctgtttatttggaatacgagttgcttctcctaaacgtaatagtccaattctacctttgttgggtacagtcgcatttccagtttgaattttaatatagtttgggacaacgaagaggggagtgattcaaattagcacaatcgtaatgagtagttgttgatatggttagtttgttgatgagccaacaatgattagtttgtggttagcttaggtcgagtaaaggcgcaggcaaaagaagcagaagctagtccaagtccagtgggagtgggagacgcattcagtaatgtgaagcatcttctcctgccggtgattgatcggaatccttatctttctgaaggcaccagacaggttattgtttagcttgttatctttttgagaacatgttgacaccaaacaaaaaagctgattacacttaatttgataggctgctgctacaacaaccagcttggcaaagaagtatggagctgatatcacagttgtaggtaagaacaattagtgttgcattaatatccccttatgtatcatatgaattatatagccgtgttgatcatctgtgaccaccgttgttgattcagtcattgacgaagaaaagagagaatcatcttcggagcatgagactcaagtatccaacatccggtggcatttgtctgaaggtaaaattgaggaattacttgtaggaaattgtaggtaaactatagtgttggaatcccttattgaagaaaggttaactataatgtggtggttgcaggtgggttcgaggagttcaagctgttggagaggcttggggaagggaaaaaagcgacggccataataggagaggtggcagatgagctgaagatggagctggtggtgatgagcatggaagccatccactctaagtacattgacgccaatctactcgctgagttcatcccctgccccgtcctcctcttgcccttgtgatcgctcccgccaaatgcttatatgatagacataccacttgttttatttttctctgtgtttggttgccgtagaagagcattactaggagaggggatggaaatgtgtcaaggtgtgagatgcatgtgtcaagcatttcctgtcttatcatggttgttgttgttgtgtcctttgttttctccgttactcacatactaacgtgttcggccacaaattaaaaaaaaaaaaaaaaaaaaaaaaaaaaaaaaaaaaaaaactcaattagaagagaaaatctttttaatcttatcccctaatgaattacttggtacatgtagaatagaatcaaattactacaggaggcttaataaacacaacttataaatttgataggcacgtcaaaagttaaaacagggatttgttaacctcagtaattagctacgagggttagttaattaaccaatcaggtgaaatcacacggattggtagcgagaggggtatttaagtaactgtacaaggagcgttggtgtttgtttgtttgcaaagggcaggaggcacacaagtcttccaaacggaggagccaccggcgttgttagctttctctttggctgattccttcttcttcttctctaattcttttccttggtttcagagtataataatccccagcttctttgatcctctctctctctctcttcctctgttacatgatg

SEQ ID NO: 23202 - DNA, 3003 bp, Unknown
  misc_feature (1)..( 3003): 2750-1469P.txt file - cDNA_ID_2133061; gDNA_ID_1620377; Annot_ID_155197
tttgtgcagccaccttttggtgctttgttcattaggcatgccagcgcagaattcaccacagcttctgcctacggaataattagatgattactgatataagaaaaaagacaaaaaagaaaagagttttcatatatagtatcttacctcagaagcaccaagagcaaggcgtttcatgtaatcatttgttacatgctgcttggcagttccagtgacagcatcatggtgctgcgctatccctaaagcatccccaagactgtaagtgtttggacctccagagttcttgcccaccagaaattcaagttgccttgcagcctgttttggaaaaaaaacagacaaatgcaaggccatgtaaattcattttgaatttcactaagaaaatgggaaatcggactccgtaagatgcagtttgataccatgtagtatccgctaagagcccgaacatatcgtttaagagcaggacggctggtgaagtagccagtccagtaagcgtatgcccgatccgcatatctgcagagagtagggggaaattattgactattgagaaaatcaagttgttgaacaaaaggaatatgtaaatttatttggtgacagtactaaaggcactcacgggaaaaagtcatgagtcttgagaggccaagtaacattggcaacattcttggcatcaacatagagagatggtgtggagtacaaggcgttcacacggccatcctgttgaatggaattattggtgatgagaatctagtctccaaagacagcgagattgatattgagcaatcacagcaagcaagagatatgaaaaccttgttaacataatggataagtctgtccatctgtctgaaccaagactcggcgaactggtactgaaaatcatcgcccattgtccacatcacatggttccctcgactcacattagcctatgtccacattgactactttcagaattaatccaagattacacacacacttgaaaaaaaaaaaaatactactcaagacttacataaacaagagaagcattgacgaaatcattaaccgcctccttaatgttatagccatcgaaacgagggttgtcctgcaaaatgacgagtgaaccgaattcccctaaaccaaaaaccaaacgggagaaagaagaagcgaacctggaggggtacgtaatcgtcggtgacttcatagtgaaagccagtgggagggccgtaatgaacaaagaagatattggtgaatatctgagaagaagaatccagtgtttttgatcctctccagatgacttcaagtgatttctcggcctttcgcttttctctgtcttggtaatcgattctcgcgaaatgcacagaatccaaccctaactgcacccccaccaaattaaaacacactcataaggaaataaagaaataaatagattagaagggacctctgctccaaggaggtaagcttgaacagaggaatgaccaaagggatcgatttgccaagcagcacgtggagttgtgttgaactgttgctttataaaccgatgcccctttgtggtttggtctatcatatctatgtaatggcacgttgcttcatcattcatagcccatcctccatttctgcacattgattgtgtgaattgtatcaacgctaggtagccaaaatgataaaattaaggtcgtgacctacttacacaaactctagttgcccggatttcactagtctcctcacttgctcttgtctctcggggctttgttcttcccaccaacgcgtaaagaaggcctttttcatgtacattgatgttcacataagagaagaaaacatatattatggttttatgaacaaaaccattattaatgttttaccatttccgcaaacacaaactttctattgggatcacgaagtagagaatccaccaccgagtctaggacgttcctcacgcaagcgttctgaaactcacaattcatttgggatatatagtacgttagactcgtctctacatacatacatatatatgattcatcattcatctgtagataacatacctggattctgttgttagatcctacgtagtactgatcaacagttttcaaccagccgacatcgtcatgcgaatgcggaacaagatgaacatttagtttccccggaaccactttagcttcggttccatacttcacgtatcccccgcctttgacgctctcaaccaacgacaacagaagaagaaaaacaataacacaaagtgatcctttcaataaagacatacccggtttctccattttccgatggcagagttttcagatgtttttctttcttacagggtgtggaggaaacttataacaagaaaatggagagagagcaaaacaagggtcataacaaaagaccaaatccttatcgtttgtttttgctcagatccgtcggtctttgttagagtctctctattgttttactgtgactagattgtcatttcaccatatgtaataattaattaggttctacaataatcttattttcctacaaatttaattaaaatcttgaccctaaaatagtactttattaaatctttttttcttctactttgatgtcaacattaaaattgaagttgatctgttttgagttttgacaatagtcatttaccttttctttaattttatttaacaaatagttttgggaaaaaatctccctttctttgataatacacaaatcaatcaatatagagataattaaaccacgtctttacagagaatagaagcaaatctttgagctagtaacattttagtataaaaatctcaacaacaagtcatttacatcattgcaactgttttgttctcttcatttgacttgggggttgtttgcttgcaaaggaggctttgtttgtacgtcgtcgtttttattccgtatataaaatataaattaacgaactaatctttaaagcctctgagacgagtagaaggttctctctggtgaagaaaccaatgcatttcggcgacagcctgaaactgaaaagccatcgatcgaccgagaaagcgaaaagagagagagatg

SEQ ID NO: 23203 - DNA, 3003 bp, Unknown
  misc_feature (1)..( 3003): 2750-1469P.txt file - cDNA_ID_2133067; gDNA_ID_1620377; Annot_ID_155199
tctctctccttcttatagtcactttcctgttgattgccttctttgcacccagacactggacccaatggcgagggaggcacaccaggaccatcaggttagatgcaaagctcgtccacacactcccctgcttcaccttcactgattctgctcaccacaaggccggggaaacatgtgctatatgtctcgaggattacagatttggagaaagcctcagacttctcccctgccaacatggtacttactcctattcttctgtggaaataaactggcaacttgccacccttaatgtgttcattgaggtcttggaaatgtatatttatgagacacagatcttcccttcacaggattgaaacatgtgcttactattctaggaagactttgataggtttctcttagattctaactttataaaatagatttctttctagcataaattcctctgttttagggttgaaggtacaatatattccgtttctgtcaattccagtttgataggtaagcaccgaatgcgaactttttggtattactcattgcttcgaatgatatgatgggtcgaatatgtacatcagaagaataaattaaagatttgaccttttttagtttatgtaagtgggggtaattcatagcagttggttgatttgaagctcttatgcagcttttcacttgaattgcatcgactcttggttgacaaaatggggtacatcttgccctgtgtgcaagcatgacataagaaccgagactatgtcttctgaggtgatcctgttagactgaaatgtataaatcctttcagtagttattttgttgtttttgcgttgggttcaatacactgtttgtgttgttttgttgcaggtacataaacgagagagtccgagaacagatacaagtacgagtagatttgcctttgcccaatccagtcaaagccgttagagttattatcggcttagcagctgaacactcatatcagtgctcggttacctggatcaggtccaggtttgcatcttatattgaatggttaatcatggtgggataagtttaggtaaagggaccggatctgccatactggtcgtgctttgctggattcccagatcaaaaagatatgagttgctttgcctctttttctttgcatgtgtacatttacatacgctctgagtcatgtgtacatttgatcattgtgtgtgtgtgtgtgttatagattgaaaaaatgtgtgtgatagtacagatatgcaaacaaattgatagaaaacaaatgttggtctaatcagattttctctctccgatccaggcaaatctctaatgttatcttgttgataatttctttgcctaaagtttgtataatatgaatattgaatctgattcccttacatgggggaatggaatccattgaacgtggctttgattttgtcttgtctgtagtaataataagaaaagaacacgtcatcctcatctctacctaacgactcatccaatacgatgactcgttcatgggtttgttagttgcgcaattccatcaccaaaactttctattacatactcaacttcttttgattactaaattcagccaacatttccttctcatctctaatcagtgaacacgttttctatgcaggctttggggcctatcttaccatagctgtctaagaagactattatcttatattctttattgtagatttcatttacttgcgtatggaattggaaacaaatttctaattgttgaatcatataccattatttttatattggccatgcatgtgtataagtggaagatagaacaatattaaaacaatattattgtgtttggtcctatttattactctctgctctcttcctgaagcttcttcatctttttgtttgacaagaagaggtagagaagaagatgtctcaatcaatctcctccagcacaaaggcagaagaagttgttagtgtagatgtgagccaagccaagactctcctccagtctgggcatcaatatcttgacgttaggtgagcttctgatctattctatcatatcaccatgcatgtaccagctgctgcggttgttaatgaaaaatccttgcacatggcaggactcaggacgagtttaggagaggccattgtgaggcagctaagatcgtcaacattccctacatgctcaacacacctcaaggtaaatcaaatatcaatcacctttaattagagatatcaaccagtacatgagttaaagccttgtgatctctactcttaggtagagtgaagaatcaagagttcttggagcaagtatcttctcttctaaacccagctgatgatatccttgtggtaactcttttcttcctcatcacacccacaagaattaaaatctgccggtgaaaacgatgataaaatctggaaaatgatattgatacaaacagggttgtcagagtggagccagatccttaaaagccacaactgaacttgttgctgcagtaagtgtataatagtccctagtttacatacataatttactcctacttgtgtgtttaatctcaaagaatcaattcatatatacataaaaaaatagggttacaagaaagtgagaaacgtgggaggtggctacttggcttgggtggatcacagctttcccatcaacacggaggaggaggagccatctgctaattaataatcttaagattctcttcttttcttaatcaaataatataactgcctgtgtgatgtagtaatcattttcaatttaaaattccagtttcttgtaatcaaaactttcgtgtaccaaattcaataaaagctgtgtttctctataagtgaaaaccaaaaaaaaaaagatgaacaagtaaaagtgtaaaaactaagtaacaagcctttgtttgtttcatcggtcaaaacgtttgggctttttgagtatacatacaaaaaggctttgggcttcagcctaagcccttatcttctctgttctcgcccggcgattctccgacttaattaattttccgaccgaacacttctctctctctctctctcgggtttctcatg

SEQ ID NO: 23204 - DNA, 3000 bp, Unknown; identical to SEQ ID NO: 1270
  misc_feature (1)..( 3000): 2750-1469P.txt file - cDNA_ID_2133115; gDNA_ID_1620378; Annot_ID_155232

SEQ ID NO: 23205 - DNA, 3003 bp, Unknown
  misc_feature (1)..( 3003): 2750-1469P.txt file - cDNA_ID_2133226; gDNA_ID_1620380; Annot_ID_155300
atttttccataagaatagaaaaaataattttggagggagtgatagtctgatagtattagataatttataatttatttaattaattttggataaacaaaatatatatatatatatacaagttaattttttgaataggaaaaaaaaaaacattgctgttaaaaattaatcaacgaagataacaattgaattgaaatatgctaatgctgattattgacttcatatttatatttaccttttctaaattctacagaaaaagaagtaaataaataatataatactaccacactaaaagataacgactagtttgatggaaatgtgagctgtctcactccttcacgcatcgttaagagcgtttaaacgtttataactgcgcacagtcattttgtataacacgtgtccggttaaaagtctacgtggcgtttaagtgacagcgacatctcatagaccattggtccgacgtggcattacgttgcgaatgggcctgaatagaataaaattatgcccaataaaaagtctctcgacctaactcttaaaagcccaataatttgatcaattcttatataagggcctgactggtttaaatacagcgggtgcggttacggttgcgcaagtttgcggaaacggccggttgcggttttaagcgttatcaagccttttaaacgactggttaagcgtttgataatgggtgcgttttcgggagttttatgaccggtaaaccagcaagtgtgatagtaattaaataaaaaaccaaaataaatataatatattactattaaaagaaagaaaaatacaatatattattatgataaattgataatattagaaaaattaaacatgcttaataattaaaaccataaataaaacattaaatttaaaataaataaattttgtaagaaaaagtttaatactttatgcatttggtacataccaaaaattgcatcaagtagtgtgataaactataaataacgttgaactcgcgggttttccggattgcctctatacatatgataaagtttcttcaagatatccaaacgatttttaacacatctccaactcaaatttttcccaaactggtcgttaatattcttaagaatattttctttttgaacatcacttagaaatctgattttgggatctttggaatcttccgttaaatattgattaggttttttttaataagaataagatatatagggtttgggtagaagacataattattttaattaattaaaaaaaaaaaataacctaactgctaccgcccgcaaccgcaaatgcttgcgggaatgagcttttgaaatctggcgattttgaacggtgtaaagcagtatctagcggtttctatgattgatgtcaatcgctaacaatcgctagcacccgcaaatacagcgtttgcgagtgacaaagggaaaaccaattaaaccctaagtaattgtctttgtctttgatattcctttcttctgacccaattaagacaaaaccctctacacacttttctctttcgaagacaaagatgaactgcattaataattcaacgagcccaaacaggcccaatggcccaatacggtccatcgactaaatatatcagaccctagttcccaagaaatgtccccgaggaagaagatgatgatgcgaaacatgaatgctcaggtaaaacatgaccagtaccgtgcaacaactttccccataatttgcttgtcgtgttgtgtagatgtcaagtgttttgctaaatctaagaaaacttgcagtgtgatacagagacatataatcaaatatgtagtcagcggtgttaaaaacagaatctgtcaaaccgtcttcttcaaatccacggaatgagaagcttgattaatgagatgctcccaaccatacccaaatattaatcagacattcattattgtctctagaggttaatgtctttgagtgtttttaggtgttcctagaacacaatttatgggaagatccagctgcatctccatctcctaatttggagtgaaagagcctagtctttcacaccaattttgagtttcaaatatatgtgcataaatgaatgaagatgcaaggtttggatttcgtttttatgactcttgtctaatcttacgtttgaggtaggtgagcaaagatgctatcacagcaaaaaatgctaaattactagattcaaattacgaatctaccctctgcatagctccgagagtgatgtgattccccttgaaagcatcaaagggttagtaaccttttctagagagtgccctttcgtcgtcagaaaaacgtaagcaaaaatgctacaaattaaaaagtgtctccaacatgtgcatattcacacacaagttggtgtcaacgctcagacaagaaaggcgtgtgttcattgttgaatcttcccatttcctcatccaaattccgacataactatcctagccgccatttgttctccacattacaaaaccctcagcagcttcaaaactcttccgatctctccctcacgctcgcaattctctcgtctccattttaatagtttttcttctcggaatcacaaatcttcggcttcttgttccttggtgagtttataatctatcttttgctctgcttcgatacttcaaagtctgttccttttgtctctctgagttcggtttttagttgtgttttatttcgacttctgttttagcgctttttctgaatctgatattgaactctttatcagaattaaggacccagatcatagttaggctcttcaattatatctgggttttgtgccaattgaagaaatcagtgaataatttttgtcaaattaaaatctgggtttggtcctacttgttgctccttgatgaatccttctcttgtagtaatcatatgatttactaactatagtttctgagtttaatatatgttacgatgatgttgatgatgttgctgttatgatgatgtggatgatttgatggtgttgatgttattaatgatgaggctaatgatggatacgaatcttgtacaggcgtgtgtgtgtgttgttgaatg

SEQ ID NO: 23206 - DNA, 3003 bp, Unknown
  misc_feature (1)..( 3003): 2750-1469P.txt file - cDNA_ID_2133240; gDNA_ID_1620380; Annot_ID_155305
cagtcctcttttcgatttatgctgtaggatttgtaagcataggttcatctaacctagttaggtagctttattttgtgtgtgtatatgagacatgagtaaatacatggaaattctgctctagggaacatctcattgtgtctcttctctggtttcttcttccttttctgcttcctactgttgtttttttactagataactctatatgttcttattccatcctttgagatgctcctctgtaaaacatctcttttatcttctgagcttcccatgtgcctaatttgttttctgaggatgttatgttcgtttacagtatgcaaagtttgtgaagccggcatttgatgacttcgtgctcccttcaaagaaatatgctgacgtgatcattcctcgaggaggtgataatcacgttgcagtcgatttgattacgcaacatatccacacaaaacttgggcagcatgatctctgcaaaatctacccaaatgtttatgttatccagtcaacatttcaggtattttctcactcttgctctctttgatacttgatttagatggtaagtgttatcgatggtctcactataggatcatgattgcagataagaggcatgcatacacttattcgggaaaaggacatatcaaagcatgactttgtgttttattcagatagactcattcgtctggtatatctctcccttatgtcttctctttcaacgtcactcacttttcaggctttcttattttaactaatatcagttcaatttcaggtcgtggagcatggtcttggtcatttgccattcactgagaaacaagtagttactccaacaggtatgagaagagaatgcatgagctgtaacaatactgtatacacttttttatataacttggtcatcagatgtccgtctccttcacgtcaatctagttagagttagcttattcaactcatttaaacttatcttttccacaccaggagctgtatataccggtgttgatttctgcaagaaactttgtggggtctcaattattagaaggtgagcctttgaaaggtattgtatttggttaagtttgatatgataagatgcttattcttccaactgttttacatcatgcaaggcataaatttacttgtttgcgattaaattatctctcctacgtggtttctgttttgtatgtttttcctagtggtgaaagcatggaaaatgcattacgcgcttgctgcaaaggaattaaaatagggaagattctcatccaccgtgatggcgataatggaaaacaggtcttcctattaatattttgctctgtttttaaaagtatcaagtataatctctttttataaacacgaattttgaagtttctcttgtcgtgataatcagcttatttatgagaagcttcctcacgacatatctgaacgccatgtcctgcttctagatcctgtcttagccacaggtactctgtctctctacgctgtatatttcgattttggtcctttttgatggatttttggttctcgaaattcatatctcgtgatattgcttcttcttgaaggtaactcggctaatcaagccattgaactactcatacagaaaggtgttcctgaagctcacattatattcctcaaccttatatcggtgagtgtaaaaagctatatatcgatctttcgctcttttgtgaatgtagaagctaaagatctcattatgtatctgcttctctatctctttgcttctctctttccctcgtcatgaccttgctttctgacaggcgccggagggaatccactgtgtctgcaaacgttttccagcattgaaaattgtgacgtctgaaatagaccaatgtctgaaccaagaattcagagttataccgggcttaggcgagtttggcgatcgttacttcggcaccgacgaggaagaccagtagccaccactcaacactgtgactggtttcaaaggaaaagcctaaatttatgactagagcgacagtagaggcacttgcatgtctttgtagtttgtgctaaagaatctttatcttattgtttatgaagctcctcttgcttacttgaattatttttgaaaaactacgttaattttctcattaaaaaaatgatcgggacaatgctagttttctaaaccggtggaaaaagacataaccaatccttttatacatgattttgacaatcgtacgaaaattccagttctctctaattttaatttctttatttacatgttgattaatatatatttaccatttttcttaaggatcttagggtttagggattatgacctaaacctaatgatagaatttaaccttagttggacccacgaatgatgggcctaagttaagcccaactataaattaatgtagcgtaaccgccacacgctcatctataaatacaccactcctatgcaagacctatagttttatttcagtcgactcttgaccttcaatttcctccgtctctaaatttccttttcttttggctctctctgcgatcgagttcgaaaccgttccctaatcgaagatctagattcaacatacgttttatctctcaggtttgcttcttcttcgactacgttttctccgcgattatgatgatgccttcttcttcctgctttcactttgggttgcgtttcttcatctcctcgattcgcgatcctcctattcgcatcgatacccagagatctagggtttccaccgatatggatatggataaatcttagggtttcaccgataaggattatggattcgagtttctcttctatgtacattgtcggagctacatcttctcttcttgttgttagtgttagggttttgaataggttttaggtgatgaattataggtttagagttctgaattagagatttatttggttttttctgtggacgtggtgctctatgatacctggattgaatttggggttacagacagaagaatgtgttgcttttgattctctagcgattggggaattcagaaactccttgcttctggacttgttacccttgtgaaaatttatgtatg

SEQ ID NO: 23207 - DNA, 3000 bp, Unknown; identical to SEQ ID NO: 1289
  misc_feature (1)..( 3000): 2750-1469P.txt file - cDNA_ID_2133244; gDNA_ID_1620380; Annot_ID_155306

SEQ ID NO: 23208 - DNA, 3003 bp, Unknown
  misc_feature (1)..( 3003): 2750-1469P.txt file - cDNA_ID_2133275; gDNA_ID_1620379; Annot_ID_155262
gcaatcttggttctgttttgggagtcctcgtggatgccgagcttcaggtttttagagaaagcctcatagaacttgttgtagtcctccttgttctcggcaatctcaaagaagagctcaagacacttcttcacaaggttcttgcggatgaccttgaggatcttgttctgctgcaatgtttctcttgagatgttgagaggaagatcttcagagtcaacgatacccttgacaaacccaaggtaatcagggatgatgtcttcacagttgtccatgatgaagacacgacggacatagagcttgatgttgttgggcttcttcttagtgtcaaagagatcgaaaggagctctcttgggaacaaagaggatagctttgaactcaagctgtccttcaacagagaaatgcttcacagccaaatgctcctcccaatcattgctcaaactcttgtagaaagcagcgtactcctccttgttgatctcctctggcttcctcatccagataggcttctgtttgttcaccaaatcccactcatgagtaacctccttaatcttcttctttttcttctcctccttttctttctcctcatcaatttcctcaaccttgccttcctcatccttcttctcttcctcctcttcatcatcagagatctccttctcaatggtcttctcaatccagagagagattgggtagctgatgaactcagagtgcttcttcaccaaatccttaagccttcgctcctcaatgtactccatctggtcttccttgaggtaaaggatcatctttgttcctctaccaagagcctcaccagaggtgtctctggtcaccgtgaaagatccaccggcctgagactcccacacatactgctcatcgtcgttgtgcttggtagtaacaacaaccttgtcagcaaccaagtaagcagagtagaaaccaacaccaaattgaccaatcatgctaacatcagctccagcagccaatgcctccatgaactccttggtaccagaccttgcaattgttccaaggttgttcaccaaatctgtacaatagaacaaacacgaatcagcaaacacaaatcaaacacatagataatggttttgaatgaaatcaagtacaacttgcttttgaatgaaatcaattacgtaccagccttggtcatcccaataccactatcgataatggtcaaggtgttgttagtcttgtccggaatgatatgaatgaaaagctcaggctgaccatcgagcttgctcttatccgtcaaggactcgaacctaatcttgtccaaagcctgtttcaccagaataaaaagctcaatcataagtaacaaaatacacacaacatatatacaatcaaaaactaagtaatctaacaaatttgaacatgaaaaggttccatcaattaacaaacgaaaatctcaaatcgaaaagaacactaaaccctaataaaacctaaatctacacatagatccgtcaaatcaatcgaaggagatacacaaacacattaagcttaaagataaacatagaaagacagagagggagagatcgtacatcggaggagttactgatgagttcacggaggaagatctccttgttggagtaaaaggtattgatgatgagggaaagcaactggttgatctcagcttggaaagcaaaggtctctgcgtccgccattatcgttgatcgggaaaaaaatctaagaattagggtttatgtgaatcaaaaagcaaattcttaagagaagcagagaagtattgatggtttgattaagggggaaaagtgtgtaatatataggggatgtggaaacagacgtcataatataatggaaattgtaaaatataaaaattgtcataatattttactttccttttttttggaacaagtgctacttactttttttttttttttttttgttaaatttttctattagctaaactaatcaataaaaacaatgtttttctccatatacaaaattcgattttgttatggatttgaatttacaagttcccattcattctagtttatctatgtttagatttttttagatcggtcctagttttgggttattttttgaaatcgataaagttaatcccttagtttcaagatatctcaaaattttatttcaaattttagttatgtatttaatttataacaacaagataaatagttgtgttaaaaaaaaaaaaaaagttttaatcaattctgaagttaaaaaaaaaaaatcaattttttctccccacaaaccccacgctttttagagaatatgtgtttctttttgttattgttttaatttatttattttacaactttcaatattattatttaattattgatttttttgaaactttattaaaagatacacataccaatctgtaaacaggaaaaaaaaagttgtaagcaaaaaataaaattattgctttgtttttaaaatagtaaattatcatcaataaaataaaatagtaaattacaaaattaacaaaaaaggaaactaaaacctgttacaaaaaagtagtaaattacacctgttctgcaaaataaaaagggagtagaattaaatctgactgttttttataaatagtaaattatcatcaaccaataaaataaaatagtaaattacaaaatttaaccaaaaaaaaaaagaagtaaactaaaacctgttacaaaaagtagtaaattacacctgttctccaaaataaaataaaagggaataaaattttaaaaaatttaataaagttttgtatttttctaccaaaaaatagttttgtattttgtaatttccatttaattatattgcagattatgtggacctgaaaagcaaattaacataaatcaaataggaaggatctagaaacccttataggttcccagtccccacaccactatatataataacatccttccccaaagtctcgtatcaatcaacacttctctgctctctaaagaaaattttgctctctttatctctcgatttgattcataaaccctagctcttagattttttttccgatcaacgagaatg

SEQ ID NO: 23209 - DNA, 3003 bp, Unknown
  misc_feature (1)..( 3003): 2750-1469P.txt file - cDNA_ID_2133326; gDNA_ID_1620379; Annot_ID_155275
aattgatgtaattcgggattagaattctgatcttgatcttattaatttcattcttcgttaataataaacaacattgcttgtatagtaacaaatttttgcaataaataaaatgccagattcagaactgcaaactttcaatgtatttagtgatactgtaagattattccaacttgatatactgacaatacatatttaggtacactaggcacataaactttttctaactcaacaaggaacaatcaagtggagttgtgtatcatgtttcccgattcagtgctctgttcctacgagctctcaaaaccaaatatccggaaaacacctgcaaagagatccaagttgttgtcattgttcattttctgctaccaatattagagttttgagttgttgctaacaatgaagtactaatacgcggtagtaccttcatcagtattatacttgggattcttgtcatcacctgcatatgcaagtaaattgtatttgggattccactcaacactgttcatggctgcccgacatggaatctgatgcaccgtccgcccggtttggacattagcctgtttggtagttagtggtcagatacgaggaactaatctcatattgaggaaactacattgaaattagcagtgtttaagtctgggcaatcacttacaatatcaatgaataaatcttcactggctgaagcaatatactctcccgaatagttgaagcttattgttctgactggccacctgtgagaaatagttataaattactaacatgtaacagaaattaaacctttttctactctatggaaaattcatgttgatactcactcaagtttggtaaatgttctcaaacaaagcatgtctgagatatcccaaaggcttactaaggaatccgcactcccgacagcaaaatatctgttaaggtaaagaggaagaattagatgcaaaagcaaaaagattatcattcgtgtctcagaggccagcccacaaatgtaaatatatattacctccctttaggatcaattgcaatacaataacacccggctgtgtgggctgtgagagtgtcaagtggtttaagagatggatatgaaagaacttcaacagtgcctgagcaggacaacatacaaagtaactttcagtaagatcattttctcaagttcaaaaacaaagaaatctttggtagggaatcgtgtgcaggaaagtacagaatttaaaatcctcaccaagtccagtagtcaagaagaaaaaatctccaggcatgttccaagcaatctcattaacctgttacaagaagacaaaagataagagaacattccatacggcaccagaaaattacttgacgattattacatgaacaaggaacttaggtgacatataaccgcatgagcttgaaacaggagatacggaagagccttataaaaaaaaagccattaataaagattaacatgagtctgagcttacgttacctcataattgaatttgcgcctgtgtagaggtttaaacttacggacatccagaattgtaagctcatcatcctacattggccagtaagagaaaggacaacgactatgaaaagggatctatcaagtaatccatagacagtaagaacaatgaaagtgtaaagatatggggctcgagacaataccctattaccaacagctacatgtgtcccgtcaggtttgtaggtgatgtttatattctctccactaagttctacctgctgtgtgcattttccacctgtagaactcgaagaagacatatctcagcaattgatagtaaaacatacaatagtagccacatatcaaaaacctgatcaaattcctctcttatggaatctggctaaataactaatttataattctaagaaacttagatccgatcctcatcaatcaatagtctccgcgatatgactcaaaagcaaaggccaagattgcgagaaatatttgtgaatgacacatagctaatccattagaaaatatacagatttctaaaccaagctccaggcatatttcaggagcaaaactaaacgattaaaagaatataacttactgcgagcatcccaaagacgaacgcttttatcaccagaggcagtagcaacaagatctgaatgtttgggatcccaacatagctgatccacactatcagtatgaccctttagctcaaggtccttagccttgctctgtatccacacaccacacaaacaaccaaattacaaaaactacataactcaaaaagtaacaatgacaaagataataatcgagttttaactcaatctacaatacttctccatatgtattcatcatcatcaaaaacacatagaagttcccatagctcaaaaaggtaaagaaattacatgaccgtgtggttcgatattccaaatgcgagccgtttgatcaacagaacccgaagcaagctttgttccattcgaattccaagctactgaatgtaccttcaatccaaaaattcccccagattcagcaaaaaactagggtttcgcaagttttattgagtacagaaaattagactggagatagaaaaaaaaaaccttcttcttatgaccttgatattctctgctatgtaagctcttgaaaggaatcgtcgtctcctccattttttaattctcaactcttcttcttcaaccttccttcgcggcctactgaatatcagagcttcgcttcctgaaacgcagcgtttagtcattccggtatagataaaccgaatcgaattttagtaaaccggatgtaaaaaaccttctagatggttaagagtcttcagagagaaactaacaagaagagcggtaaaattgggtaaaatatgaaacaaagaaaaaaggtgaaaaaaaaaacagctaagcaaacaacaagtaatcatttcacagtctctataaaatgacctcttaaatccaccgacgttatagagagacaacaacagctttggttctgcctccgccgcttcttcttcttcttctaatctccgacagatttactctgattctgttgtcttcgagatgatgatgatg

SEQ ID NO: 23210 - DNA, 3000 bp, Unknown
  misc_feature (1)..( 3000): 2750-1469P.txt file - cDNA_ID_2133367; gDNA_ID_1620381; Annot_ID_155317
ggtcggagagatctagatcaacttctggttttggttggtcaaaggaaaggatttctgggatgatggtggtcggaggaccgacgggactcacggtggagaaacggtggatgaggtttggtcggaggaaacggtttgccatttaaactcttaagaacgttttgttttctttcttttgttctgtttttgggtttctctttttatttttcacaagcgtttttgtgtgttggggtttgtgtgtatttgtgttattgctacatatatttataattttatacaatcaagctttatgtgtgtgtgtacatatgtttggtaataatctaatagatgtcaatatacgttactatatgtcttattaggataatatcatagtagaagtttaaatgttcttaaaattgatagaatccggaaaaaattatcaaaaattaggagagaatctttcaaaaaatgaaaattgcctaattttggtttgacgggagttatagaattttcaaacaaaataatgatggataagtcatttcagcttctcatttatttgttaatatatatatatatatggatttacatattaatggactgaaagaaaaatctcgtacatacaaacaaaaaaatatataatttattcaattaatgttttaaaaaattgattctatttaaataaaaatgtgtttgatcaaagttactgaaagtattaaaattgaaagtcttagttttaattattttatggcaaactatattagtctatcagaaattattatatttataatttatgaatctaattaatataatttttaatataatggtgagattcatgattttagtaataaatcagtttcttcaaattttaatttattaaacaaataaggtttaaatcatccaaaataaatttgggtctcttgaagtataaaaaaatattggaggtttaggggctggttaccattttaaatagataaactctaaacttttgataggcatattttgaagttatatagcttatcttcataatttgcataacaaatatcacgtggctttttgatgttgacttgacgtcaatactacgtggttttctaattttagttgcaatttatggtctcattaataggagatcataataataatccatatatagttcttgataggtaaattccgcattcgttatatcaaagaaaccgtaatgaaagttaatgcgataaataagattcggattgaagcatagtaaatcccaagagttactaaacgtgataattatatttgcagataaggatttaacaatgaaatggaatcaaaaatctaaaatgaaataaaactaattaatttggagtaaagagtaagagaagaatttcgccgtaattttctgacagaacatatttgtttcggaaaaacaaaaatctattaagaaagtcgagtcagagacaccaaggacgtgacctgtgtgaccatacgagatgtcattggatagatagaattatttaatggatatgattatttaatagaaagtaataaagtaagaattctgatgaagatttgtcttcgtgagtcggtggatggtgaatcggatgcaacattcagacctgaatttatgagaatctttgactttactcaattggaatcttgagacatgaatttagcaagattctctgcctaaacaacgtaaacaccactaaatattagtgacaataaaagataaggtacccaacaaaactatggactatggttcaattgttctttttttgtgaggagattaaaattcgtttgttatttttggctttggaattagaggggtattggttttgttgagtggacttgtcttttatttatggtggactagccaaaaattatttaattatcacaagtttaattggacgtttttgccaaattcagatatatctaataatgttttaaaaaaaacattatatttgtatatatgtttttgcttgtatgtttgatcaaaatcgaattgtattcatcaacattttctttttgataactttgacgtacgtttattcttcttcatttcctttcttcctaatgaaactgaaatgcttaatggtgttctacaactagacgttactaatattgaaaagtcaatatcatatgatatgataagattcatatcatatctatctttattttgtacaagattaattcgtttaacaagaaaataataacaagattatttcaacaatgcaggtaaaaaaatatatatatatatatagcaagacaagggatattttatttttatttgtttttggtggatggtaaggagacaaatgtttattcaacaaaaaaaaaaaggaactacaaagggacatcatatcattcggacataatgctaaaccacatgatttagtcacatttttatacctaaatacctattctctccgtttcatattaaagggataattttaacaaaaatatatgtagtgcacatgtatacatatatacggtataggaaacttgtgaaactcaacccctgacatacaaaaattgaaaatgtgtgtcaataaagttcatcctgatttgtgattatgcatcaaaagaaacataattagatattaatttgatcagatttggatattctataggtgtatacattttccggtgaaaacaaattttaataaatctataaagtagtaaactatcaaattaatttagtcacagtgtgtatactctaattgatgagtcttctcccttaattccagaaaaaaaaaaaaggaaattaagaggtttcgttgggcctaagcaactacagaaaattaaaactccttgtctttccttttttctaaacaccaaaacgcactacatatattcgatctatccaatgattctgtaacgcccgtgaaccagaaaattggttagggtttgtttttaaattatccggtttaattggttgggttaattagaaaccctagagtttgcctataaaagaaggaaactcgaaattagggctttagttagccacttttcgttttataaaggagaaaaagagagaaaaggagaatg

SEQ ID NO: 23211 - DNA, 3003 bp, Unknown
  misc_feature (1)..( 3003): 2750-1469P.txt file - cDNA_ID_2133371; gDNA_ID_1620381; Annot_ID_155318
ccaattttaatccaaatctaattctgtaaactggagaataacgataaaggatttggaaataactctaccaaatttcgttaccttttaccacgatttgatatgacgaaactgatttctcccaaaccctaacgattctgctcattctccttttctctctttttctcctttataaaacgaaaagtggctaactaaagccctaatttcgagtttccttcttttataggcaaactctagggtttctaattaacccaaccaattaaaccggataatttaaaaacaaaccctaaccaattttctggttcacgggcgttacagaatcattggatagatcgaatatatgtagtgcgttttggtgtttagaaaaaaggaaagacaaggagttttaattttctgtagttgcttaggcccaacgaaacctcttaatttccttttttttttttctggaattaagggagaagactcatcaattagagtatacacactgtgactaaattaatttgatagtttactactttatagatttattaaaatttgttttcaccggaaaatgtatacacctatagaatatccaaatctgatcaaattaatatctaattatgtttcttttgatgcataatcacaaatcaggatgaactttattgacacacattttcaatttttgtatgtcaggggttgagtttcacaagtttcctataccgtatatatgtatacatgtgcactacatatatttttgttaaaattatccctttaatatgaaacggagagaataggtatttaggtataaaaatgtgactaaatcatgtggtttagcattatgtccgaatgatatgatgtccctttgtagttcctttttttttttgttgaataaacatttgtctccttaccatccaccaaaaacaaataaaaataaaatatcccttgtcttgctatatatatatatatatttttttacctgcattgttgaaataatcttgttattattttcttgttaaacgaattaatcttgtacaaaataaagatagatatgatatgaatcttatcatatcatatgatattgacttttcaatattagtaacgtctagttgtagaacaccattaagcatttcagtttcattaggaagaaaggaaatgaagaagaataaacgtacgtcaaagttatcaaaaagaaaatgttgatgaatacaattcgattttgatcaaacatacaagcaaaaacatatatacaaatataatgttttttttaaaacattattagatatatctgaatttggcaaaaacgtccaattaaacttgtgataattaaataatttttggctagtccaccataaataaaagacaagtccactcaacaaaaccaatacccctctaattccaaagccaaaaataacaaacgaattttaatctcctcacaaaaaaagaacaattgaaccatagtccatagttttgttgggtaccttatcttttattgtcactaatatttagtggtgtttacgttgtttaggcagagaatcttgctaaattcatgtctcaagattccaattgagtaaagtcaaagattctcataaattcaggtctgaatgttgcatccgattcaccatccaccgactcacgaagacaaatcttcatcagaattcttactttattactttctattaaataatcatatccattaaataattctatctatccaatgacatctcgtatggtcacacaggtcacgtccttggtgtctctgactcgactttcttaatagatttttgtttttccgaaacaaatatgttctgtcagaaaattacggcgaaattcttctcttactctttactccaaattaattagttttatttcattttagatttttgattccatttcattgttaaatccttatctgcaaatataattatcacgtttagtaactcttgggatttactatgcttcaatccgaatcttatttatcgcattaactttcattacggtttctttgatataacgaatgcggaatttacctatcaagaactatatatggattattattatgatctcctattaatgagaccataaattgcaactaaaattagaaaaccacgtagtattgacgtcaagtcaacatcaaaaagccacgtgatatttgttatgcaaattatgaagataagctatataacttcaaaatatgcctatcaaaagtttagagtttatctatttaaaatggtaaccagcccctaaacctccaatatttttttatacttcaagagacccaaatttattttggatgatttaaaccttatttgtttaataaattaaaatttgaagaaactgatttattactaaaatcatgaatctcaccattatattaaaaattatattaattagattcataaattataaatataataatttctgatagactaatatagtttgccataaaataattaaaactaagactttcaattttaatactttcagtaactttgatcaaacacatttttatttaaatagaatcaattttttaaaacattaattgaataaattatatatttttttgtttgtatgtacgagatttttctttcagtccattaatatgtaaatccatatatatatatatattaacaaataaatgagaagctgaaatgacttatccatcattattttgtttgaaaattctataactcccgtcaaaccaaaattaggcaattttcattttttgaaagattctctcctaatttttgataattttttccggattctatcaattttaagaacatttaaacttctactatgatattatcctaataagacatatagtaacgtatattgacatctattagattattaccaaacatatgtacacacacacataaagcttgattgtataaaattataaatatatgtagcaataacacaaatacacacaaaccccaacacacaaaaacgcttgtgaaaaataaaaagagaaacccaaaaacagaacaaaagaaagaaaacaaaacgttcttaagagtttaaatg

SEQ ID NO: 23212 - DNA, 3003 bp, Unknown
  misc_feature (1)..( 3003): 2750-1469P.txt file - cDNA_ID_2133483; gDNA_ID_1620384; Annot_ID_155396
tcttatagaacattatatttagtaaagaataagatttcattactcaatgcactttattggccgtaacaattttagccaaaaatttgtgtatatggaaaaaaatcatatgataatattaatggatagtccatttatatccttgtaacatttcaagttcgttgactgtgagtcctcgacttgcttttaaatagattaactaaatgccacaataacataaaaaccattatcttagagaaaagtttaaaagaaaacgtgaaagtatggagaggataccttcacttgcatcccttgttagcttgcttatcatatttgccacaggtattataattttttgtacacctttcaattttcatgttaaatatatttttttaaaaggttattttcttctattatgtgaacaaaaactaaacaaaaaatctcaaagtctaaccttagtttttataatttagacgtccacatagaagattaatgttatgagaattaagaaatacatattacagatatatatattttttttcttaagtcttcttgtagctattttcttgaattccttgtacttaatttctatagagtgaatatattcttatatatctgttaagtttaataaagtatatatacaatgctgtagttgttaatcagacaagagcaagtatctgtaacgacagactaggcctttgcgatggttgcgatcaaagatgtaaggccaaacacgggccatcgtgcgaaagtaaatgtgacgggccggttggaatgttgctgtgcacgtgcacttacgagtgtggtccaacaaagctttgcaatggtgggcttggcaattgcggtgaaagttgtaatgaacaatgttgtgataggaattgtgcacaaagatacaatggtggacatggatattgtaacacccttgatgattttagtttgtgcttatgcaagtacccttgctaaaacaagttgacagaatttggaaaccaattagctttctttgtaactgtaactgcgataatatggtaataaatttccttttgataaaaacattacgtttatttgcatgtaaggtaagtgagataagatagagacattcatgacttgataatatttttaattttttttacaatctatattcttgatttatgcagttggtgaataattcttcggtgaaccgtgcctacggttttagaggcctacgacaatatttaagaatgtgaaattttagattatcaaacaaagagtaaaatgtacataaacttaaaatctgaaaaacaaatctttaaaaagcattaaaaatagaaaagcttctaataaatgagttaagtatcagtattggtatgaataaaacctttggaatattgatcacaagaaaaaataattgagtagttagaaagataatttctatcaaatgtggcttatgaatgaattatatttagtgtagcctaaggcatttgccttttttctataaggggaggctcggctatgcgcgggcggtgattaaggcgtcgggaatttagaactccggagggaagccccaataaaagtagctgaaatcttggactgtcattgtcatgagaattttccggaattgttagaaaattaaggaggggatgaacaaaaaatggaatagtataagagaatttaattcatgtaatatcaaatgttcggtaagtttggtatatgtatttgattttcagagtttatgtaaattttatagaaattattttcggagtaatgtcgattcattttccaatgatcttatcacttgtctcttcatacaagccaagatgagtcgacaacttggttttatccttctttcttttctagttttcttctatgtaaacgaaaacaaatttcacatgtaacgattttttctaatattaagaaataaatacgtttagaacgtctaaaatatttatacaccaaacattaaagatcaaaactattaaagaaaaactgttagaaacaacacaattccaaaagatttagatcaacatctttattctcatttttatcagcttcatcatgcctccaaatctgattagtccagaaacaggttatcaaaattaagttttctaagattagttctcaaaaaattatggttttttgtgtttacaaaaatttgtgttttatggacaatagatttcggaaattcgcaaacctagattttcacaatttatctatattattatcatagctaaaaagaagctccatgaatgtgtttacgcaaaatcaaaataatatcttataagagctatacacctcattatgaattttcaattttgtttaaccttactgtgtctgtacttattgagagtctttcttaaactataagtttaagagcatcaaagtttaaaccagaatatttctatcaacgtattgggagaaggagacattcgactaaagaatgatctaaaacaaaacaattttttttttcttccgctgcaaaatagaaaatgttttagctaaaaatacacaatttaaaatttgaatataaattttacattctttcaaaaaaaatatatccactttcaaaagttcaatcaatacagaaatcattataaaatattaaatttatacattatttgcataaaaaaacttgtaaatacttaattgttatgcaacaaaaaatttgttcaaggagtagtaacacacacctaatcaataatagaatttagagatttgtctactttatgtaacaaagataggttttattacacctaatgatatttagcatttgtccttatttggacaagttgtaattttttaactgactttcttatttattgttgtttgacttttatgtgtcggtcattctttatcagtttttccaaaaacaatatgattaaaaattacaagtagatcgagagactgttgcagattgctcttaaatgacttatctcgataaaatcattttttcagatacaacaaacaaagagaaaaagccctttcaatttctttttacagattgctttctaaatagctttgagaaattgatcttctctttatcatactcaaatg

SEQ ID NO: 23213 - DNA, 3000 bp, Unknown; identical to SEQ ID NO: 1321
  misc_feature (1)..( 3000): 2750-1469P.txt file - cDNA_ID_2133509; gDNA_ID_1620387; Annot_ID_155480

SEQ ID NO: 23214 - DNA, 3000 bp, Unknown; identical to SEQ ID NO: 1329
  misc_feature (1)..( 3000): 2750-1469P.txt file - cDNA_ID_2133515; gDNA_ID_1620387; Annot_ID_155482

SEQ ID NO: 23215 - DNA, 3000 bp, Unknown; identical to SEQ ID NO: 1330
  misc_feature (1)..( 3000): 2750-1469P.txt file - cDNA_ID_2133523; gDNA_ID_1620387; Annot_ID_155484

SEQ ID NO: 23216 - DNA, 3003 bp, Unknown
  misc_feature (1)..( 3003): 2750-1469P.txt file - cDNA_ID_2133537; gDNA_ID_1620387; Annot_ID_155487
gattatagaatccgttgtaattaccattctctagaattaatatttctttgtaaacactatatattcctctatacattttaagggtgattggattagacttttaaaacttacgaagtttttgaatgttttcaatgcttttttcaatcaatttattttgtctttcatatattttaaagcttttgaagtttcttttttattttttactcctgttttcatatatttttataagtggggtatatgtgaccttagaaataaataaataaaaagcttatactagttttcttcttttcttcttcccaatatttatataaactctcataacattcacaaataaattaatttttgaaaaattttaattgatttgtaaccgatttttttttgttcttttaagatccattttcccatatatttgatagttatttaaaatcgtaatttttatagtcacaatctttaccaagagtataaaatttatgcagttaaagtctttatagcaaaagtttctacagcgaaagttcttaccgtcaaaatctttacaacaacaattaacagtcgttatcaatcctcccctctattggtaatatacaattaattatcattctctagagagaatagccaaaaaaaactcaaagatagaagagaagagacatgatagaacatagagaaaagatggtggtcaagaagaaaaggaaagaaaagagacaaggagaggaaacatcggagaaaactaagagaaggaagctcgacgatcaaaaacttcaaaaaatagctaaaaaaaatagttaaaattttctattttaaaaactctttgcttttttcaggtttctcgaaatttgtatctgagagagtcccttacctacgcttttgagagagtctagttatttttttccattttaaacatttaggtgctatattcttacaccccacattcaagcattcgatttcaaaatccaatctacgttaagtaatattatatgtcagttcaaatccattaaaaactcaaatccaataacgtcctcttagcaacatttgtatgtgggttattcacataaagcgtctttattaacagatagaatatccttaaatattagtttgaaatactatggatattcttcatgtatctagaagaatcccataacatattgtatctagaagactttcaatatctttcacggtattagagcgcagctctttctaaatcgcttcttttctgattaaatctttttcttttctctttctcgtcctctattctcttcctgttttctccaaattctttcaatggccgacgcagtcaatccctctaacaagatctatggagtctctaacatcaagtctcacatctctgtgatttttgatattgaaaaaaaacaactaagatacgtggagagaactttttctcacccactgtctcagctttgacgttctcggacacatcgacgacactctcctcccagccgatgacaatgatctcgtgtggcagaaacgtgatgggattgtaaagctttggcttcatggtaccctcaccccaaagcagtttcaaggctcattcatttccggatcgacgtcacgtgatatctggttatagatttttgttaaataagccaaattattcagactgttaaatggtttgattaaaccgataatttttccgttagataacttaacaattcagcgatgtaacttatttagtaaaatcaacaaaaaaaattaggttgaattacattgattttgtttcttttatttaagaaggagtgaacccaagaattgttcttttaatatattattagtaattgaactgaaaatgttgaatttctaaacaataataagaaggagataatatacaataaaattagaaatttaattcaattgagatcaaaaagttcgtttacatctgagtttcctgctttttgatggatattttttcttatggttttgatccgatcaaaaaccttattatatttcatatgaatttgtaagttcattcggaccatcaatcctgttcacgaacaaatcaagtttgaccatcgatgacgactttcattccggcattagtccatggaattgttttcttttctttttaacaaaatcagtaattatattagttattattttaaaaatttagcacattatattgagatatcgaaacgctataaatcttttttggtcaacatttggaccacaactggccgacccattagccaattcactacaaattgtagggagcgggacttgatctctagtgtgatggtgcctgtcttcagtggacttatctctattaatcccgaaataaataaacctcataataaatttttttatgaaagcctaccatagttaatttatggcactctacgcgtgcttgattattttttgttttctttaggatatttcatatttcccatataatataaaaatattaaaaaaatcatcaaactaaattagttatggtttttttaactaattaccaaattagttatggctacacgaatgagttccacaaaaaatgtttggatttgtagcttaccagattatgttgtcggtttggttagagatagagcattgcatctaacctgtgttttttttgtggcttttcccattaaaaagaaaacgatatgtctcgagagagttgcctttaattaattcaattcctctgctttcatatacagtactacaaaagcctaaccacatgcatttcctatatattgcctcttcgagaacaaaatgttattcactccaaatacaaaggaaaacagaaacgtagccaaaaaaaaaaaaaaaagaagacaatgataaagtctatcttactatgtttcttcttccttttccctctccttttaaccctctttaagaagcttttaccttcgaaatggaagcttcctcccggacctacaggtcttccgatcatcggaaacttgcaccaagcttggaagattgcttcatagttcttttcacaagctctctttagaacatggaccagtgatgcttctccgtttcggggtcgtcccgatg

SEQ ID NO: 23217 - DNA, 3000 bp, Unknown; identical to SEQ ID NO: 1324
  misc_feature (1)..( 3000): 2750-1469P.txt file - cDNA_ID_2133561; gDNA_ID_1620387; Annot_ID_155494

SEQ ID NO: 23218 - DNA, 3000 bp, Unknown; identical to SEQ ID NO: 1326
  misc_feature (1)..( 3000): 2750-1469P.txt file - cDNA_ID_2133573; gDNA_ID_1620387; Annot_ID_155498

SEQ ID NO: 23219 - DNA, 3000 bp, Unknown
  misc_feature (1)..( 3000): 2750-1469P.txt file - cDNA_ID_2133577; gDNA_ID_1620387; Annot_ID_155500
atttgctgatgtactgattgatggactttctgacgaacttcctgaaagacttgctgaaggacttcctgaactactacacgtcgaaccaagcaaggaaagtgaatcatccatcaaccttggatcgtttatgttggagatttcaaaccctccaaatgaagaagaagcttgcaaaacatctttggccggaatatcaaaaggaatcaaagagaaattcaaaggaaataaactttcgttattcgacgtaattaaattagcattaattgctaaggagtattgcttgctcgaaatccttgatccaccatttaatccagagaatgcatctagagataaagctccatcaatgcccacgatttgttcctcatcgtcaccaccaatcacgctttctctattatatcgattgatttgtatttaacttagaatattttcttttaatgtagcttagtcatgtaagagctataaaaagctcatttgtttcattgtaaaggaccacgaaatttgaaagtaatagaaagagttttctctaaagcttaggctttgtttttgtttatttaagttaggtagattcctttacttagtaaacgtgtgaatcaatgtctcttgtgtggattccttgagacaaaggttcgtgatcttatcacaaaggctttcacacttttgagtggcgatcatcaatccaccatcaaaaccctgatttgatctcacacgagagaagcgaccgctagcgtgtcagatttccaccttcgaccatctttccttcacaagagagaagcgatcgccagcttgtgaagccaccatatctatccccgtgtgagactcaccccgagtcttgcattggagaaggttagtgccggttcgcaggagacatgattttttcaatgggtctcttcttggttggttatatttgaatctgggaatggtgaatgatgaggtcgggtattcatgggcaaccttgttctccattgtggtttggtggagttggaagtggcggtgtggctacgtttttggcgagattggtaaatgtagagatagagttcagtttgttaaggacttcgcttctcaagtaagtcaagctcacaaactgaatcgctatacgggcagatcgaatactcaaatggagagaatggtggcctggaaatgaccgaaagaagattggatgaagcttaacactgatggcgcttcacggggaaatccgggattggctacagtaggaggagttgtgcgtgatggtcaaggtcgttggtgcggtgggttcgccttgaatattggtgtctgttacgggctttatattgcttgggagaggcggtttaggcgagtggagttggaggttgattcagagttggtggtgggttttttaacgagggggattagtgatactcatcctttatcgttcctggtgcgattgtgccatggcttcttatcaagagactggttagtccatgttactcatgtttatagagaagctaaccgtcttgcggacgggttagcgaactatgcattttctttccctttatggtttcatttgttagatgttgctccaccctttgtggcgtcatttgtagaggatgatgactgagaaactgcgtttccaaagcatatccgaatttgatttttgttttttagtttcttaataaattgtggggagagcttttctccccgtgacctaccaaaaaaaaaaagatcataggaacaaagtaaagatatgtctctcaagtgtattttaccaagaacgtgagatcttttacgctaaggtagagtttgtggagatcaacaacacataaagaatcatatttggtacatgacaagctcaaatggaaagttgaaataaagtttgtatcaatagagacatgaatccagaagcttgtgccaaatatttgagaaaaaccaacaatccaaaagcttgtggtgtcataccaataactcaacaataacaaaaccataactgatccaacatgccttaaagactttgttggcgcaaatttgtttgggcagtggcgggagaatatgttttcatgtttcaagttttgcctcctataatgtttttcataatgattaatgtattattattatcacatttagtttatgtaaaataaaaatttagatataaagatataaaatatataaatgcgtactggtcattacagtgcacgatagcaagaagtagtactattagcaaattagcatcgtatttttatttatcgttaattttctcctaaattttcgatttccgatctccgggcaaaatctcgagtttttcgccggcaaattcattcgtgatgtgtgcatcacagagtgttgaatcagctttcacttcatcagaaaccctaattttagtgtagtatacttgctagatccataaatttctcgagtgttttagcttgatctgatcttagctccggaagatgaatttgcagcattgttaccatttctacgcaaaaacccagtaagatcgcttcttgtatctctatgtttttaagatgaatttgactgtttttgatttgtgggttatttttaggtttagaaattagcgaatcttaaagttaagagcttttaattcttatgttgaagttattagcttatatttgaggatgtacctgtaacaactgaaatttcgtcggaaaggagagatttttaagctgtctttgacttcaaagacgatgcttttagatacccaaatctacttgagttagtagtagagattgatgtttaggtagtatatgtttctgaaatggagcttggagaagtgggttttaagcttgagggtgatcttgcattcagagttgagcaaagatgtgatttttagtgagtgggttgggttcttgttataatgttgtgtgtttgagctctttggtgtattgggttatgttgtttagtgactgaagataataattttacgctggtggatgtttgcagataatggacaactttgtgagatttagcttgcgagaacggtcttagtttccttttgtagaactgttggtggtgaagagctgattttagatg

SEQ ID NO: 23220 - DNA, 3000 bp, Unknown; identical to SEQ ID NO: 1293
  misc_feature (1)..( 3000): 2750-1469P.txt file - cDNA_ID_2133614; gDNA_ID_1620382; Annot_ID_155340

SEQ ID NO: 23221 - DNA, 3003 bp, Unknown
  misc_feature (1)..( 3003): 2750-1469P.txt file - cDNA_ID_2133647; gDNA_ID_1620382; Annot_ID_155350
ccaataaagataactcaatttcataaaaagaaaaagacacgaacatgattaaacagttctgaaatcacaagaatcagatctcgagaatacctgattttataaaaattatgaattttctttttgagttcttacattttattcctattaaaagagtgatgaaacatgtgagaacgaataataaagtaattttattagcctattactggatttacacaacatattccacgtagacaacaaaccatgaaaagttacacgtgtcaacatctcattttaactccaccgtaaacaatcgaataacgaaaaatcaatcaaattatcgaaattaacaccgaaactataaaatgtaaaacataatgttttcaagatgtaaacaatgagatcctaagccaacacgacggcgtaaataatcgcggcgacaagtgaaccgacgacgaaagctttgttggttaaagcggcgttaggtggaggagcggaagcatcggaaggtgtcggggctagttcgccggggctaactccgggaccttccggtgcaggtggagaagcggtaggggcatcagacgacggagaaggagctgaagacggaggagaagaggtgggggcaggggagacggcaggtggtggagtggtggtcggagcgggagttgcggcgggtggtggagtggcaacgggaggaggagtgacggtggtggttggagaaggagctggagcttgagcgaggcatgaggtagtgaagagagcaacgatgaagaaagcttcgatgatcttcgaattcattttttccactctctctaaagatttgtttacttaagaaagatagagagtgaagcagagttgtttaggtgaggaatgaccacgatggaactatataaagcgagagagagagataacaataattataaattaagtagtatctaattaaatatcttgcggaggggatcataattattcgattattattagtataaataatgattagtagctaatattcaaatgaaggaataacattttagtagtcaaatagcagaaacgtttaagtgaaaaaaaatagcaaaaatatttgatcagtaacacacacatatcagtgattaacaacttgttttatcgtaaataagagaatacattttcaaaactaaacataattaagtgatagatcattttatcactataatgtagtcgcatatatgtatatatataattttgtaggatttttaggttaactcaatttttagctcttagttgtaaatttgtcattttttaatgatttggtaagtatagtagatgagaaatcgaagttgagaaccaattctatccgttgagtataaaatcatcaatggttttagaagaccggattggtttagctaaatcgaatcatgattgtcaataataattggagagagaaaacgtataatgaagtagtattgaatattgtatcatgtttgtcttactgtctaatcgatccacccaccgataataatagtatactttttctgatatagtaaatagtaacgatctctttgcccgtatacgatgaaccttaatgacaaaaatacagatctatcaagaaagaacgatgtcgttattatcgtatatcccatgtgcgtagcagacctatcgggataatttttgattactggttatggttttattgttgtcgttaccgttggatatttgctgtttttcgttttatttattttcttttgtccattactatctcttgtgtttgttgctagtagtaacaagagttggagatagctgtcagagaattttatatagttgaataataaatacaaatattataaccccaaataaaacgggtacatatacattacaacataacataacaacggaagaagacatttgatagcctgtaaaggtcattttacagtgaatccagaaggttcgtattaatcattaaattaaaatataatcggtatttgacaaaatgaactgaattatagttggcaattttatgaggcccatatgatgcgaaaccaaccgacgattatacactatacctacaatttttattgcactgactcgattgattaatccctaactaaaagttcaaaatatttgcatccaactttattttcattagtgtgaacatcaatataaagaattgagaagatcattacaggttgtttcagatgataacgacaagttcgttatatatgcactataacttgctttgttacatatgctataaagttcatttgcaatatatacgatttgattacatcagtgtgggattcctagaggatgaattaagtgttaaaaatgaatctatacatagtagtttgctttgaatccatatgaaaaaactgttgaggtttaatgtcgaaatttctttatctttggcttcggctgcagtcaaaattgccgaaagaccacctcgactccaaaccattttcttgataattgtaaaaaaaaaaaaaaaaaaaaacatgatgtcccatatgcgtgtctaataatatatatagccaagaagcatatatttatttaggggaagagaatgctaaagcatgagttttgtgctggctttatgttgttgtaactcttagagcaacatgtattcacttctaactgaactttacataatttaaagcatgatttggattatctaaaaaaaagttagattatgatgaatatacaagttttttttgttagtggaaaactctcatttcttcgagtaagcttctccatacataattttcattgtctatatatatattgatctatttgtaattgtaactcttgaaagtttggaaaatatttgtaataagagataaacaatgatatgggccgatatttgcgaaactgatttcaaaggattcttctttatgggcctatagagttttgggcctttctaccaaaactttcgcgacaagcgatatgttagggcacaaggacaattcgaaacctgagaagagagctagagcttgtcagatgttaggatactcctatccttgtttccaaacgggattacggttaacgacggcgatg

SEQ ID NO: 23222 - DNA, 3000 bp, Unknown; identical to SEQ ID NO: 1297
  misc_feature (1)..( 3000): 2750-1469P.txt file - cDNA_ID_2133672; gDNA_ID_1620382; Annot_ID_155359

SEQ ID NO: 23223 - DNA, 3003 bp, Unknown
  misc_feature (1)..( 3003): 2750-1469P.txt file - cDNA_ID_2133676; gDNA_ID_1620382; Annot_ID_155360
cttgtttatttgttgaaaatgtagaagaaactaaaaaaataaacacaatgatcatttcaaaattacggtgcaatgagtatctacagtagtctctgtatttattttacttttcgtatcagtagtctctgtatatattactaattttaatacgataaaaggatggtaccataagatgatgatcatgacaaaggtgcaatgaaaatcgaattttaattgattaaatgataatggcacacgcagatctgtgtggtgcatatgattttttttttttgttattaattcttttggaattttggaccgaccagatagcgtgacattgaaggtaaataattactcactcgtatttataccaagaaaaaaaaaattgattacaaaagttttggtgggtctactttatgaaagaagaaaaaagtgtgtgggagaaaaattgagctttagagggataacttctgaattctctaaaatctacatataattttacttaaaaaggcccaaagttattgtattatttttggaccttaaacagtctactacaatgaaagggccttatcttaattgttcaggcccaaatgattttaagcattgacactcaaaacaatatcttaaaggcaattaaaggaaatctcaaggcactaaatatttgtggaaaaaaagcttaaagtctatttaataaaacaaaatcagatgatgtatattgacattaattacaaaattaaatgaatttctaacccaaaaaaatggttagattcttggcgttatggtactatttactttacttgcgctttatataaactttggataaattcatgaataccgttgtttaataatttgttcgatgtgatattgtaacccgaactaacccaaaactttaactttatacaatttgtttatgtacgaaacactttaatagtatgattcaactcatcttctatacctttttcctaaactttaaaaacttttttttaatgtatgactaacttttttttccttgaaacacactatcaagttatcaacgtacagctaaataattgcttatttgaagcaaaaataatgatataaatactgaaaaagaaaagtagaagaatcatattcacacgccaacaaatcgtataatgctgcttcatctaaaattggtccttcgaaagtcacgtccatttagctctcacgttctacccgaatcaattttaaatccttaatttacagtcataacacatatctctgataacgttattttctggatatgtaagacgcagaatttcatttctattaggttaatttaccaaccggagtaatttataaatttgtgaaaatctcgcctaacacaaagtgaataataataaatcacttgatagatgtttagccaaacgtagatataagagtaatcttattgttatttttgatagtactataggacagatttattgatgagaaaattaaaaagtgaaaaaagtgggtgaaaagaagagagcagaaattaaaaaaaggacgagaagcgagaagagtgcatcttttgatggatattgaaaatcttaagtcaagctgtaatgggaagaaagaacacaacaagtgtcggtgcctctaagcaaattccacataattctaaagaaacaacataattattattttatttttttcgcaatatttttaacagaaattgtttttattccagccatgcgtatatataagctgtcttttcggaaaaaataaaaagctgtctttatctatcccaacggtccaaaaatttaataaaatagtattataaatgcactcgtaatacccaatgttttatttttcctgaggattaaagaggcaaatatactagcctttttgttttattaacagctagctaatgagcaaaatagctgtagatagatagcgccactaatctaatccaaggccattagcttatgttgtgtatgatgtgatacccccaagtctaaattagtgatggtgacgtataattaataatggtaattttgacgacgagtatggaacgtgttccgaatttttctctcaaataatgcgttttgattttgattatcaaaagattccaaaataaatacattgaagaattcgttctctaatcttctaaaccaacataataaacttcggaccactcgacgaccaaattttcagttatgcgtaattactatttaagtcaatcaattctgttatttaatgacattaccaaaaatcttaataatcctaggctatatgtaattatgtacgagtcacacataattaatatagatccgtgatgtatgtctctagacgttatatataaaccataacagcaaaataaattataacaacacatagggaaaagattttatgaccactaccaaatagaggcagtcatagataacaaataacaaatgaggcatcgaactttaaagcttaaagatttaataccgcatttgtatcgtcattaagtgcgataattctgtaattatgtaacgttgtcattcaggagtccggaaattaattaattaattaaactatccgttgtcgtgtcacgagaataaaaggttaaattcgccgtgtttttattaagaggagactaggtggggcccaattgagacagacagcaaatttaatgaacaggtgtccatgtgagacgcattcacacgctctctctctcaagtctctctttccattactactactataaaccgttctgggaacttgatcaacatttttaatcctaaaacttcttttgagtgtgttgaagaagaagaagattaaaattcactaaaaacccgagaaaagtggaagaagaaggaaggaagaagaagacaagagagcattctgattcatgtgactctggtttcgtttctttctgtgtctctgctgtgtcgttttctcggcatatttctgatctttcgttctcggttggtttttggtttctgggtattgattgattgattcaaaagtcttcaactttcctggaaactggatctgggtttatccgtttttactcgtctgagaagagaaaaaaggatg

SEQ ID NO: 23224 - DNA, 3003 bp, Unknown
  misc_feature (1)..( 3003): 2750-1469P.txt file - cDNA_ID_2133700; gDNA_ID_1620386; Annot_ID_155440
aaggacaaaactgtccatttagattccaccacgtgtcccgataacgtttccgtctgtatctctctcttccgtcttctactcttcttcttcttcttcttcttccactcacaatctatcgagctaaaacactgaagcagacattagcgttgagaaaaaaaaaaaagtaagaacgagagagagaaagccatgtctgcgaaaacaatcctatcatcagtagttttggtggttctcgtcgccgcatcagcagcggctaatatcggattcgatgagtcaaacccgatccgaatggtctccgatggtctccgggaggtagaagaatctgtttcccagatcttaggtcaatctcgtcacgttctctctttcgctcgcttcactcaccggtaagtctcgtcctttcaccacccgtgctttctccgttgacttttgatcttagcttttgatcatcgtttgttggtgatgaagatatggtaaaaagtatcagaacgtggaggagatgaagcttcgattctcgattttcaaggagaatcttgatttgatcagatccaccaacaagaaaggcttatcttacaaactcggtgttaatcgtaagtttttttttttatctttcttctcctgagtttgtacttaaggaagtaaacgtatgtataaaagacactgtgggaaaacgtggaaactaacttttgttctgtcttggaatcttccaagttaatatttttaaattttgatttttttctttcgttcacgtgattcaagattgttattgggactctagactttacagagtttatgagtctatgaactctgtgtgagagactagtttgtgtcaaaaacagtgttctgcttctttaagatttagctgtcctgagttgaagattggttctcgttcctacttccttgtagagttgtagggatctaatctttatttgtcctagaactgacactgcaatggtttgatgaataatgatttacctaaatattgctaattgtgtcttgaatctatacagaatttgctgatttgacatggcaagagtttcaaaggaccaagcttggtgctgctcagaactgctctgccactttaaagggcagccacaaggtcacagaagcagctcttcctgaaacagtaagtccaggactcaatcttgctgcactgaactatgtcaaccaccatcccgttctgtttttcagctctaagagaacgtgtttagctgcagacctttttaaaaatttggttctgagttctcaaattgtgtaactgcagaaagactggagagaagatggtatcgttagtccggtcaaagatcagggaggttgtggatcttgctggacattcaggtaaaagtaaaaccaatgattaagatactctctttaatttttggtgggatcttttgatgtcaaattgaaggtcgagattgtatgtcatatgattgttttttgtactgcagcacaactggagctcttgaggcagcttaccatcaggcatttggaaaaggaatttctctctctgagcaacagcttgtggattgtgctggagctttcaataactatggttgcaatggtggccttccttctcaagcctttgaatacatcaaatccaacggtggcctcgacacagagaaagcttatccttataccggtaaagatgaaacctgcaaattttcagctgaaaacgttggtgtacaagtcctcaactcagtcaacattactctggtaagcatcttttatggattttgaatttcacttgcatgagaatatacattctgtaatgatgattgaaacaacaacaacaacagggtgctgaagatgaactgaagcatgcggttggattggtacggccagtaagcatagcatttgaggttatacactcgttccggctttacaagagtggagtttacactgatagtcactgtggaagtactccaatggtgagactttcttctttaaactgttaaaaagactttcattggttcacataaaatcttcttaggaacttagcttagtgttcggtttccttaatgtggcaatataggatgtgaaccacgcggttttggccgttggttatggagttgaagacggtgtaccatattggcttattaagaactcatggggagcggattggggcgacaaaggttacttcaagatggagatggggaagaacatgtgtggtaagttctttaataattatgaaaccatcacaccattctcaaattctcacagttggtctttctctatctattgttgattcgttcttgaattgcaggtattgctacatgtgcatcataccccgttgtggcttgagatgatcagcgaatgtggttggtcaattatcaaattacgaaatgttcacgtatttattggattaagacattacgtaaaagttgggacttgggaatgcatatggtttatgcttgttgtaacataaaaaggtctgttaatatgtacaaaataaagccaaaactatagacgacaaatttataatattttcatgttaaatttatgaacataaattgatttagatcaaagtagtttcgttcttgatcctaagtcaatttgtctaacatatagcttttactttgaatcttgatccttgagtcattttgtataacatacagcttacaagttatgactttattttgttttggtaattggtattctaaacgaaaatgaaatctaataacgtgattaatagtggtcacatggatatctcataaatctctatccaattgtgtgattaagaacatgcaaaactgcaaataaagtataaaaaatcatttacacaaaacttcatctagtttttggacatcaaattcacaaaaagcagcatataacactacaataattgatttcacttttattttatttgtttgtttacctttctaagttcaaatataaattctatgattagtttattataattacaatttttattttttttactctgatttgaattttttacatggacacgaaagaagaagaagaccacatgttggttccgaataaaacatg

SEQ ID NO: 23225 - DNA, 3003 bp, Unknown
  misc_feature (1)..( 3003): 2750-1469P.txt file - cDNA_ID_2133710; gDNA_ID_1620386; Annot_ID_155445
gcctctcatctgctaaatcattcatatcaagtcttgtcaacttgttttttgaaccaacttgctcattaaagtaattcccacctaaacttctgtattaagcagacccttaaaaacagtgatgcaagatttaacatcactttcaccatttattacatggtaacaatgagacaaaggcatttacttttggaattgatgattattggaacaaatcttgcaatgatttgcatataacttgaataataccttttgatcaaatcttaacaatgaaatttggtctccaaaaagactaaaaactagcagtcaaaagtgttttgttgagatttatgcctataattagaatattatatgctagttggtatggttgagtgttacaagaatctacttgctacaaagtgacaatccaggagctgttcatagtacatagtaccaacattatacaagggactagttatggataagtcattgcttttgagacatagtaccaacatatgtaacatgggtcacaaaggactagttatggataagtaccaaaattttctccactatctatgttcatgaacatatgtagcatctgtgtatagatgcaaaatcaagagctcaaataaactacagagtatatacacacacaaaaaaacttatcaatgtgaattcttggaaatgaaggtaatgccaaatcattggagatgacgttaacaacatgacctcacttgggataataatcctgataatcatttgattgtagccacatagaaagcagcaaactaaatgacaattatgatttaagagcaaagatagtgacagtgtaaattaagtccactcttctttgaccttaaggtaataatatatatatggatgaggtgatactaatagagtgattacacatacaagtggtcttgcttcttctatggttttaaaactgcaaataaagatttgcttcgcaggagagatagcgccatcacctcttctaagaagttaactagtggtgacggtatctctcctacgtagcaatccttatatatgcatcttaatacggagagatcaaggtatttcagttgttcaataatcaccctctaacaaagatgcatcttaatattcataaactattctctttctacttacatagtaacaccataaaaacaatgaaactgctccgtagaggaccttggtttgagcctctagatcgtcttctcttacctaaaatgataatctgttccaagataggttcttgctatttgctcaaatatgttttggtcttttgaatgttagctcagcaaggagctcacatgattagcagcacatcctcagcctgaaagtttcaagaaaagctttatcaatttaagagttgtgtacgtttgcagaattctcacaagtttggtttgattctcacccacaagaaaaaaatgtcttttcttttactttcgatatgtttctttgcctttgacaagggacatataaaaatgttaagacgaaaaggttgacaaatctttgaaaactatccacatcatgaactcaagatatctcattccattagaagcaaaaaaaatatcaagtcaatgagaccagctcacgactactctagaatcttcattaagcagaacaaggaaaatctataggtctaattaaacctttttttaatatctcgggttaacaccaaatttggttcaaactcgacaagtcattgttcaaaacacagcatccaaaaagataaaaagccaaatcttatcaccagaagtccaccactaattggtatataatgtttttttttgtatgtagaaatagtgttgaagaaagagcttcatgctatttgatatctataatatctcatttcttgtaacaaatgaactccacacggaatgaagctttttacatatagaaagaacatataaatgtgtccaatatctaatttggtccacgtatcaatttgcaagatcacatgcttacgagacctcaaatatttggtggatatataagataatttcccacatgttttacgaaccatcccgtaatgagtatgaattatccggtctagcaatccattcgatagatttactagttgaaacttgaaagtagggttttgctcacttgtatcctttattcgtagtttaactataatgcacatatggaagaattgagccacaattctcaatgaatttagcgagggtgagaaatgtcaattcaatgtacattctatgtcaattcaatgaaaacaaatgaagaaaagagacatgaaatatgtttccaaattcttacttagaagaattagaatcaaataatacaatatctacatatgccatgagagacatatggaaaaccatgttttcggatgataaacttccaaattgatttgatatatactataaaccggcaaataaacaaattgaggttaaaatataacaaaccggtccggtctgatcgaacggctgatgtcataaaacgtggggaatattcgattaaaataacaaagactccgttacggtcgtaaataagtggtgtgagaaccgaaagtcaaaaacacgtcaatattggtgggggggacgaccgtgcacgtgaccacacaggaactaaacccggacgtattgcgcgaaaattaaaccggatttgataatcggcgactcgtccggcaacccttgttttgttttcgtctcggcggatcgatttttcttcgtctgggtttggttgtctttttattttcctcttccttggccaaagaaaatcttatcgtagctgtgaaaaccctagtttctaatcatctcaattctctcattaacctatcaatttcgatagggtttgatcaagtatccgatttcatggtttgtattttccgtttaatagtctttaaaggtcttgtcttttggaatttcaagggttttcgtttcagtaactccttcttttttttctgttaatttagatcggttgctgtatggagactaattgctggagtttaggttcgtgtgttttgaactgagcttttggttcttgtttgtgtctggtgttgaagacatg

SEQ ID NO: 23226 - DNA, 3000 bp, Unknown; identical to SEQ ID NO: 1314
  misc_feature (1)..( 3000): 2750-1469P.txt file - cDNA_ID_2133718; gDNA_ID_1620386; Annot_ID_155447

SEQ ID NO: 23227 - DNA, 3003 bp, Unknown
  misc_feature (1)..( 3003): 2750-1469P.txt file - cDNA_ID_2133747; gDNA_ID_1620386; Annot_ID_155458
agctggctcgggaccagcacttgtttctccaacagatacaatagtcttactactgcttgaagaagctccttgctcaatctctttcgtcatctttatgaaataactgtgcctgcaaaaaaaatgaaaccggaaagagtaaaaacagaccatatagatcattgctgcaaatatcaaaagatcggggaaaatgttaatcaattaccatcgagtgtctgcagtaagctcgggatgaaaagcagttgctaacaagtttccttgcttcacagcaacaatgacttttgtttcaggaagagcatcttcctgatttatccccaaaaaatgaaaccaacaagaagggattcatacatgtgctcacaaaagagtaatcgtttcatgaaaattagtgcaaaattaagcaaacctcttgaatttgtacggtggagcttgaatacaagaccttgtttgatgggacgggataatccgccaggacttcgacatcaggacctacatcaagaacagctggagcacgtatgaacactcccctgtatgtctctggcccaccttcttgagatgttagttgaggtactaagatatcagcttcaaaactttgaatctacacatcaaaaacaaattcgagaacaatctaagattttcacaacatcttatttgatactaagagtgaatgagaatccatatgaaattactcccattgattcatgaaaagaccgagttttatatatcagtacaccacaactcatgctaatataagcagtttctttttccacatattgcaagtcaagattgatttaaatatgtgtttacacattttcttaacatgaacccggaatcttggtaagagacataacctggctaccgaagaagttcctatgtacggtgcaatcaaggccaccaactaattcctgacctccctctttctgacctaaaatttcaacatttactcaagtttctaaattttccgcaacaggaagatgaattcaagtactcaccaactgctctgtctgccaagaatataagacctgcgcatgtcccccaaacaggtttccccatcttaacaaactcacgtagagccggaaacttcaaaagagcaacaaatgaaagaaaattagaacagagaagagacattttacactattcttcgtcctcaccactaaaactgtaaaaacaaccaaatctaaacaaggagtttggtaaagataaaagtaaatgatagctctccctttcctacacttatcacagcttccattaaagacagaaaatatcatccataagatcaacgagtagtttggtccacaatgtttaaaggtttcagatacaaaacattacttcatgtacttgaaggctaactaatcccaaagttccttcattttcaatctcaaagctaattactttcaacagtactaactgaattattcaggtataagagacgttttgactgaaattctggagaattttggtgaataacgccagattcgtgtcaaaacacacataaaaaaggaacctttaactagtttcttcaagtgggtcctcgcaaacaataactttagattctagagagagaggagcggaccaagttatgatactcggcgagtttggccatggtggtgctctcgccgccaggaatgataagagaagaaacggtgagaagctggtcagccttcctaatctcgacgccttggacaccgagccgccgcagagccgcgatgtgctcattgaaagaaccttgcaaagctaaaactccgacggtcattgcggcggcgacggtcaaagaaagagagtgtcagatattattaaacactaaaactttgtgaatggaattgggacactcacaaaagcctttttgtaacagccatcgacgattttgttttgtgtttctttctttgcccacgatttggatttctattcagatattttcttataataacatttttaaatataaagatatcacggtattaataactattgtgaacaaattcaattaaaaagccataaacaattatgctaacaaaacaaaaatatacacttattaagcttttatgtgattataattcaaattctctaggaaaaattgtaatctattttacaaaattttaaagatgatgatataatattatatatacacacaaaaaaaaacttatagtaaaggtaggttttcaaaaactcataatgtgtttttttttattagtagtaattttattgttttctaaccactgaatttagtttatagcatgttttgtcacattagctggtgatgatttaatataaaactactttttataaaagtaattgacaaaacaaaaaatataaaccccaaaaaaaaaaaaacagaagggggagagaatctcgatcaaaggcttcgaagctctctcttttttttttggtgtgtctaaatctctcacgcacgacgttgagagagctctttcctttgcgatcttgttgtcttcctctgctccgatcgaattcacaaccagctttaatgtatgattctcgctcttaccttcagtttatgttccgaatcttctcatgaaatttccattgcatccgatttcgaaattaggtttttttttttcaattttcaaaattttggtttgtgatttatgtgattttgaagccaccttcttgggggttcttaagtttgctgtagaattttattgttcttctctccgtctttgtttctttgcttagagttgactatttggattgaaaaagtttacacctttacgcctgaatcataatacccacaatgtgattgacttatctacacaagcttttgaatttgatgagaatttgaccttttcttttttcgcagaagcattgtagttcaacttgaatttattggcggttgttgaagctgtgtagctattaacaattggggctatgcattcaacgattttctgctcgtgaagaaggaatataacttatttataaggtttcagtcttagacatgtcgtgtttcgattgcagtggttatgatgtctcaagttgtcttattcatctcgctgaatg

SEQ ID NO: 23228 - DNA, 3000 bp, Unknown; identical to SEQ ID NO: 1311
  misc_feature (1)..( 3000): 2750-1469P.txt file - cDNA_ID_2133809; gDNA_ID_1620385; Annot_ID_155417

SEQ ID NO: 23229 - DNA, 3000 bp, Unknown; identical to SEQ ID NO: 1306
  misc_feature (1)..( 3000): 2750-1469P.txt file - cDNA_ID_2133826; gDNA_ID_1620385; Annot_ID_155421

SEQ ID NO: 23230 - DNA, 3003 bp, Unknown
  misc_feature (1)..( 3003): 2750-1469P.txt file - cDNA_ID_2133845; gDNA_ID_1620385; Annot_ID_155425
caacgacaagatcaagaaaagacaaagatttgtaagaaaatgggaagagctccatgctgcgacaaggcaaacgtgaagaaaggaccatggtcaccggaagaagatgtgaagctcaaggattacatcgacaaatatggcactggtggcaactggatcgcactgcctcagaaaattggtaagaattctgaaatgtttaaattctaatcccaaaagtaatcgcttataattttcaatttcgattgattagatcaagttttgttctgactttgagatttgtgtaaattatagggctgaagagatgtggtaagagttgcagactgagatggcttaattacttaagaccaaacatcaaacatggtggtttttctgaggaagaagatagaatcatcttgagtctctacattagcattggaagccggtcggtgatctatctctcttgatttctattaataataagttaattaacacctcttcattaaatatataaatttttttgttatgatttagaggtaatttctgttgaaatttcgacttgagattcttgtctttttaccttttgtctatgaatcttatgctgaaacacatgcaagcccatgtttcttcaagctatggtatctcacatagaatttagggtttatattgtctctttcttcttgttttggtgtctttgtaagaacctttatacatttatatcttttaatcttgaacttggttcgtgattctaaatacatagttttctaaaaaaaactttctattagttttaaccttaatgtgatatatttatgcaggtggtccataattgcagctcagcttcctggaaggactgacaatgatatcaagaattattggaacacaaaactgaagaagaaacttctaggaagacagaaacaaatgaatcgtcaagactccataaccgattctactgagaacaacctcagcaacaataacaacaataagagtcctcagaatctgagcaattcggcactggagaggctccagcttcacatgcagcttcagaatctacagagccctttctctagtttctacaacaaccctatcttgtggcccaagcttcatccattgctccagagcactacaactaatcaaaaccctaagcttgcatctcaagaaagcttccaccctttaggagttaacgttgatcatcagcacaacaataccaagctagctcagataaacaatggagcctcttctctctattcggagaacgtagagcaatcccaaaaccctgctcatgaatttcaacctaatttcggtttttcacaggaccttcgattagataatcataacatggactttatgaacagaggggtttctaaagaactgtttcaagtgggcaacgagtttgagctaacgaacggttcgagttggtggtcagaggaagtggaactagagaggaaaacgacgtcgtcgagttcttgggggtcagcttctgtgcttgatcagacaactgagggaatggttatgcttcaagattacgctcagatgagctaccacagtgtttaataagttatatcatgcatatatataaatgcgtaactatagggatggataatggattattgatggaatatgtattttattacggtcataagcttatagcatgttgatggtgaaaggggctttttcataatttgttttaaaatgtaacgagttgtggataataatgtaaatcgttaattctacttggttttatttcattttggaaaaaataggagacgtaaataaactttgatcgatttttatggtgaatatccacactgtacatacagagtttttattgatcagaattcttttctttaacaaaagaaaacaaaacgttttgatacattttgcaatttagtagctgttactggttacggacttacggtatcattgcccatttcaatattccgaatttccaaagtgtgagttgttaagaaaatcaagatttttatgcttcggtctaaattttgtttccagaaaaaacattgattagttactaaaattgagtttgacctagaaaatggggtctgttcgttttctatttctaaaatcatgggccttcctttttccatttctataggcccatctaaagatgcaactcgtggttgatactagatagtgacttggtatgacaaggaagaaaagtaagctaaaatttgattaatctctattatctatgtcctcaactagaaagtaaaatacttgtgtacatttgaccaaagcgtatagttttagcatataataaaaagccagaggagtattaattaatggtaatcatagattttgtaaattaaagcattagatagaaagtcctttcagggaacattttttggccggctggatttttatattcagtaatctcgaatcaaatatccgataattgctaattaatttttatccctgtaaaactaataaaattgaccaattctatccgcaataaatcaattcatggacgatcaccttttccttgtgccacttgatattaagaaaccaattaagatatcattcaacgccattgatctataaattttcatttcctcttatgaatattaattttattcattacaacttcttgtatgcatgagatgacaaacactttttatttctcaaaaataaacttctcagttatgttttgcgaggaacaaaacaaaattctgtttttaaagtgaatcggatagtttttctttataatcatattgaataattaggataaaatgttcatatagctaagcactcaatcaactatatgaatgatatttaagaagttaatatacacacatagagacaaaaatcatattaaaacccctaattgacaattatcaattaacctaccgtttaaccaaagggaaacataaaagagtggtaaccataatcgaacatggaagccacattgtagttgacatatcctaaaggtccaaattcattaattaattcatgaattcatcacttataaataatcactcaccaaagtcatttcccttcaccacccacaaagccatg

SEQ ID NO: 23231 - DNA, 3000 bp, Unknown; identical to SEQ ID NO: 6395
  misc_feature (1)..( 3000): 2750-1469P.txt file - cDNA_ID_2134026; gDNA_ID_1621091; Annot_ID_170707

SEQ ID NO: 23232 - DNA, 3000 bp, Unknown; identical to SEQ ID NO: 6383
  misc_feature (1)..( 3000): 2750-1469P.txt file - cDNA_ID_2134041; gDNA_ID_1621091; Annot_ID_170711

SEQ ID NO: 23233 - DNA, 3003 bp, Unknown
  misc_feature (1)..( 3003): 2750-1469P.txt file - cDNA_ID_2134056; gDNA_ID_1621091; Annot_ID_170721
gctaaagcaaaattcttgggacttctttacggaaagtggaaagacaaagtcattcactgtccaacaaaagacactcacatgtccaaaataagggagcgaatcatcaaatctttagaaatctgagactgtggtcacagttcacaccaccatgaaaggagcttaaagctaaaggtcaaaagaggattaattctttacattgagaaagagtcatataaggacaaaacagaacacaacctgaaactggaaacttaaaatcgtattaatatcaatcctaacaaaagtctatgatcatgttctctatgtttatattctcttgactattgctatttctctcatcctatatattttctaacaaccctaaaacattaacaaaagaagcaaaccagaagcaacagaaacagaccagactaagctcaagatatcaaaatgtgaaatcagatgatgggaggaggaagagtctcccacacatcaaacacattctcctcactgtgcaatgcaaacaacctatccccaccaatagagaaatcacaaatggagccgccatagcttcttttcaacctagaagtcaaaacccagtctgatccacaaaacacagagatggaatcattcatagacgagaagagctggccttcatgcaaagcaagtttggggtaacaaggctcatcaggcatcttgcttttcatcaacctgctcctagaactccacctcacactactccctcctccatccatcctcagatcaataaaccctagatcttcaaactcattcaccacacatatcgaattgctctcttccattgctatcgcgtctctcactctcttctcttccgccattgtaagaaatccgatatcagaccaagaccagaccatgttcttctctcggaaatccaacaagctaatataacagttatctttccttggaaacaaagtagctacaagaagacaattcttaccactcaaccattgcaacttatcagcatctcctaaagaccaaccaggactctcgtaaaagaaatctacttgctttccagtactttgatcccaaactccaatcccatactcattacttcttcctttacagctcgtaaagatcttagaatcaggactaaaactcaaagctccagcactataactcttaacctgattatcatgactaacctgaaacttatacctaagctcaccagaagatgagctaaacaatcccattcctccatctcctcttcctaatctctcacaagcagagagtacaatgttaccagaatcaatccaaccaacatcgttcactctctggtaatcaagattaatcgttggatgctcctcaagcatccaatcaaagacatggacgacactcccatgagctatgcagcatccaccatccggaccagctcttatcgccgttccgtctccaggagctatgccggtgacggaacgagataggtggagtctgttaccgtcgaaaggtccccactttgcggttcgtaagtggtctattaagccgtagaacattgcttctttgtgaaggagacgctccgggatattaggcgggatgtttaagtctcctgttcggagaagatcgagaagaacagcgaagcaatctggattcctatcgatgaagagatccccgggttgtgaaagattccaattttcgtcgaataatgctccgaagaaggaatcgcgacctgcgttagcgagcgttgtcgctgtcgtttcgaagattctgccaccaacgttgaatttgatcctgtcatttgataaacccattatttctgatttctgaaaataggtgaaatcaatgatttttatggattcgaaccaaaagcattaatgacaagacaaggaagccatgaacgctcgaactcggattgaaaatattcgaaattcgatcggattcgaagaaattgaatcctgggaaaggataacgaaatgaaatctgatttatgattaatcaaattgaatacgatgatctggactctggatatttttttaaaaaaagctgagattcccagaagagaaaataaaacgatctgtcttggtctcggacatttttccgttgctcgggcatttaaaacgtaagaaacccaactggaacatggtgggacctactagagacaatactcgtgttactaccgtcagatgcttttagatattgtcgtctatcctgcggtcgagatttcgtgtaatttcaaagctaataccgtgatccatgataacgtttctaaagcccatatagatagatatcatcccattaacatatccttttttttgtatgctgaaatggggccattagaagccctgaagaaaatgaagaatacaaacaatttcgttttttccattgaaatattttgctattttcgtgctgagtcttatcatacattaaagtacgtatatgtttttcctctttcagtcactattttggaagaacgcaaaacaaactccacttttcttgcagttgtttcctctataaagtaagtaatttaccactgtactaatcttttcggggtcagtcatgatctaaactagatggatcaacacaacaaaaaattacctttgatatatcaaaattcgtagaacattgaccatattcattatgctatttatcaccacatcacatgataataaacaaacaaacatcctagatagtcttaagataaattttacatagtaaactaaacggaacacgtcaatgatttgacgtgacgcaggggtgattaacggagaaataaacggagttggtttaactatctacagtcaaacaaagactgaaagacattaatgccccttctttctctttcttttttggtatctttttttctttcttcttttgcttttaaagcagagaaggcataataaaggaccaaaacgcagcgttttcttccggagatcagtcggtcggaaagcggctacctttttgtctgcctagagaatttgttcgtttctttcttttactctcttcagacaaaacccacgagatacagaaaaagaggacaagagagaatcgtccatg

SEQ ID NO: 23234 - DNA, 3000 bp, Unknown
  misc_feature (1)..( 3000): 2750-1469P.txt file - cDNA_ID_2134056; gDNA_ID_2926199; Annot_ID_201686
aaagcaaaattcttgggacttctttacggaaagtggaaagacaaagtcattcactgtccaacaaaagacactcacatgtccaaaataagggagcgaatcatcaaatctttagaaatctgagactgtggtcacagttcacaccaccatgaaaggagcttaaagctaaaggtcaaaagaggattaattctttacattgagaaagagtcatataaggacaaaacagaacacaacctgaaactggaaacttaaaatcgtattaatatcaatcctaacaaaagtctatgatcatgttctctatgtttatattctcttgactattgctatttctctcatcctatatattttctaacaaccctaaaacattaacaaaagaagcaaaccagaagcaacagaaacagaccagactaagctcaagatatcaaaatgtgaaatcagatgatgggaggaggaagagtctcccacacatcaaacacattctcctcactgtgcaatgcaaacaacctatccccaccaatagagaaatcacaaatggagccgccatagcttcttttcaacctagaagtcaaaacccagtctgatccacaaaacacagagatggaatcattcatagacgagaagagctggccttcatgcaaagcaagtttggggtaacaaggctcatcaggcatcttgcttttcatcaacctgctcctagaactccacctcacactactccctcctccatccatcctcagatcaataaaccctagatcttcaaactcattcaccacacatatcgaattgctctcttccattgctatcgcgtctctcactctcttctcttccgccattgtaagaaatccgatatcagaccaagaccagaccatgttcttctctcggaaatccaacaagctaatataacagttatctttccttggaaacaaagtagctacaagaagacaattcttaccactcaaccattgcaacttatcagcatctcctaaagaccaaccaggactctcgtaaaagaaatctacttgctttccagtactttgatcccaaactccaatcccatactcattacttcttcctttacagctcgtaaagatcttagaatcaggactaaaactcaaagctccagcactataactcttaacctgattatcatgactaacctgaaacttatacctaagctcaccagaagatgagctaaacaatcccattcctccatctcctcttcctaatctctcacaagcagagagtacaatgttaccagaatcaatccaaccaacatcgttcactctctggtaatcaagattaatcgttggatgctcctcaagcatccaatcaaagacatggacgacactcccatgagctatgcagcatccaccatccggaccagctcttatcgccgttccgtctccaggagctatgccggtgacggaacgagataggtggagtctgttaccgtcgaaaggtccccactttgcggttcgtaagtggtctattaagccgtagaacattgcttctttgtgaaggagacgctccgggatattaggcgggatgtttaagtctcctgttcggagaagatcgagaagaacagcgaagcaatctggattcctatcgatgaagagatccccgggttgtgaaagattccaattttcgtcgaataatgctccgaagaaggaatcgcgacctgcgttagcgagcgttgtcgctgtcgtttcgaagattctgccaccaacgttgaatttgatcctgtcatttgataaacccattatttctgatttctgaaaataggtgaaatcaatgatttttatggattcgaaccaaaagcattaatgacaagacaaggaagccatgaacgctcgaactcggattgaaaatattcgaaattcgatcggattcgaagaaattgaatcctgggaaaggataacgaaatgaaatctgatttatgattaatcaaattgaatacgatgatctggactctggatatttttttaaaaaaagctgagattcccagaagagaaaataaaacgatctgtcttggtctcggacatttttccgttgctcgggcatttaaaacgtaagaaacccaactggaacatggtgggacctactagagacaatactcgtgttactaccgtcagatgcttttagatattgtcgtctatcctgcggtcgagatttcgtgtaatttcaaagctaataccgtgatccatgataacgtttctaaagcccatatagatagatatcatcccattaacatatccttttttttgtatgctgaaatggggccattagaagccctgaagaaaatgaagaatacaaacaatttcgttttttccattgaaatattttgctattttcgtgctgagtcttatcatacattaaagtacgtatatgtttttcctctttcagtcactattttggaagaacgcaaaacaaactccacttttcttgcagttgtttcctctataaagtaagtaatttaccactgtactaatcttttcggggtcagtcatgatctaaactagatggatcaacacaacaaaaaattacctttgatatatcaaaattcgtagaacattgaccatattcattatgctatttatcaccacatcacatgataataaacaaacaaacatcctagatagtcttaagataaattttacatagtaaactaaacggaacacgtcaatgatttgacgtgacgcaggggtgattaacggagaaataaacggagttggtttaactatctacagtcaaacaaagactgaaagacattaatgccccttctttctctttcttttttggtatctttttttctttcttcttttgcttttaaagcagagaaggcataataaaggaccaaaacgcagcgttttcttccggagatcagtcggtcggaaagcggctacctttttgtctgcctagagaatttgttcgtttctttcttttactctcttcagacaaaacccacgagatacagaaaaagaggacaagagagaatcgtccatg

SEQ ID NO: 23235 - DNA, 3003 bp, Unknown
  misc_feature (1)..( 3003): 2750-1469P.txt file - cDNA_ID_2134074; gDNA_ID_1971789; Annot_ID_175535
ctgatagaatggagtatgcaggagtgctttgtctgcaagcaaagaacacaatggcggtgtgttaagtgtccaatggctgctcatgataaacattctccatggtcaaaagaaatacttcacttaaaagaccaaccaggaagagcagtttgttggaggcatccaactgattggcggctagacacaaaggttgattttttagtttaccgctttcataagatacttcttgaagcttcttacgatttgtactttcatagagttttactcacaggactgacaaaatctctgttgattgagcagcatgcagttgcacagagtgagattgaggtcagtgtttctttgccacgtgccaaatgtgactgtagtaaaggaaactaattcttacatagacttgccgctcgaaaatcaaaaagagggaagagatttgaaagctggatattttgtttttatcttacacaatttcaagagctaggcactgaatgtttatctactttcttattcaggaagtcttttgccagttgcctttgccatatgtggaagaggagtttaagattgacttagcatggaaagattctgttgtgaaggaagatccgccttcttatgtgcacattagacgcagtatcctttatagtttccacattcaatatttctgccttaaaagtacataattctcattttttcacaacattagtgtgtcttttccttgactgagttaagatatttacctcgttaagaaaaagcgtgataatgctaatgatggtgttgggtgcacaaattgtggccctaattgcgatagaagctgtgtttgcaggtatatttgttaattaaccaaacaaattttctctgttaacattcatttcgttttgaatagtttccgttttgaaaaatttctctcagggttcaatgcataagctgttcaaagggatgcagctgtcctgaaagttgtggaaacagaccattccgcaaagagaaaaagatcaaaattgttaaggtaaaactagtctctagtttatgattcttgcattacactcttcttgtgtttttttatcttgacatgtcatgttattggttttacagactgaacattgcggttggggagttgaggcagcagaatcaatcaacaaagaggacttcattgtcgaatacattggtgaaggtaaactatcttgatttggtctttgagccttatgtttgtggtggaaagcgacagagtttttagtgatttgttttcactctatccacagtgattagtgatgctcaatgtgagcaaaggctttgggatatgaaacacaaaggcatgaaagacttttacatgtgtgagattcaaaaagacttcacgattgatgctaccttcaaagggaacgcctctcggtttctgaaccacagttgcaacccaaactgtgtattggaaaagtggtaaagcatatattatttcatataaatatgtcgatgatgctcgagtaagagagcatgagtcagtttgattattttgttctaacaggcaagttgaaggtgagacccgtgtgggtgtctttgcagctcgtcaaatagaagcaggagagccacttacatatgactacaggtcaagttcttgaccatttgtttcttttatgtgcttataattagcctaagtaatctgagattctgatatattagcttctctctttgtgtaatggcagatttgtgcagtttggtcctgaagtaaagtgcaattgtggttctgaaaactgtcaaggttatcttgggacaaagaggaaagaaccaaactgtttggttgtatcttggggagcaaaacgcagaagattgtttcaccgacctatagcccgtaaaccgcagcaagattagctgcaaaatatctataaacaatgtgctttgatagtttgtctgttgtcgttatctagtaatctctgtggagatatagaaccaatcgtgcttgtaaccgaagcttaggcccacaattgtataactgctagctgaagccacgggatagaccggtcggttataccatacattctttcagttccattacaacacaattattatttaacccttgtcaaatttgaatctgatttaagaaaatacattcccttaaaaaaaactatctaaagatctcgcactatcatggcagaaaattcgacagaacaaattttttgatataaccaaacagaagaaaacaaattatataaagactacaatcatattacaaaatcgctatagcaatctaagtatcaagtttcatcatgtgactggtttcgctctgccttgagctcatcaggtgatcgagtttcagatcacgaccagttgattaagggtcggcctagtcccctttttttgtttttattacagaaaatacaaaagttacagagaatacaaggtcgggttgcagatcacgacgttacggatcatcgtggaatgtgggtagaaagactcataagactccatgaattcgatatgtacctcaatggtgcgaggatcaggtttcgggatacgtctttgttgttgttgaagtttctcgactttgttgtttgatgaaaatatgaaattaatgtattattgatagataagtaaacaacaaaatagtaaaacccaaagatgaaccaagtgacaaattgtgacaactacatggtagctatcctaattatcgaacataaatttttcatcaaaagtctttaacgaaccaagtgaatgacatgtttcaaagtcgaatactaattattgtactggtttaaaagatttgttccaaattgatatgatttaaaccagaagtctccgtatgaaacggagacttactcttcggcaagagaaggttttagtcaaaatccccattttttaaaaattctcaacaaaacgcctaaaaactgaaagtgcttattcctcttctccggcgaaccaaagatcaaacctttgcgagagaatttccctctttttcggcaacgagtatatccaatcagcaaggaattttatgatcgcttgataaattgaaactatttggagtgggtagtgatg

SEQ ID NO: 23236 - DNA, 3000 bp, Unknown; identical to SEQ ID NO: 6389
  misc_feature (1)..( 3000): 2750-1469P.txt file - cDNA_ID_2134074; gDNA_ID_1621091; Annot_ID_170730

SEQ ID NO: 23237 - DNA, 3003 bp, Unknown; identical to SEQ ID NO: 23235
  misc_feature (1)..( 3003): 2750-1469P.txt file - cDNA_ID_2134074; gDNA_ID_2926198; Annot_ID_201645

SEQ ID NO: 23238 - DNA, 3000 bp, Unknown; identical to SEQ ID NO: 8387
  misc_feature (1)..( 3000): 2750-1469P.txt file - cDNA_ID_2134078; gDNA_ID_1971789; Annot_ID_175533

SEQ ID NO: 23239 - DNA, 3003 bp, Unknown
  misc_feature (1)..( 3003): 2750-1469P.txt file - cDNA_ID_2134078; gDNA_ID_1621091; Annot_ID_170732
gcagccgcgaacagaacacgataagtcttcccccgggtacaccggcttatggcaaacaagacaatcaacctgacaccaaatcccatatagtcattatgtcaataaatctaataacttagtcactaattgacttgaagattcgaatgactttaaaagtaaactagtagtcaaacaatatctaaatgaatatgagatcttacacggacatcactaaagccaaaaaaaggtgatgaattcaattcacagatgcaatatacttcaaacaaacttcataactcaagatattatgtatatcctaaaatccaaatcccatgtagtctatatgtcaataaatctaaaaacttcacaagtcattaatttgacataacaaacaacataccattttcttggcaccaacaagaaaaggaaggaaacatgtcgactctgaaacaccagaagccactcttctcttgacccaatccttcacatgatcatccaagacaaaccctttcttgactctgtcagacggattctgtttccgggtaaaagcagtgactccattagcaattttaatgtccttgacctcttcctccggtggaatcattggtaaatgtttcccattgcattctccggctagattttccggggaattgatagatttggctaattcagggcctgaagccgccggaagaaaagaagggcaacaagtgagagcaacagatgcagacatagacatgtttcccagatctaacatcctaaactcgaaagtacaaaagatggaagagtaagaagaagaagacagttacgttttgtctttgttgggtaggcgaaaagcgaagagacatgaaaaaatatggagggaatttaaggcgggagatttgtcctaaaatattatacaaaaaggtccttgtattttaaatattgttttaattgcccccaaacattttttctgctagttaaatttctttaccaactaaaatcccccacattcatatctaccaataacagtgctacacgcaatgattaatgccggttcccaaaacggaactgaacaaatagctaaaattaatcaaatcatgatttgaaagtatatcgtattgatcagtgttcggtttgttagttataaacaagatatttcgttttcgtttttggatatgtttacatgtcattttaggttcgttatgtcacaacttaaatcaaattatatgctttctaggtatgttttaattaattactctcttttttttatcatacatctttacagactcacgaaaaatgatctatgatttcatctagtgaaagataaatggattaatcagtttgtataacatcttaatttcgtttttttttttcatttcgttagtgtctattgtctaaatttcgataattcagttttcatttgattactatactcaaacaaaatacctagcgtaaattgctttgttagaccatatttagcaacaaaatctaataaagtattgatctttgagtctaggtttccacagttcaccacgcaatactcacctttctttatacactttacaaagataatgagtaatcgttaaataatccaaagaatttactcatccatgtacacatagtttatacttaatcctcttagcaagaaattatggcgtctaagaatcgatttagatgaaaaacggaccaactaagcaaactagaatatatgttcacttcacgacaactttgtatataattatacacaaaacaatatacattcattttgtatgatatacaacaaatcttttgaaaatactacactcttttctttaatgtatttttaggctaatgttgaaatattcttgtatttatattatgaaatttgaattagaccggatcaaaccggatccacgttatcttgattttaaaatgaagaactccaaataaatctagattacaaactgattatcatttgctaaaaagatcctaaaggttatcatttgagattcagcaggcgaacaacaaaaattattactatattcgtacggttccattcgatttttgttcactcatttgttgttactacactttactactcaaaatttgttaccctcgtttagtccgattcgatggttcctcatcgttcattgcggtgaattactatgaaagtacaaattaaaaataatctgaaacattgatgataacaatgtagcaatgtagtcgtaacatgccaacatcgaattctgggccaactatattttgctttggtaagcgaaccattcattcagtttttaattattatatccaattgtttgacgcgttttaaataaatcaataacataatccatgttcataccaattaaatatagatatgtatgtacgtgttgtcttgtcttatgaatcaaccctccttggagaatcttatgccataaagccaataaaaagttacctactctttcaatttacctcgttcgtttaatctgttttgatcaacactccccatattatcaaatcatttaggaaacgtataaatgaaacgaaaatatatgttttagttactcaacaatgttattaagggtcaggcaacaaaaaaatcttgaggggtaaaaacaaagttctcgatttaataattatagactataggtttaaacagagacccacaaattctgcatttctcaccttccaactgtaactttaatatttgtttcaaattgacacggcgggtaaaaataatcaggtgtatcctccctcacactaaggcgaaactaacatactaataaggaagagacacgtgtaaaaaagaccggtcaaagacgctacgtagataaaagtcacgaagcttgctcgtttttaaaattcaaagaggtttcatctccgtataagtaggcgacgaagcataccacgaagatcgaaaaaaaacaaatcagattctcaaatactgaaaataaaaagaagaagagagaaatctacggtggtgggtgattcgccggagttcaatttcgtagctagatttctcctccttttccccccgacgagctgtgcgagagagggaggggaatcatg

SEQ ID NO: 23240 - DNA, 3000 bp, Unknown; identical to SEQ ID NO: 8387
  misc_feature (1)..( 3000): 2750-1469P.txt file - cDNA_ID_2134078; gDNA_ID_2926198; Annot_ID_201642

SEQ ID NO: 23241 - DNA, 3000 bp, Unknown; identical to SEQ ID NO: 6405
  misc_feature (1)..( 3000): 2750-1469P.txt file - cDNA_ID_2134086; gDNA_ID_1621091; Annot_ID_55526

SEQ ID NO: 23242 - DNA, 3003 bp, Unknown
  misc_feature (1)..( 3003): 2750-1469P.txt file - cDNA_ID_2134086; gDNA_ID_2926198; Annot_ID_141395
atgctgccaatatgttgtttgattcctaaaatggaatcttttttaggatttattcagttcttttcatagtaatgtggtatcgattagtctgcgtctaagatgaaggttcttactttgtctctctataggaccaggatgttcatctgttgcatatggtgaagcagaagagataggaccatttcacattaaggcagatgggaagactctttaccttaatcaatattcttggaaccaaggtaatgaagtaatatgtgctgtgtatgttggcaagagagctatgattcaaaaaaagcttaaaactttcgaacaacttttttgtttgcagctgcaaatattttgttccttgatgcacctgttggagttggttattcatactcaaacacctcgtctgatttgaagagcaatggtgataaaagaactggtaatgatttagctgcttaagctcatgtcttttagatcctcatgtttgctgggtggatttatagtttcagtgttatgaaattcacagccgaagattcactgaaatttctgctgaaatgggttgagcggtttccggaatacaaaggaagggacttttatatagtaggggagagctatgcaggtaaattcaaagctcatctcattttttaatccattcattttgaccataaatactcatgtgtttcttctggtttgttttaggacattacattcctcagctgagtgaagccattgtaaaacataaccaaggttctgacaaaaacagtataaatctgaagggttacatggtgagcctgtcctcttattgatccccctatgattcattttctaaaaggttataaaactctaaaacaatgttgatgaatgtgtggatgcaggtaggaaatgggctgatggacgatttccatgacaggcttggtcttttccaatatatttggtcgttgggttttatatctgaccaaacatacagcttactgcaacttcaatgcggtttcgaatcgtttattcactcctccaaacagtgtaacaagattctggagatagcggacaaagaaataggtaacatagaccaatacagtgtcttcaccccagcttgtgttgccaatgcttcccagtcaaatatgttgctaaagaaaagacctgtaagtggccttaaaacttctcttttcaatgttacactctttagtgtcctaatttctctgtttattttacttagatgactagccgcgtgagcgaacagtatgatccttgtacggagaaacacactacagtttatttcaatcttccagaggttcaaaaagccctccatgtcccaccaggacttgcaccatcaaaatgggatacttgcaggtaaaattgccttgcaatatcttagaaacttggttttggaggaaatgagcctatttaagtattgtaacaattctgatcccgacagctttggttatgcagtgatgtcgtgagtgaacactggaatgactctccttcctcggttctaaacatttaccacgagcttatagctgctgggcttcgtatctgggttttcaggtctctttctctaaatatatccactgaaagcactttaacgatatcttttcttcaagtgttttggcgttttggtggtaaaaagaaaaggttttgttctttggtaacagtggggacgcagatgccgttgtaccagtcacatcaacccggtacagtatcgatgcactaaaccttcgtcctttgagtgcctatggtccttggtacttagatggacaggtacaaaacaaaactcaagatgagaaaatgagaatccttttcttatgttataagaaaaacttataaacagtcatgatttgaaacaggtgggagggtggagtcagcagtatgctggtctgaactttgtgacagtgagaggtgcaggccatgaagttcctttgcacagaccgaagcaagctcttgcgctcttcaaggcttttatatctggaactccattgtccacacatgagaacagcatcagccgcgacatgtctgaactcgttagtgactcataatgagttctgatttgatgtaatgtgtgatttggattctcaatcaaaaactttccacataggccgttgaaataagaagagggaaagagaataaatcagtgttttaagtgatacgttcaatgcttcttcttcttctggttgtttgtttgtttggataaacatttgctgcttggaatctaataaaagaagtttctaccatttgtcagccatacgatccttgaataacaacaacatattcttgtgtaatgagaaagtgaagtctgatctgtgatgtataggactgggtattaatctggtaacggatataatactggggtagaaaatagaatttagactagtattgggggtctaaacgaaattatacagaagcattgggcttgacttggcccatgagacctaagcccatattttaaagaattaggggtttcttcttcctttgtctgttcaaattgaagaaacctgtttttttttttttttttctggaagtgaattgtcttgagttgaacattgaacttcaattggtcggaatctgcaatttctgaggtaaaggtttcatttttaacctttatttgtttgggttaagatgagatctacgacgttttgaatgaggattcggacggttgggtgtttcaggtttgggctcagtgtcttctctcgcgcgtccctcttcaccttcttatttctacctgtgagtctcacttttcttctctccggtctttagcattctattgaatagaagaattggcatatagctattagctattttcctcagatcgtgttttaggcgactttctgttctcgcttgcttaacattgtacttcagtgtcgaattcatatcctacacatgagtctacataaacattgtgctttatgcttgcttccttagttcctcagaaatccttggaaaatccgcagatttatcttcttcgctatctggaattgttttcttcgtaggtttcttctcgttcatgtgtttttccctattgggataatg

SEQ ID NO: 23243 - DNA, 3003 bp, Unknown; identical to SEQ ID NO: 20111
  misc_feature (1)..( 3003): 2750-1469P.txt file - cDNA_ID_2134143; gDNA_ID_1620708; Annot_ID_165360

SEQ ID NO: 23244 - DNA, 3003 bp, Unknown; identical to SEQ ID NO: 20111
  misc_feature (1)..( 3003): 2750-1469P.txt file - cDNA_ID_2134143; gDNA_ID_1620674; Annot_ID_164201

SEQ ID NO: 23245 - DNA, 3003 bp, Unknown; identical to SEQ ID NO: 20111
  misc_feature (1)..( 3003): 2750-1469P.txt file - cDNA_ID_2134143; gDNA_ID_2926210; Annot_ID_202548

SEQ ID NO: 23246 - DNA, 3003 bp, Unknown; identical to SEQ ID NO: 20099
  misc_feature (1)..( 3003): 2750-1469P.txt file - cDNA_ID_2134158; gDNA_ID_1620708; Annot_ID_165366

SEQ ID NO: 23247 - DNA, 3003 bp, Unknown; identical to SEQ ID NO: 20099
  misc_feature (1)..( 3003): 2750-1469P.txt file - cDNA_ID_2134158; gDNA_ID_1620674; Annot_ID_164207

SEQ ID NO: 23248 - DNA, 3003 bp, Unknown; identical to SEQ ID NO: 20099
  misc_feature (1)..( 3003): 2750-1469P.txt file - cDNA_ID_2134158; gDNA_ID_2926210; Annot_ID_202554

SEQ ID NO: 23249 - DNA, 3000 bp, Unknown
  misc_feature (1)..( 3000): 2750-1469P.txt file - cDNA_ID_2134173; gDNA_ID_1620708; Annot_ID_165381
tctcgctctgctttctgggaacaaactgcttccttcttcacttccaccaccatctcagctcctctgtaattagacgaaactatgaataaacatgacacagccatgtaaagttaacatctttaagcactaaaacctgagattttgtcccgaagaagaagaagaagaagcagaggaatcatcagcaaaatcagattcagagcaagtttttggtttcattggttgatccatttgcaacgttaaaatctctaactaaactccaagaaagataaagagagagccactgagaagaagtagaagttggttttcgtcttctcattcttcttctacgtgaatatataaaaatccggcgataatggtggtggacgccgacgaggcaaatcaataacttgtgctccccacgcgccaccattgaaaagatatcatatgctacggttagttacaaacttacgtattcacgtgtcaaccgtcgattctactgactttagtcttctaagatctcaaccgtccaatcttagagatacccaatttcccctaaaggaatgatctttgtcgaacgaactacagtgggaagaaggagaagatgaagatagtgacttacaacgttaatggccttaggcaacgagtttcgcagtttgattctcttctcaaacttctcgattcgttcgacgccgatatcatttgcttccaggttttactcgacttttgaaatttcaatccttttcttcggtttcgccgatgaatccatgataagagtattactctggttgaatctaggagacgaaactgagaaggcaagaattgacagcagatttggcgatagctgatgggtatgaatcgtttttctcgtgcactcgcactagtgagaaaggtcgtactggttattctggtaagcatcaagctttgccttcagtggctttagagtgaaatttgagaaaatgttaaaaagttggagtttttatgttattgaaatttttgcaggtgtagcaacgttttgcagggtgaagtcagcatcttcaagctgtgaaactgctttgcctgttactgcagaagaaggcatcactggtcttgtaaacagtaattcacgaggtgggaagagtgaaacgtctacagtagctgaaggtcttgaggaatatgagaaagaagagcttcttatgattgaccaagaaggacgatgtgttataactgatcacggccactttggtatgactcaaatccttttctttttttaatgtaacttcttttgtgtaaaaatgaatctttttgttacagtttgtatgtctttatgtgttttgtcagttgttttcaatgtttatgggccgcgagctgtagctgatgatgctgataggatcgagtttaagcatcggttctatggtgttttagaggtaagtttatcggtttctgaatgtatcgatgagatgcttcggcttctaatgatacttggattaaatgttttttagttttcttgtagagaagatgggagtgtcttctgcgtcaaggaaggagggtatttgttgttggggatctcaacattgctccttttgctatggatcgatgtgaagctgggcctgattttgagaaaaacgagtatgtaactgattctcatgctctgtttaaatcgctttgctttacttaataattttttctctactagatatctcattttcatgtcattaaaaaaatgcaggttcaggaaatggtttagatctctgctagttgaacgtggaggctcattctctgatgttttcagatcaaaacatcctgaaaggtgaaattttgtgataacctcttctgtttctattattgagggagacagtctttgaaatttttgtttatcattgattgcttctttctggatttctaacaggaaagatgcattcacatgttggtcctcaagtagtggagcagaacaatttaactacggttcgaggattgatcatatcttagttgctgggtcatgcttgcatcaggacgaagataagcaggggcatagttttcttgcttgccatgtcaaggaatgtgacatattaacagagtataagcgttttaagaatgaaaatatgccaacaaggtaagtctagatgatcaagaatgatcacatgtgtgtttcaatttaaaagaataagtacttgagatttccttttttcattttacttggatctcaaatttacagtgaatcaacttctgaacacactacaggtggaaaggtggattggttacaaaatttaagggatcagaccacgtacctgtattcattagttttgatgatttaccagacatcccggaacacagcacgccgccattagcgtcaagatatcttcccatgatttacggtttccaacaaactcttggtacaagaaaattcctatatattccgctgtcttgtattggttcatattctcaagttattcctgtctctatcgtttttttataatttgcttcacttgtttttttactgtaacagtatcggtatttaagaagaggcgggccaatgaagaagccaaagccattgaggtgtcatgttcatcatcaactcaaagtaatacttcatcaatttgtggggatatttctacaggaccactgagaaattgtggttcgatgggaatttcacttgagaaatcttgttcttttgagaacaaatccacttccggcgttacagaagcagaaacggtggcagcaacaggttccattgataaccttagtgatggaatacgtgcatcatcagttagagctttgaatatctctagagatggagacaggaaaaaagcaaggaaaatccaatcatctcagctttctctcaagtcctttttcactacaaactcaaaagtaaacaatgtcgaggatagttcttcttcctatgtttcctccagtcccagctcccaagtagaaagcatcacagaaccgaatgtttcaggcaaagaagacagtgaaccgactacttcaacacaggaacaggatcaaacaggttcttcagctaaacaaaaaaacgatgcagctttaatg

SEQ ID NO: 23250 - DNA, 3003 bp, Unknown
  misc_feature (1)..( 3003): 2750-1469P.txt file - cDNA_ID_2134228; gDNA_ID_1620651; Annot_ID_163476
tgttgtagacacttggtgcagttttgaagagataagtctctactgcattgcacaaaaccgtaaatgcgtgagatagacgtctcaagctttcgtatcccggctgcatagtacaaatatgaagcttggtctatcatacgaatcatcaaagcctcccatgtaatttccaaatccgtcaagttagcttgaaaatctctggtatagttatcactcctcagaatctccataccaagggaactataaaacgagcggtttgagtaacgtacaagacaaactgttctatcaattctccagactatagcttctgtctgattagtacaattctgcaacaatctagcatttgaaggatgatacaatcagaacaagagtgtgcatcagtacctgggacacacatccctagaccatatgctctgtttggatgttccccgatccatgtcgtgtaaaagccgtcgatagctgtgacattagaggaagagaagaaagcaggactcggcggtttaagtcgtaagtactattgggtgtgaagaaaccagatctttcaaggcatacctgtgcagagacatgactaaagcttatgaccacaaaccagaagattactaaaaacttgaccattttatttactctttccttttttgttttgatgtctgaaattaaaacctcaaatcttggaagatgtaatatttatacaggcgtttcaatttcaacctcttgtgctgtacaaaatttgactaatcgtcattgaattttctaacgtagacttttgatgatgagtcaatgtctagtttaggtgacttatgtcttatacgagcctgattcacattttttaccactttgtaccatatgaattggtatttttcctccaatgtggtaacaaatcttgttgaagcttcatcaaagcaaaacagcaaatgcatgattcttgaaagggtattaaattgaaacttttaaaatgtttaagcatattatgaaaagttaaaatattagtggggtggatttgtagttttttaaaacttggagaacagatacatcttactgtcattactgaggcaacatcgagtacattcaccggaaaatggatgccggagctgaaattgatgtggttcggccggtggaggcagattcggcggcggaaattagtccggaacaagaccacgaaggaagatcggagccttcgtcgttgaaccaaggggagattttaaaaacacttgctacggtggagaaggattcgcaggcaatcgcggagagcttttcgtctctctttgtttccctccgatcaactctttctgaggttagaagacgcttctgtgaatcgatttttgtttcttcggttacattgcctagaaaatttgacatttggggaaaactaaagtctagggttcaaaatccatcaattttgtgaatttctcttttcatgtcataaattaagaaactttaggagctagcagagctcaaattatgagatttcatcaataaatggaaaaccaatttcaatgtttatgttttgagctgtggaatgatcataatcttttgctgcattgaaaccattgctaagtttgttcaatgtcctatgactgtttgttttcatgaaaactgtttcttttccttgtgtgtgtgttgtttatgagacttccttgatggtgttttaggctactggtagctcggttgatcacatggcttgctttggagaggcagcgggacggcttcaggaaaatggtaataacactacctgttttgagcaatagattcagttttccatttatatatgagcaatcaacttgagccacctttctttgttctatgaatttttttagctctagatgcagccaccaaagggaaccggtacatcaactcttgcctcaggtactttcataacggtctcgttattactctacgtaatcgcatagtccagtgagtcaatgtccaaatatgttgcttattagtttaagacagagatatctcacactttgtttcatctgaagttttaataagattcctgagcttgacctctaactttcaagatgcgtttctcctgcgtctttttgcttccggtatgatttcttttttggttcaacatgtagattaaacgaggaaattaaaggcgttgagaatttggcggctcggttgtatccttatatgtgtgtcaacctgtttgtgtctgaatgttgaacacagacacacatgtctgctcaaagctttcattatcgtattttagacagaaatttgttctagaatccttaataaatcaatctgcagaaagcacctgaggaaaaacgtggatgttcttgacacggctgtaaacaagcttctccggcctccatgagaagtcgtcagtttttcacagacttggatcacttttttattttttctttcagactttggattacgtatttctcgtacataaagattttgattataaaactgatgttaaatttcaacattacatattttctagggtttctggtttaagaaaaacaaaacactctgttttttaaactgttttcggtaaaccgactcgaaaagggattatttgtaatttattattgtttgtataaataggatgccaaaaaattctaaacttacgtttcgctccctctctaagtccctctcgctctttggttcttcttctcccgcaagattgaatctttggtttctttggattggtttcgtaagtgttcgcaccgaatcatcaaccatttcaccgctgggtatgttttctacactcgctcaaaagttttgatagtatgaactgaattatgggttttggagaattagttgtttaattgtaaaatagaaaactttatgattctgcttccattgattttagctggtgggtttgtcaaaatttcaatcttttctttgatttgatgattaatatttcattgaaatcatcgttgtttcaggttagtaggagtttgctggttattaagactttagtctgaatccaggcctggctcttggggtttgctctgttgctagtgcacagggtccaaccctgtctgaatcatg

SEQ ID NO: 23251 - DNA, 3003 bp, Unknown; identical to SEQ ID NO: 23250
  misc_feature (1)..( 3003): 2750-1469P.txt file - cDNA_ID_2134228; gDNA_ID_1620631; Annot_ID_162674

SEQ ID NO: 23252 - DNA, 3003 bp, Unknown; identical to SEQ ID NO: 23250
  misc_feature (1)..( 3003): 2750-1469P.txt file - cDNA_ID_2134228; gDNA_ID_2926182; Annot_ID_200320

SEQ ID NO: 23253 - DNA, 3000 bp, Unknown; identical to SEQ ID NO: 3195
  misc_feature (1)..( 3000): 2750-1469P.txt file - cDNA_ID_2134230; gDNA_ID_1620631; Annot_ID_162675

SEQ ID NO: 23254 - DNA, 3000 bp, Unknown; identical to SEQ ID NO: 19234
  misc_feature (1)..( 3000): 2750-1469P.txt file - cDNA_ID_2134230; gDNA_ID_2926182; Annot_ID_200321

SEQ ID NO: 23255 - DNA, 3000 bp, Unknown; identical to SEQ ID NO: 1331
  misc_feature (1)..( 3000): 2750-1469P.txt file - cDNA_ID_2134315; gDNA_ID_1620388; Annot_ID_155512

SEQ ID NO: 23256 - DNA, 3000 bp, Unknown; identical to SEQ ID NO: 1342
  misc_feature (1)..( 3000): 2750-1469P.txt file - cDNA_ID_2134327; gDNA_ID_1620388; Annot_ID_155516

SEQ ID NO: 23257 - DNA, 3003 bp, Unknown
  misc_feature (1)..( 3003): 2750-1469P.txt file - cDNA_ID_2134333; gDNA_ID_1620388; Annot_ID_155518
atttgcaaagggaagaagactttcctattcaaaattcaaagccgactttttttttacctaaacagcaataatatctttttttctctgctccagggggaaattaaaaaagtggaaccttttcatctcctggagcgatcaatttctttttcatcatatcgctgactctcgtcttcgtcgtctttgatcgtatcgaggaattgggtttagttcgattcgatcatcagctatctcaatttttctggggattgttctaaaggtttgatgatcggattgcttttgttctatttgttctttttgattctcgtatatgattgattagagaatataggattagggtttgtgttccttaaaagttatctccttttggcagttaaagacttggtttttattctttgtcaagaaattcattccatggttgacgatgaagtcaaggttttggttttcttttgtgtttcttctgtatcaattgtatatgattagattgaagatgatttcatgtgatgaagttgattacaacggataataccgcttgtgaggttgtatcataatttgctaagaataagtatatatcttcccatttgtttcttgatgcaaacaggtttctagtgacttgtttaaagtggttggtattggataatgccttctctcatctcacagcaatggcaggagaggactagtggattcttttcttcatcaggtttgataatttctatgctaacctcatttcgtttctctctgtgagtgtttatggtggaaagcttactatggagttactgaattaggaacgaagcttagggaagcagggcagactgctggtagttttgtcggggaagttgctaaggatgcgaaagtgaatgttgcagatgttgcagaaagagttgggtcgttgtttaaaagccggtgggcaattcttcagcagcctgcaactagacatgccgtgcaagaacacctcataacagctgctgccacaaccgggacttttgtcaggaagggtataactgagacaaaggaaaaggtttctgttggaaagatcaaagtggaagaggtattctagacacatagcttctcgaagttactcgacaagaatgtatgtatctcgtttcattcttctaacttctgacagctaaattctttgtatccatgttttctctttaggcggccaaaaagactgcacaaaagagcaagaccattttgacggatatcgaaaggtggcaaaaggtatttgactattagagtctgaaatctgattgtatgccgttgatttgagtttggtctctaatatctattctttgtaattctgcagggagttgccagctcagatggtaagttgatcgcaatatatggagagattacagtttaaacgtttgttaatcgaaaattcaatggattctttgatgtggggatacttaattatattaccgttcttgagataactattagtgattgcgtgtctgaaatgctgtgactttctctgtatgacaaatgtttttggcactcagtgtttggtgttgcgattgagatcactgtccagcggcaggagtcaagcaggcctattcctctgatactagttaaatgcgcagattatctcatattaacaggtaataatgtttggaccaatggagcaataacacttttattgctcacaccttctcatatcgagttatcaatgtgatattttcctcttacccaggacttaattcaccgaacttgttcaaggccgaaggagatagaaagttgattcaacaattggtttctgcttacaatcaaggtagcaagatttcttttcgactcttatggctcatggagaaattgtcatttaattgaatcacttgtttggcagatcctagggcgtcaatacctgagggtgtgaatccagttgatgtcgctgcactcttgaaatactatcttgctagccttccgacaccactaactacttttgagctttataatgaaatcaaagatgcacggtcgagcatacacagaatgagacagtcactccagaagctttccaatgtgaattataatacattggagttcataacagcgctattgcttcgtgtgagccagaaatcacttcttaacaaagtgggaataagttgttataacactaatctctgattctagatacttaagatgatccttttttcaggaatcatataagttatctgaatattgggaatcatttgtttgcattttgcagatggattcgcatagcctagctatggaaatggctccagtgatcatgtggcgagaagacaacaggcctgaatcttatcgggaatactggagacgcccgtcaaggagtcctaagaaaagtaacgactttgaaactgctactccatgggacttgctctcaggtaaacacaaaaacacttggctcctatactctttgaagcacagtttcattacgatcattcttctctttcatggttaatggttataaacagatgaaggagaaggtccagatgcatcctcatcaatccctctagatgatatcgcacgagttgattttggagcggtcgaggttgtccagtgcctaattgaacaccacaatgcgattttcactgatgcagccgagactgtatggaggtgaaaccaccacagttaaccaatattgatctggttacaagaacatatgcattttgatctggatgatgattgactagtggtttcagtaaataagatgttgtttcatatttggttcttctgtaacaatttttagactttagaactctgatgattaaaagataagtttttcttataagaaaatcaagaattcggattgtttcccaatcatataaagcaacaaccggatgtgaccgcaattcgttaaaactcttatccaatcgggttatcgaaatcgaaatgaaaccaaaccgatttaaccgaaccgtattgactcatgagcagaccaattgaccttagagtcaaacagagcaaagcagagcagagcacagacatacaaatttccatttttgtagcttcttcgagctcacagccatg

SEQ ID NO: 23258 - DNA, 3003 bp, Unknown
  misc_feature (1)..( 3003): 2750-1469P.txt file - cDNA_ID_2134376; gDNA_ID_1620388; Annot_ID_155528
gcaaaataaataaataaaataaaatgaagttgaattgtctgaccgctatgactaaagaagcgaccactcatcaacgccatcggccatagctgttaattatttgttggatccacgaaggagcttacacatcaacttgccaaaatttacacttataattgcaatcaatacaaaggtttcgtcaatataattaaccacactatgctacatatcgtcgaaaattgaaactaatttatccggtaacattttgaagttgtagtttcatatagcctgcagatactgtggtttttgtttaattgcagtcttttgattcactctttgttcgtcgcaaacttgcaatacttatcagattttattttgcctgctaattatctctagttcatatctttcatttcacatattgtgtcgattttttcaaattgatatataatagttgagttccttttttcaaatttgtgtgtgtttacgaaagaagaaaagtaaacgaacgaggccaaaaaaatgtgaaattttttaatacatacaaaaaagatgtgaacaaaaaaagcgaagtaacttggcgtgaggtagagcaacttcactaacaaaggtgtcagttgcatgcatggacaggacaaatactctcttcagtcatgtgtcgtacacgtcgatctcaccactggacccactctttaatacacaatcagattacgttgtaacaaaatttctattactgccaaatgcatttctttggcacgaaagacaaagctcctatttatgccggtatagccgtcgtatccttcatgatcctcaccggtttaacctttgccggtacggccgtggctctaaccgttatgataccggttttggtggttcttagtccgattctcgtaccggcggtaatcacatcgagtttcttggcaacggggttcctagcttctggtagcctcggagcattggggatcgccctcctcatatggctctacaagtaattacttaagttaaagtaactaattaactcttctaatgctttgattgtaccaattgaaatttgttcatacatgcattgaccacatttttattttgtgtgttagttaacattatgtatgtgtgaatgacacttaggaaagaagagtattccagagctactttgcatgcacgaggaggtaggcctgatgggcctaacaagctggcagaaagtggcaagcaatcaggaggagataatccgttgaaggaagacaagccgccagaaagagataagctgccgagaaaagacaagccatccaaggaagacaatctgctgaaaggagataagccggtcgaggaggataaattgccggctgaggaagaaaaaccgccacaaaaagataaaccggcggagggacacaaaccgccacaaaaagataaaccggcggaaggagataaaccggtggaggaagacaaaccgccacaaaaagataaaccggcggaaggagataagcatgtggaagaagatatgcctttaggaggagttgagcatttgtcaatccctgagataccaaaggtactatattagtgatgttcaaattttttcgttaatgattttttcacatttagcaattgccgggaaaagaatttggattagcaagattaaacactgttctgctttaatattcccttcataaattaatggtaggttatggtggtggagcaaaacccaattgtccccaagtgttgcggcccaagtacttgtactaaaaggtgtcacccatttcgattcgccatggatgctaatgctactaaagcacgatctatttttatgaaagaataccaaaaagtcccccgtgtaggagcttttgcatataaatattttacatctcgtgacaaaaaatacgtaaaccattttcatatatgacatttgggacttgggtggttattattttaaagggtacgcttttaccttataaagagttcaaacgaaatttatcattttgaaggtattaaatactataagctaatgtgtttttgtttataaatatgctgctattaatgtactttagaaagcgtaaatttcagttatgaaaaaacacattaaacaggtggaatctctcaatttgtcagattaccatgtttttttattttattttaatatataaaaattgcaatcggaatcttagtcgagattaaataaaaatctaaaactcagaacctactagattttaatttttgatcaaactaatcatattttttaccaccgtagattttgtatgtgtcacacactgactgcaataaacaaataaacaaaaaaggtttccctaaataaggaaacgaggactttgttcctatattgatctaaatttccaagtatccaattagatctcaacgcgtttagattggatcgaattatatcacaaagttatttaaaaaaattatactctgaatttatcgcaaatatatataggagtatatatatgtaaaaactttggaagaaatagaaatatgggtaacttaggaaatatgagatattaactaatatggatgaagataaaagtaagtaaattccagttatattaagattaggattgatattgataaaaatatgggtaacttaggaaagaaaataaaaaaataaaatcgaatatacgatttaatatctctcctaaatatccgggatcaatatccagtacatgtttacctggaaaacaatctaacggctgattttccacgaatcctatcttaagaaaatgttaaccgtcgattatgatcctacgctgattctgctggatttttccttataatgacttgggtaaaaacttccaaataaaacaagataattaaggaaacgctttatctcttaaggaaaataaaaaaatgtaaaaacaccaaggacattcacaaataacagctcacgcatatccgcatatatatatatatatatatatatatatatatcattacacaagagagtttaaggtataaatacaattagcgagatcttgtgattctaattcttgtgataccgaaaacattggtggcgagagagagatg

SEQ ID NO: 23259 - DNA, 3000 bp, Unknown; identical to SEQ ID NO: 1334
  misc_feature (1)..( 3000): 2750-1469P.txt file - cDNA_ID_2134378; gDNA_ID_1620388; Annot_ID_155529

SEQ ID NO: 23260 - DNA, 3000 bp, Unknown; identical to SEQ ID NO: 1346
  misc_feature (1)..( 3000): 2750-1469P.txt file - cDNA_ID_2134423; gDNA_ID_1620389; Annot_ID_155550

SEQ ID NO: 23261 - DNA, 3003 bp, Unknown
  misc_feature (1)..( 3003): 2750-1469P.txt file - cDNA_ID_2134512; gDNA_ID_1620393; Annot_ID_155674
aacttatgaactttaacccatttgtttaataagtagcaaatagtccaacaattttatttagagtacattattataaagaaaatcacattacataacattaattaaaaatatatatttacgatacaattgtagacatataattctcccacaaatgatcaattaatgcattccgaagtgagaaatgagtttctttatccttaatttttctgaatcgagcgagataaaagttgtttttgcattttagtttaattggattaaaataaaagaaataatttgtttagaacaaaataaatactttgttattatttgaaggatcattttgtaaataagaaagttcaccttcaaaaaatgaagatgttaatagtataccttcaaatatgaagatacactgttcaattcttcattttgaagataaaaatgaagtaccattagagaagaattcttcatttttcacttcaaaatgaaggaaaaggtgaaaaatgaagcatcattggagatggtcttagctaggtcggctgattaattggctatcggcccgtccttcttcttgctacctaatatgtgacatattgtggctttttgttttactcctttaagtcatctagaatttgtttatatatcaaaagatatgcgaacagttatagatggattagtttgcttatactaaatatttttgtatagaacatcaaattgcatatgctttttattataaatataagtcttcctacacaatttcgctctctcaccaacaaaatggatgttgaaccggctggcctacttccttgcgagaagaaattcaatgcattttttacttacgttgtgttttgaaaagacatgatgattatgtaaataatgtttttgtttattacatatgtaaattaacatattttataatttgttttttaaaaatgtataaatggaaggccaattaaagtccttgagtatcaatacatgaaaaaattgctacatacatattttctgacaattttaacttttcctagaaatacataccaaatcacaaacccgagctcatttctattttatttgttcttcattttgaatgtacactgatgtttgtccccaaaaaaaatgtacactgataaaataatttaatagaatgattcaggatgtcaacgcgtcatcaaaagttcaagactactggaccaaatggtccaacaccaaccttatcgtaatttatctataggtgtgttttcaaatggataaaagattaaaagacatacatgatccagatagatgaaagcaaatgataagacttaatataaataataaagaatcgtactgattttttgtttgtaatgtgaaatagaatggctcgcaactcaaagtgtcagactctatctatgcaaaaaatgtcaaagacacgcagcttgtttatataccattcatattgccaaacttttggaccaaaatatttttattaagatcatataaacacaaagagccaacccactgtgatcggtgtgataaaatcccaactacttggagcaacatgtagtttacattattaagctgaaactctaaagatcatggaaatatatcaatcatatcactgtagggtaagtccaaaaatagaggtacgtacgaactacgaagacaacataacgttttagtttctaccaaactttattgactaagtacttttttttttaattgactaagtacttcatatagaagtgcaccgattattgcaaacccttattaatggacggcaaagaagagaaaatgacgacagcttccagcttcctaactcctaattgcatatatggactatggtaggtgtccttctcgtcagatcacatgtttgggaagattaatcattggataaacttaaaagaattgaattatgattagaagttatctgaacatttacttttgaaaataatatattacctaacaaactagtattattttggctaacgtcctatagattgtgtttcgaatagttttggaccttttggtaatagaaaaccaagtaaatgaagatagtacagtttcagtgttttgagaaaaaaagctgaactaaaactaaaatgtttaaggacacaatatttagtttcaattagataattcaacagtttgaacaattttttttttttttttttgaagtcatttatttatacaatgttttaaaacgcattaagcatttaggcagccgacaaacgcctattgtctaactgtaaataggcgcttccacttaggttcatattgcatatttactatatgtgtatagtgacaaaaaccaatatttctcttattttggatgaaggtatagtagttgttaaatgttcaatataattaagcattaatgacaaataaaataaaattaatttagttgataaaaagataatcttataaaaagatcgatgaatagatataatggtttactgaattctatagctcttaccttgcacgactatgtcccaaggagaggaagtaccttaactataattctgaacataattttgtctatcttggtgagtattatatgacctaaaccctttaataagaaaaagtataatactggcgtaacgtaataaattaacacaatcataagttgttgacaagcaaaaaaacatacataatttgtttaatgagatatattagttatagttcttatgtcaaagtacaattatgcctaccaaaattaattaatgatttcaacaggaagtctgagatgatgggccgacgtgtagttacgtttcttgaattgtgagagatggtatttattatactgaagaaaacattatttactaaataaattttcatttcacatcttctgtaatcaatgcgggtagatgaagaagttgttaatacgatggccaaccatatggatctcttttttggcgtttctatatatagtaacctcgactccaaaggcattacgtgactcaataaaatcaagtcttttgtttccttttatccaaaaaaaaaaaaaagtcttgtgtttctcttaggttggttgagaatcatttcatttcaatg

SEQ ID NO: 23262 - DNA, 3000 bp, Unknown; identical to SEQ ID NO: 1369
  misc_feature (1)..( 3000): 2750-1469P.txt file - cDNA_ID_2134555; gDNA_ID_1620393; Annot_ID_155686

SEQ ID NO: 23263 - DNA, 3000 bp, Unknown; identical to SEQ ID NO: 1362
  misc_feature (1)..( 3000): 2750-1469P.txt file - cDNA_ID_2134579; gDNA_ID_1620392; Annot_ID_155635

SEQ ID NO: 23264 - DNA, 3000 bp, Unknown; identical to SEQ ID NO: 1353
  misc_feature (1)..( 3000): 2750-1469P.txt file - cDNA_ID_2134699; gDNA_ID_1620390; Annot_ID_155576

SEQ ID NO: 23265 - DNA, 3000 bp, Unknown; identical to SEQ ID NO: 1380
  misc_feature (1)..( 3000): 2750-1469P.txt file - cDNA_ID_2134760; gDNA_ID_1620394; Annot_ID_155698

SEQ ID NO: 23266 - DNA, 3003 bp, Unknown
  misc_feature (1)..( 3003): 2750-1469P.txt file - cDNA_ID_2134766; gDNA_ID_1620394; Annot_ID_155700
ttggagtataagagatttcattcgaccatactcatttgtccttatcttaaaatactttatttcgtttttgtcttcatccaagaatcaccatatcttattatccattttttttgggttcagctagcaagtagcatcccttcgatagactgaggagaaaaaataaacaattatctggctcttaccgaatctaagattttggccattttctcccctttttcttttgtgcaaaccattacaatatctatggatagatcttcatatttcacatgtatgatatatgaatgattccactgcaataagttatcaaactaagagacggcaatgtttttttttcttaattcatttcactgcaatgacgttattttattgttgttggtgagatatcccggctgcgagtttgaagactcttgtatagatgatttgaagacactaaaatatttcttctcatttcattaatttgataatattttaatagtgtgttaaaaataaaatatatatacagtatactccttctgttttataaagattgtcgctgtattttcaatgcacaattttgaataaaaatccatttttaatcctatttctttagtgtattaataagagagataattttgtttagtatattattaattaaggggtataatctaactttttaatagttttcttaatagtttttgtgaaaaatatagaatgatatttttttgtgaatcaaagaaaatataaatatatatttaagtattgtgaacctaaacccgactaattaatctcaagattcgggacgagacgattgataatattataagactgcaaaaactatccctcgaaagaagctattgataatatagtagaacatgaaatatatcatccctaacaaaaaaaaaagcttgaaactaacttcttgcgctaaccactatctcacaacacctttggtaatccttacagttttgttactgaaatgaaattatgtcctttaatctgaatttgatgttttaacacgatactaataacaattaacaaaactgagtggtggggacattctataaacttgtttgcaatcttagtttgaccaatataattgacatattttgtgcttgtatatatgtttgtattgtacaaggacttgccaaagcctatatgccaaggtcccaaaaccaaagcctaagacccatgctcgagcatgtcattccttgttttacttggagttggaacttaattcatacatattgtatgtatgtgtagtatgatctaatttgaaaaatatttttaataattcacgttacagaataatttaaatttttacaaagtaattgtataaagaaatttaaatagaaagtctgtttcattacaatattattttattgtagtatttaaaatgaaaaatacgataacatttggtagtatttaaaaaactggtcatcaagtttttaacatttcagaatagcgactcagctattataggaatgttgaatccataaaagtggtgccagtctgagcataacatagacggatgaagaaaatcggaacgtgataatatttttcttatatcttagaaaataagaaaagatatgtggtatgcgtttgtcaatataattagtaagagaaacctttatatcttaaaagcatactttgaagtttcctctatttcagaaactaatatttttctaagtaaataatagaattcgttttcctttaagacttgggcatgttacgttttttgaagatgttaacaagatatttttggatgcctcttatgataagaacatccactttgtatggctgattgagttttgcaactaatagtattctctttgaaaaaaaatatttctcattattatttttcaaaataatatatcatttttttttttttggtaagtatcaaatttcctatgatatgtattcattttgaatacatcaacttcttattattgtaagccaaaaatgtaaaatttgatcacctatatttaatcgacatattagtgatatttaataaattacttgcacccatatttttttttttgacatctttgaatcgataatatccgatctataaccaatctctataatacgggataatacggcttaatggaattgaactctgataggaaaggtgtaatcaaaatggagttaaccacttaactaaaactacatccctgaccatatttttatttatttaaaagtgttctctccattaaacaaaggagaaactcttatacagtggaccaacaatcgataagaaaaacgactgaaacaattaatacaacataaaaatcgtgagctaaatattgtttttgcaggaatatcatattacgaaactagtcgtaagaatatagcggtatcaacaacatattatatgtaaatttacatttagggataacataacgattatcgacgatattaacacaaaccaaaagactccaaattcaggtcatttgtatacattttctacaacaatattttcttagtttgatcaaaaaaatattcaacacttgtgtaaagtttagtaacaatgtgaaaacgaggcttaaattggattggataagagtaaacgataatgtttgggttgggccaagttgttaatagtggaagatatagccatatagggatggcccaatttagtttatgaacttatgacttcccaaaagttgcaaatctttctttagattggtccaatttattgatattatagaattacctcacaaaaagaatataatgttgactatacaataggataatattttattttatacatacattttgaacattatttctatatacacaattataatttgcactgaacaagaagaaacagaaaactagtactaactgacataattaaataaaagtgagccggatcgtaattaaactttaaaccgggaaatttgataaccgggaagatatccacgtcagcagcacgataacaccgccatcgctttccttaatttaccttttctctctcgacaaagatattgactaaaagtcaaacagtcgttaccggaatcaatg

SEQ ID NO: 23267 - DNA, 3000 bp, Unknown; identical to SEQ ID NO: 1373
  misc_feature (1)..( 3000): 2750-1469P.txt file - cDNA_ID_2134792; gDNA_ID_1620394; Annot_ID_155707

SEQ ID NO: 23268 - DNA, 3003 bp, Unknown
  misc_feature (1)..( 3003): 2750-1469P.txt file - cDNA_ID_2134823; gDNA_ID_1620390; Annot_ID_155578
aaaacaagaaaaagtcagatagatttcatattagtgtggggctaattcacactcaaaaattagtttaaggaaggaggattgccacaatactgtacatatatattgtccaaagaatattatttcttctaatgtgggataattctaatatctccatcaaaataaaaccggtcctgaaattgtaaagactatcggtttaattttttttagcacaattcaatattttagggttttgtgcagagatgtcctacacggagaccgagattagtaaaaagaatttacagtcaatactcaatagttaatggtattggtttgtactagattcgatattttgtgaatgaaaatcgaatataaaaaaactttaacttgccaaattttgcaactttactgtttactcaaaaaaagtgcacattaatactacgaaatcttaaataatacgtaatatgactcttaaacgtatatagttaacgttttcactgtcacatatattaaatttttacgaatttgatggtaacgaaaaacaattatatttcgtattatttttgattttgatgatcaatatacattttggaagtaaagagtaaagttagaaaaagtgacaagttaaatgtttattttttacaaaacccaatattttaattaagaaaacaagatataaacgatggtgggaggtttagtttaaacaccttacctaacgatacctttactttggaaaggtttctaagcgggacataccactagactaatgagagtatgagactatgtactgtacacaaatattgagctgcaaaaatacagtaatctattttgaaactgcaataccaaatttcctttacttaggtttagtagtgcatggctcgactttgaagaaaatacttacaaagggtaaaatatagcagtacaaaacaattgaaatacttactcgtccatgtatgttgcttgatatttttattatctttccattgtcgttttgttattattattgacattgcaaaaaaacagaaaacaaactcattctaatcgttgtccaatcagtatgtcattgaaacaaaccaaaaatgaattatttttttatttaccaatctttttaagttaatcgtcacgaaagaaggagatcaattattaaaggaaaaaatatatatatatatatatagaaggaagatcgatatcacgtggttacgttaggggtggacatgcgggtatgttggtcgggttcggataaaactcgatcgggtatggaatttttggatataaaagtttatgatttagggtaaatctaaattagcggtttatttttagtttagtccaatcatatttgggtatagatttcgaggtctttttttcagaaccgatacccaaattattgggtaaatactcgggttttttggtaaataccgggatttttaaataaaaactttggatttcgagtaaaatttggatattcgaataagatttttgagtattttcaagtctgagtcgaattcggttacaattttttgagtagaaaagtttaaagaaaaattctttcaaatgccttttccatgatgccccttttcaactctacccttttgttttatccattttcatttctaccctctttaaatttttaatgaccattttacctctatttgaaaataattttaggttaataaaatgaaatattaatattttctcgccaaaaaatttcccgccaaaaatttttcgaaaaaaaatttcccgccaaaatttttcgaaaaaatatttttcccatcaaaagtttttttggcaggaaatagatttacaagggattttaaaagggttttaaaagatttacaagggattttaaaagtgttttaaaatatttacaagagattttaaaagggttttaaaatatttacaagggattttaaaagatttacaagagattttaaaagggctttaaaagatttacaaatgattttaaaatatttacagggattttaatgaggtttaaaagatttacaaaggttttttaaagatttttaaaaggtttaaatttgttttaaaacggttttaaaatatttacaagggattttaaagggctttaaaagatttacaaaagtttttaaaatagttcaaagggtttaaaagtgttttaaaagatttgcaaggaggggtttaaaagatttctaagagatttttaaagagtttaaaagagttttaaaagatatacaagagtttttacaagatttttaaagaatttacaagaaaacccttgaaaaactcttgtaaatcttttaaaactcttttaaaatcccttgtaaatattttaaaacccttttaaaatttcttataaatcttttaaaacccttttaaaatctcttgtaaatcttttaaaacccttttaaaatctcttgtaactcttttaaaacccttttaaaatccctcgtaaatctatttccagcaaaaaaaaaatttacaatgatttttaaaagcatttttttggctcagaaaaaaattgttacgaaaaaaaaaattggcgggaaacttttttttttggccggaaaatagtttggcggaaaatttttttttggcggaaaaaataaaatttggcgggaaaatttcagttttcaattacatgttcctactagatgagggtgatttggtcattctgttcaggggaaagagtatttttaaaaatggacaaaataaaaaggtattgttgcaaaagggtagtaaaaaaggggtaattttgcaaatctctaaattcaaaatccaatatggtaaaatctaaaattttggattcgatatcaaatccaatttttcggatactcggttgcagttctttttcccagccctaacgtagcacgtgattcctctgctttggtattttacgtcacaaaggtaaaaacgcaaggaataaccaaaaatgatattttctgtttcttttttgtttaccaatcttttctaacggtaactaaaagaagcagattgattataaataatcaacctcatctacacaaaaaaatattgaatcggaaaaaaatg

SEQ ID NO: 23269 - DNA, 3003 bp, Unknown
  misc_feature (1)..( 3003): 2750-1469P.txt file - cDNA_ID_2134849; gDNA_ID_1620395; Annot_ID_155729
attctacaacacctgggatggtcgatagagaagtggaatgagctatacaaggaccttcctagcaggcagatcaaggtcgaagttccagatagaacagcggttgtgaccacaagcgaagaaaccgaggctctgagacctatggggattcaagatgctattaattctgaaatcaagaagtactcgcgtggcagagcttttataaggccatcgggtacagaagatgtggtgagagtatatgcagaggcttccactcaagaagatgctgattctttggctaattctgtggctcagctcgtcaaaagcttccttggttcaagctaaagaaccatctgaatttctgcaagagtatgttaatgggagatttttttaattttcttgttcacctcttagcttttacatcttttgtgtaacccgaatgacaagttttcttctcagcttcttttgatttacttcgtttctcttctagctcttctgcttctttctcctcaacgtaaacctgtaaatgctttactttcctgaaaagaatcagcaacgccattactcttttttattaatgaagctctaagaacagaatgtttcttctcctgaaattgtgtaagggaaagatagttgttaaggaatcagtagcagctactttatagtaagatcataacaatggtgtacttgaagaaacgttatgccgtaatctttggcttaagagggaacatagctcatgccttttgttttcctgtcctatctctaatcaacttggtctccgacagtgacttcacaacaaacctaccacagaatcttcttttacttacaactttcatgtgagatcctatttgtgggtatgataaaagaacaacttaaccagtgacagggacttgttgttatgttgttgagaaacttcaggtccccactttaagttgttattaaatccatttagaccaaagagattagagaataggatcatcactgaacatggagaagagagaaacttgctggcttttattattgacaatagcatatgtcatatctaaaaaacattgagaagacagtcccttgtgaattgcatatgaagtttgtagtttaatgtcccacacactccaataattatgtcatcaaaacaaatttcattaatgcatctttccaaatggtaaagacaaagccatgttctctgttttagtatgtccaacgcgtcaaaaccacaagtttcaatgattttttcagagaaatttcaactccttagttgatcttgctatatatatactcacataactcactctttcaatcatcaaccaacaacaagaaatccaataacttgaatcttttcatacatcttcagaagcttcaaaaagaattcaaacattttaaacaaaaaaacaatagatatggctttcgtgagaagtctattgggagcaaagaagattctaagccgctccaccggagcaggatctgcggcaccaaaagggtttcttgcggtgtacgtaggagagagccagaagaagagatatttggtgcctgtctcatatttaaaccagccttcatttcaagctcttctcagtaaatccgaagaagagtttggatttgatcatccgatgggaggcttaacgatcccttgtcccgaagataccttcatcaatgtgacttctcggctccaatgatgatgatccaacattttttccttcagttagaaatagacttattcattgtaaatagatgagccctttttcctctttcttcttgaaagagttgttctaaaagtgtagaaagtgaaatacaaaattgatgttatatacaaacttcatgtcaatacttttttgattgatcattgaaaaagaaagacaacaccaaattcaccaatcaaaaactactctaattatagtttcatgttgattaaatataaataagtggaacatctaacatccggatccgtggcgcaatggtagcgcgtctgactccagatcagaaggttgcgtgttcgattcacgtcgggttcaatcccccgaactttactccggaaataccttttttttgtaacttcttatttccatttttgctctcttcgcttatgcttcgtttcatccggtttaaccaggaggctactctggtttggtaatctaattactctaaaccgaaagtccttagtactggttcgaaatctgaaatctaaaccagttgactcacaaccagtgaaatcaacgatcaagggccaagcctatcttcaattcatactcgccagtttttgtgcctaaaggttttttcaaaggataaacaaaggcctaaataattttgctaccacttgaacattaattcgttctcaattatgtaatatttaatcatttatcttgttaattattcttaagtgattttacttaatactagcctagaaacaatttcaaactttcaaattcaatctcacgggaagcatagggtcacatctatatctagttaaagactaacatttaaaacaaaatttgaatataatagtaaccaaaaataggaaacgaaaattagcatagagattccaacttttgttacatttttattcctagatataaacatcatcacattttctttataaattacattgacacgtaacgctttaactatggtttagatgtggaatacatgcaggttacatcttccgcactatctcatacaatcaatgtatctgttctgagacttttagaaatgtgaatctgttttgtgtaagattaaaaagtaaataaaattatataatttaaagtaaaaattggctgtaaaccagtaacaatagttaattcttgagacttaaagagtaaatgaagttgttagtcgctgtcattgtagtaaatcaagttactaaaactggcaaactactttgctttttgcgtgtctttgaagtcacaaaacagagctcctctatttagtattattgggaagaaaacaaatagaaagagaattagtgagtcataaatcagagagcgagagaaaagtggtgagacatagagtgggaggttaacgaaagagagaacgatg

SEQ ID NO: 23270 - DNA, 3000 bp, Unknown; identical to SEQ ID NO: 1390
  misc_feature (1)..( 3000): 2750-1469P.txt file - cDNA_ID_2134853; gDNA_ID_1620395; Annot_ID_155730

SEQ ID NO: 23271 - DNA, 3003 bp, Unknown
  misc_feature (1)..( 3003): 2750-1469P.txt file - cDNA_ID_2134857; gDNA_ID_1620395; Annot_ID_155731
caaaagcaatcactgtagtttcatgtagttgtcatcaggtaccaagcattagttcttagattcgtgatgtgctttatcgatgttaaagagcgatgatctctttgcgatgttactgtgcaggagggcacaagcttagcaaatcaactggaaacgcaggctcgagagttggatgtggtaatgcttacaaggctaagatttctaaaaaacagaacaccgttttctcttattttctagtttccattgtgtgaagtaattcactcgaggctttgatgttgaaccaggtatcatcggacttcaatcatctgcggatgctaaactatagcttttgagatcaacggacagagccacactcagtttttcatcagtagatgtacattagagatcatcgtacgaagtgacattgtatattgacatcctgttactttttaagacatgagttataatgtaaaccagaacgtaatttccagttttcattgaaaatacatccttatagttttgatcaagagtcaaaccattgaagttaacaagatgtactgtaaaagaaaaacgaaatgaacacatactgacacagaagtagcccggattttgttttttctgatattgtaagcctccggtacagtatggtattggatacagggttcaatccagatatcttcccaggttgcagatgagcttcccaaatcttctccacattacatgatacaatcatcgactttgggcctatcctctcagccatgtgtttctgtaggaagagttgtcgcggagagaagcatcgtgtggcttgtattccatgacatatgcatgaggcaacttcaaatgccgcttgattgagtctctcaaacccatcactgcctgtttaaggaaaacattgcactgtgtaagtaccaatcaaaaggagagggagagagacagttcttcttgtgaacagttttctcacctgatggtcagaagcattgcgattccatacactaatgatgtcctcgttgaaacggacactcagtactgccccacatatgttatcagcatcatcaagctggtcgcctaccaacgcaagaagctgaagaaaacaaataaacggaagagtatttaacatgattctcagaccctaagtatgtaaaatggattataaataacattgacaaaagggtttcttttgaataaagtagaaaggtgtcaatactccaatagtagtgcccacaagaaaataaaactcaccagatcctcccagaagcgagcagatacaacttttgagaaacgtatgatccactttcctccattgcagttggcaccatcctaaaggtgatgaatttagctagtttagttggtttattgaagaagatacaactcttgagaaacttttgttgtataaaaggttccctctatatcgatgatccagataaaaacacaatacgaaaaatcaacacaggggaatacgtacctcccacaatggacgaatcccatccttaaagaaatgaagatctgttggactaggcaagagagaagaacgagcaaggtgacagtagcaggcccaaaatccttcaacctagtttataaaagccataactcagaaacgaacaagatagtatcgcaaacagcttcaacaatgaacttccagtagtatatttagacttaccgtgctgaattctaccatcttcttgatgttatcttcataagactggttccgaacccctggtgtgcgacgagtgtaccatatcgaaaacttgtactgcatcattaccaaaaatcctagagtcactgagccagtacttactcttaacaatgaaatcagttcctctaaatcaatctgccttgttctagctacaatcaataccaccaatacgaaaatcctataacatttgagctcacatacatctaaacaaattcgcaaaacctaatttgaaaacaaaaactccaacaaacaaagatttagaatccgaatcttccactactctagctataaaccgtcatatacaaagttcagaaatctttgacgaacgggaatcaaattttcagctaagatcagattcaaattgcaaatgaatcgatactaaggataaaggacaaacccgtaaaggatggtctccatccttgagctcacgagagcggcgttcctcggaaacagagtcggtaacatagtgtgacttgatgctgtccatgtttcccgagtccctgatctcatcgtctctcctatccaaaacctccatttttttctcgattagagcttcacgcgttcgtgctttcaaaagccctaaaattccaatcaggaagaagaaagaggaggagagaagaaaagaactgtattacttttccactcggtcaaatacataaaggtcaaattctggagaaaaaaaatagcatatgggccttattgggtctactaaatgggccttagtgattagttagttttaatatctcaatgattttcattcttttttacagtaaacaaaataagaaacagaaaattcaaaagtggacaaaatgtattaagtatagttgttggttattacataaactaatccaaccggaacaaaagagatatgtcttaaacacatacacatgcacctatcacggcaagattagtggtgtagtggagaaaattaaaaaaaaaaggaatgtgtgacgaatgcgatttgtcaaaaaagaaaattaaaaaaaagaatcgatttttggcgttctccatctgtaatgtaatgtttctgcaaaaacaagtgacaataaaaactttttcatggatctgagattttctccaaatctatatttgtgattgtttcgtgtagtttttctcttaaagttgtgttctttaagctctctcgtgctcaatcttacgtttccctttggtttgatttcgtgtttttgttattcgatttcacctttaacttttatctaatctcttgtttttgattttgtaaattgtaaaaagtttctggtgattctcttagcgaatttgggaaactttatctgtatttttctgtttcgccgtagatttaggatccttaattaatg

SEQ ID NO: 23272 - DNA, 3003 bp, Unknown
  misc_feature (1)..( 3003): 2750-1469P.txt file - cDNA_ID_2134870; gDNA_ID_1620395; Annot_ID_155736
ggttctaaacagctcgtgatttgtaaccctactttgaaacgattcttccctttacctgagcctcaaggcaccggtgacgaatacaacgtaggagggtttctgggatatgaaccgatagagggtaaatacaaagcattgtgcattgtcagaggatggaacactcaagttcttacattggaaattcaagaatcatggagagtaaccaaacctggctatacacattggcctactaaagatactggacgatgcattaatggagttatctactataaagctattatatttgatagggttccaaggcatgttatatttggctttgatctcagatatgaagagtttacacatattgagtttccgatgcgtaattatgaccgctttcttatggtatcttatgagggaaggttggctttgataagttccactagctctgttgttgaaatctggagtttggaggatgcagggaatcgaaaatggtcgtatgaacagtttcatttatgtcttcctcccaacacaagtctgaagggtgttattgatgctggtgagcttatttacacaggatttagtttgaatagatcgttctgtgttgtgtattttgatcctaagaaaaacaatatcagagaaaccaagtttcaaggaattgcggataaccagatttggcaacctgatagacttggatttgatcttgtgaatgacttttatgtattaccaaatcacattgagagtttcatctcgttttaagagatttcatctttttgcatggaatgacactatatatttctgaagtgttcttcagatctttttttgtatccactgattgattgatcccactggagatcccaatatgttttaatgatgatactacatattctagagacttaatagaaactttataaaactatacatggagagactgtaatatgtgtttttgagattgaacctacgattcctctgttctgtttctagcaatttccatgtgatccttttctcaaaaatagaaaagagacttttgtcctaaagttaaacaagtacagaagaagtacttgaaatcttcactcagacgattagagcttagagcatacgaagattagccttagttacttgcagtatgaattcaacattttgagacatggatctctgtaaaattgaccaatatagtggttttattatggtaccttatgagaaaagattagcctggatagccacaaattcattgatattggaggacttggctaaatttgggcgctattagtctattactaatgctagtgaatttattgtgtcatgaactttgatattattagcagttttaagagccctcaggacaataacatttggtaatgaatgtaataacatcccttacatattagtgttataacactatctagtttactctcaatttggatgtgagagaccaataatcataattcataacaactgattttgagaagggttctgttttgttttccaaagaatgacacatagctaattatatatgcaagtttatgattctctgatagattcttcttgttatgattatccgttcacattgaagggctttgtcataatttgatttttctttagtttgaatatatcgtaagtcctaaacatgcatgtcttattaaacaatgtgggctctgctctgaagactattgcctacatttatgctatctactcaatcccttaggagttatggcatttagtttccagctgatgatatgtagaacattcataagcgagctcaagattctacaatacgtgtataaaagatgaagcctaagctactactaggctgcatcggtcaaaacacacaagccttgtctttttgtttctttttcttacaaaaactttgtctcctacagtgacttcaccaccaacaccatcactgacaaacactaataatgaaagaccaaattcgtatcacagaaagataagactgaaaaatcaaaatgtttcaatagcattagcctccagaagaaataacaacagtcgttgtacttgtatcctagctaaaagcaaaatgtaattgatttattgcgaattaaactctatcttgttacaaactttaacaaaagttttaatattttgaattccgtacatgtaaatggaagcatattaattgggaaaacaaaagaaacatagtggataagattgtttacaagtcaacacacaccaatttagaaaaatcaaagaaatcccgatttgatgcgaacatgacgacgcaaccatatctctccaaatcaaaagattatgtgtgtcacattccccactaatttcacttatatctagcataagatgccatataatatacatgtagtatgtaacgttttgagaatgttcttattcggcgagattatttttctgacaatacatagcacaatgtttagttttcccaaactatataattggaaaattttccaatgacatctcaaatatgtcgacatatccaaccgtaattccgtaaataggaacaaaaacatccaaagaatttaagtctagttgatctcaaattttaggcaagttgcaaataaacacaagtatattttagttgaattatacaactaaactcaaaagtacatgttgttccagaaattaaacagatagacagttagttggtaaagatttaattagttgattcaaaaaagaaaaaaatttctcgagttatcttaaagtatgtttgtcttaacttatcaaaattatatctaaaacccacttaaaggcttaaaccatgattattgtgtcttgtctttttttgtaattaaattacttaatcagctccaccgtaatcagctggacctccactgaatcttacccaaacatatcgatcacgtgcctgtgtataaataaatacatacacacttaacaagttacaatcagactgacaccaatcttcctctttaacagtcgttttattacagcgttctgatcaaaactccagtgaaagttcaaagtacacagagagaaacaaaaaaagaagaagaagaagttgaagaagaagaagccatg

SEQ ID NO: 23273 - DNA, 3000 bp, Unknown; identical to SEQ ID NO: 1389
  misc_feature (1)..( 3000): 2750-1469P.txt file - cDNA_ID_2134876; gDNA_ID_1620395; Annot_ID_155738

SEQ ID NO: 23274 - DNA, 3000 bp, Unknown; identical to SEQ ID NO: 1382
  misc_feature (1)..( 3000): 2750-1469P.txt file - cDNA_ID_2134893; gDNA_ID_1620395; Annot_ID_155743

SEQ ID NO: 23275 - DNA, 3000 bp, Unknown; identical to SEQ ID NO: 1384
  misc_feature (1)..( 3000): 2750-1469P.txt file - cDNA_ID_2134913; gDNA_ID_2910745; Annot_ID_193739

SEQ ID NO: 23276 - DNA, 3000 bp, Unknown; identical to SEQ ID NO: 1384
  misc_feature (1)..( 3000): 2750-1469P.txt file - cDNA_ID_2134913; gDNA_ID_1620395; Annot_ID_155750

SEQ ID NO: 23277 - DNA, 3000 bp, Unknown; identical to SEQ ID NO: 1376
  misc_feature (1)..( 3000): 2750-1469P.txt file - cDNA_ID_2134940; gDNA_ID_1620394; Annot_ID_155712

SEQ ID NO: 23278 - DNA, 3003 bp, Unknown
  misc_feature (1)..( 3003): 2750-1469P.txt file - cDNA_ID_2134973; gDNA_ID_1620396; Annot_ID_155772
aatccggttggctcctcatgcgcagtatctcgccctttgcagagcccaagtcctcctcgagcttcttcactttcttctctagcacttccctttcttttcctagactcatcacgaggatatgtgcatcttccacattttccttagcttcttttgatgcattctttgcctctcctagtgatcgttgaagtacttctttctcgtcctccaagtttgaagcatgggtattcaccttctcaagctctcgtgacagtattgatgtgttcttgttcatctcatctaaagactttacagcttcttcgagatctgtttcaagggattttctcgcctccctttccatcaagatctgcttttccattcctttcacctctttgttcaacgacaaaacagtctttttctcctcttccaattccttgttactggtttcaactttcttgtaaatctccacaagttccttctggaggctctggttcttgacagaagactctttgagttcatgagttactccctcaagctcgtctttaactctcctccgaagatctttctccagtgcaagttcgctagcagaaatctcattcttttgtttttcagcatcgaggttcctttcatatctttccttagcttccttccattcttcgtgaactatagcaagctctgattctaactttgaacacaaagctcttgactcatcaagcatcgtttccaggtcagagacccgatctctagatgcctgcagtgttttctttgttccttcaagttcatgtctcaaattttttactgtagtcagttctatatccagcattctcttcgagtcttcgtacttctcagttaagtcagcaactttgtctttacttttattaacatcatctagcgcacgatccagattttcatttagctgctgaatctcctgctctttcctgctgatgagctctgcatctgcagctgcttgcgtctcagaagtcaatttcaaagcactataatcttttgaaatactatcaagcttctggatataactctctttctcagccactaaagttgttattcttgtgtttaactcctcaatcgcagagttcttcgagtccaattcactctgagttcttatgagttcttccttctgctgtttgatctctaacttcgcttcagcaagatctcggctagtttgagtgtaaatagagttgagttccttcaattctgcttccttttttgccaacgatgcattaaaacgttgagctttttcttcactatctttcagctccaaactaagcaagttgatccgatcttgtagtccttcaaccaaatcaagcttttctctgagctttgtttctagtgcctctttgtcttcgccagcctttgacagactattttccagactttcgatttgatctttaagcttctcacataatttcttctcgctacttagctcccggcctaattctgtcaccaagtcctttgcagaattcaactggttgatcaatgacaactgttcctcttttgccttttctacttcctttttccgctcttcctgctcatgctgcagttttgcctcgaaatctttctccttcaaaaccaatgctctttctctgtctttcaactggttctttagctgtatgccacggttatcggtagcttaagtcaaaaaggatcaaatccagcactagcaatatattcacaacctcagaaagttaaagaaacaaaagaagagaagctcgaactaaatgatataagctgctaagacaagaacattcacccacaaattgtaaagcaaaatctttaagtgctagtagcttacagattcgatggtttcctcagcagcttttgtatcttgccgagccagtgcataaagtgcaccaagaacgccagcactaaaaattccaagaccattcaggagagccagaaatggatttggggatgttccttcactaactactgcaacctaatccaccaaaccaatcctgattcagtaaaatctcaagcactactttaaacacattgattctcaattaaaaaaaaatcaaattgagaaggtctaagagagtcttacaacctcagtttctagatcaaccttcgatgtctttatctcattgcctcctggaattaaaaagcagaactggtcacaacaatgaaagaaagataaccaaaagcaacatttgaacaaatctcatctaagcaataaaaaaactcactttcatcagccaaagcgggtgatcgaagctgcaaaaagggaagaacagagatacccacaagaaggaaagccctccttttggcggaagcaacgtcatactcgtacccatcttcctggtttaaagaagccaatgttggtcgtcggcgcttgaacttggcgacattactcgaacacagaagcccaaactgagacgaagaaggagaagaagaagaagaagaagaaggagatgaaaggaatcgagagtgtagaggaacagaagggacgaagcaagagccccctatcaggaaacccatcttcgccgccaactacttaagagattggaaatgtgtggcaaatgaagcaatcctaaaatcactgacacaaagcagaccccaaaacccaaaaaaggaacttcctttgtgtactgacttgtgacctcggaaaatctcaaagaagaatgcttacacaaatctcagagttatatccttcgattactgaagaaaatatctacaaatcctacgaaattgggtatcaaagactgaaacttttttttgtttaggagggcaatggcatatctgcaattttggaatagttcggtgctttgtgtacataacttaccaatcaaaactcgccagcttagacttcccctgcttcgttatcctcaatctctgggttcgcctggtttaagaaaacacgtgaacctcacgtgcgtctgtctgaccctaaaatttctctctgtttttctcagccgttctgtctaaaaccaccgacggcgacttcaaatagacgtcggaatttgtcgccaccggagaattgttacatgtgaatcccgttttataaagatg

SEQ ID NO: 23279 - DNA, 3003 bp, Unknown
  misc_feature (1)..( 3003): 2750-1469P.txt file - cDNA_ID_2134991; gDNA_ID_1620396; Annot_ID_155776
aatgacctaacgttcttcacagtctctgcaatgttacctgttgcggttaaatctccttggatcctaatcatagcagcaccttctctgattctcctcaaagcttctcctgtatcacggcaaccacaaatgaacggagatcggaaattatgtttgttgatgaaatgatcatcatccgcaacagagataatctcgctctcgtcaatgtaatcaaccgcaagagattccaagatctgagcctcaacaaaatgaccaacgcgagctcgtgccatcacaggtacagacacagctcgttttacctctttgatgagaaccggatccggcatacgacgaacaccgccgcgagatcgaaccggatctgagacgattacagaacatgcgccggcggattcagcgagcttagcttggttaaccgaggaaacttcaacaatggcgccgccacgaagtacctgagctaatccgaccttaacagagaacggatggtttttcttcgcgtcggtaatggctgtgccgctgtagagagtaacagctccttgatcttgatccgtcatagcttgatccgccatttttaggttctgtgagtttttagtaacagagagcttttcgccggagaaacggtgtttgttagtaacacgatctgagacgagaacgagaaagctgcgttgaaggtgaggagaaatatagagagaacggagaagacgaagaagagtgtggtttggtctagaaacttctgagactgttcgtcactgagaaatggttagggtggaatcgcaaaacggcgtcgtatgcagaaaaaggaaactaagtgggcttccatgatgatgattgatgacccaagtagacggactttttctttatttttgtaagagccgttggatgtgaatagaacacgtggcgtaatcgtgtgtaattctcgtccaaagtattttgaaatgattgttttgatggacacgagtcaaagaagaaaacaaagcatgaaatatttacgaaataaagggagtggtacatctaacaactgtcttacttagtggcccaccatgttataaattgtcacgacactagacgacgtcgtttgtagtgctcctcacgtgtttcaggttgttggttctatacatttttacagttttgaagcaattaaataattgagtacgtaaatcttactcttcccaactgtcactaccactgaggatgtttaatcatataaagttctgaatcttgtatgatttgatattatattagatgagacaaaatcagtcggcaaaataaaaagatggaagaaaaaagttcttttttaaaccgtcatcaccgattcaccatatatggatgatggtaaaaatgactacaacggttttggattgtttggcagcttgggaaacaaaaagattgtaggaggatgtagtttactttcatctcttacgtaatgtgagtacgcgggcatgatccagagatttatacggtgcagttggttttatgacatatggtaaagaaaatttgtttaacatcaaaaaatgtggtgatcgtttactgatttgtcttctatcaaatcaggaagcaaggtctatgaagaagggctacgaaagtggtgaatacacacaacgtcaagcaactacggcaaaggatcgaagcattgtctaagagatttaattacgaaacttcaaactcaaagtaacacgtagttgtaaaaacgttttttttggattggtaaaattttacattcattttttttaaaatgtggtgatgttttgcatgtgggtgtagatttgaaaataccaacgatttgttgttgagttttagacacgagtaaataaatggtgggaaatcgattaaacacacatatgaagcgatgtatgaaaacgacatgcgaattttatataaacaaatatcagctcatattgacccatgcgatcccaaaatgaatggagaatgacgacgtctgatctgaccatatcatatgtatggaaaagaccatttatgttcaagcttcgaaataaacttgatgatatgatcttctctatgttttgatttggagttgttcgattgctcattgagagagataattaataaatatggtgacactttctctcttattcgtcttagtcatatcatatattcatatctcatgttgatttgttattttgctatccagggagaccacaacgaataacactcacaaacgacaaagggcgcgacacatttgcttttgcaaaattcaaacttgaaagctagaaaattaataatatatagtcctgctctataatagaatactataaaatagtaaaacaaagccactgaattcagacaatccaaattttaatgctatcatgatcactctaaaaaacaacttttacttatacaagcgtgagaataatttggtcaaaaaagttaccattacttttgaattcaaaaacgttaattatcgaggtttagctaatataacttaatttttagtgatattatcagatatagttgacgtatgtaaatttaacattgtagaagttcatattagtaaatgtaatccgtatgattttctaatgaatttaattgaattttagaaaaaaggtccaaactatttggataaatcgactacatggtattgatatgacaaaaaatctcatactaacaaaaatacataaattagtagtaaaataactctgtatagtaattagtaactataactatcatgtaatccaaaaaatcccataaaataaaataaaataaaataaaagcattaagtagaaaaggtccacaaatctgtgattaataattagaggaattaaaacgacatatagaaatcgagtttaagggagcgtcagagaacgaacagcgaccaattactctctctactctctgcgctttaatttgaacttgtggagagagaaaagggttagatacagagagatagcgaaagagaagaagaagaagaggtctatcgacagagcaaacttcgtcaagagatccgttaaaaggatccatttggagctccgattcgagctagagtcaataatg

SEQ ID NO: 23280 - DNA, 3003 bp, Unknown
  misc_feature (1)..( 3003): 2750-1469P.txt file - cDNA_ID_2135001; gDNA_ID_1620396; Annot_ID_155781
ttggtgcaagagaaacaatatgaagtattatcaaatgaaacttgtgagggatatgaagagaagattgaaggaaaccctcgagaaacttcaaataaaaatatatttcaagaggaatgatatggatgttgttaagaaatcgattatatcatggttttttctcaactctacaacacttgaaagagatggtttttataaaacacgaaagcatgtgaggatagaagttgatccaacttctgtgcttaacgaggtaagttcttaaatactaacaaagtttgtgaactaaatcaacagtttagttgattaaatttttttcttttgttttacctggttcaaaagcctaagagcatttcaatggagagagttctcattttgttataaattaaaagaatatttatgactctagacatttatggagagaggtttagtttttggtcataatggtcataatgtgttctcgtccctccactttttcctcataccttatggttcaaggccatatttgttttgataataaatgtttagtatgttaaaacgtttttatgactaacattttattaaacactattttctcttaattgaatttattagtagtttcctcacactttatgaatttattattagttttaattttaaattgtcttttaaaattcaatatcgtatatttacgttttttggtggagtagatcaaattagcatggatatacaagcaactctatgagatcacatttacaagcaactctctcaagatgtaattgaagtttgaaggacaatttaatgtatcaaaaactattaaataaaattagtttttactttaaaatagaccaaaaaattgtttggtgataagatttatattaagaaacttttattaataccatcattataaacaaaaattgatatgataataataataataataatcaaaactgctgaaaataggttgcaaaacgtggcttatatataaaacagttcccaaattgaatcgaatttaatagtttattattttttaaaagtgtgtataccctacaagatttggtatcaataaacattgttattatatgtttcaaaaaaattcttaatgtttcaaaaatttgtttaaccttctctaaggccgaagtaagttaacgatttgcaaccaggcccatttatgtcacatataatggcccataaattcacttcaatcctaaaaataaaaatctaaccttcataatgggcaaaataaattacgatcgtattcaggcccacaaatacaaacaaaggcccatgcttttaagtacaaccctagaattagaaaacgttgatataaataagctgtcataaaattgagcttcttcttctctgaagccgtatcctagggttttctttgcacactactcgctccaatggtgatctctcctcttcctctttcgtcgattgaccatgaaaaccatctctgatattattattgtggaactttttgagtattgcagggaaagggaacagggagtttcggtaagaggaggaacaagagtcacacactctgtgtgagatgtggtcgtcgtagtttccacatccagaagagtcgttgctcggcttgtgcttacccagctgctcgcaagaggacttgtaagaactctcttcattgttttaaaaaaacattctctgaagatgcgtttcattttctcgatctagatttgcttttgtgtgttaatattcattctccatgatcgtgcttgagtctgatatgcatttggaccaatttgtatattcgttctctaacagaagaagcttatctatgtagctcgattgacatgtctattagttttgtttattatagcttgaaatgtttaaactttatcagttctttaatgtctttgcttcaattgattggttggaatttgagggattatctatgttcatttctgtctctgagctcaattcttgtctctttggttaacagacaactggagtgtgaaggccatcaggaggaagactactggtaccggaaggatgaggtatctccgtaatgttcctcgtcggttcaagactggattcagagaaggtaatgtatcttagtcttaagtttgttttctcttccagtcgaaatgtggttttgatggcacatttcttgtctttacataggtactgaagccaagccaaggagcaaggcatcagcttcatcagcttaaagagccagttcgagtagtctctcaggaaggactaaagcttagcattttttgcattcaactagttgaagattacttttcatgtggatctcatacattatgttatgtgggttttgtttcttttgttattcacttataaagttttgaacttggtttaaatatcatcttacatttgcaaccttaacaagccttcttcataggtttcattagagtcctagttttgattgaatgatatctttgaagttcgcgtaaaccaacctcaaacaagcctttcaaattacattctttgaagtcctggttttgattgaaccaaatcgtagtctattgaacaacctaaaaaacattgatttcaattgaccactgaagctctttaacacaataaatagcatccctgggactgcgactataataaaagttaaaaaaatgttgtcaagggtataattggaactttcaaaatagtcggagaactaaaagtttggtcttaatcggaaaaacatagaaacaccgtttcctcctccgcttcttcgtctttccgtcgtccactgtctctctctctctctcgcgacgcagatttcgattcgtcgaatattttagctaatcctctctcttaatctctttgaacatttttccccaaattcgccgcagtgaatactttctcttcccgtaaatctccaaaaatcgagttttttttattacttctcaattgaatttgcttcttccgattgatctcttaattgattcgcttgtgggttggatttgaatcctctcttactttccaaaggtcataccttttcacagatctatctttgaaattgtgaagaagaagaagaagaagacgatg

SEQ ID NO: 23281 - DNA, 3000 bp, Unknown; identical to SEQ ID NO: 1409
  misc_feature (1)..( 3000): 2750-1469P.txt file - cDNA_ID_2135073; gDNA_ID_1620397; Annot_ID_155815

SEQ ID NO: 23282 - DNA, 3000 bp, Unknown; identical to SEQ ID NO: 1404
  misc_feature (1)..( 3000): 2750-1469P.txt file - cDNA_ID_2135111; gDNA_ID_1620397; Annot_ID_155826

SEQ ID NO: 23283 - DNA, 3000 bp, Unknown; identical to SEQ ID NO: 1406
  misc_feature (1)..( 3000): 2750-1469P.txt file - cDNA_ID_2135126; gDNA_ID_1620397; Annot_ID_155831

SEQ ID NO: 23284 - DNA, 3000 bp, Unknown
  misc_feature (1)..( 3000): 2750-1469P.txt file - cDNA_ID_2135200; gDNA_ID_1971878; Annot_ID_176775
ttcgtcaaccacaaacgcgtttcactcttcgttcacgtcggggaatttaaaaaaatctccttcgtaacaaaaaagagaaagatcaagaagattgtcgtgatggctgccggatccatggacggaatattccgcaacatctttgaaggttgcatctctagctgtgactcttccatccaacgacgtccataccacaagaactgcggttgtgcccttcacgagagatctcgcggtggaggttcagcgactccttgtcgtcatggaaggtctgaggtcgttatgttccctatccaacgatcttggagtgaaggaaacagtttggctctgcatcttgcctcatcttcttcttcctctaacctccagtcactttcgtcgtcttcgtctatttctacccttgcatcgttatcttcgaccgtgtctgatattgattctcccatttaaggcatgaactattattagttcccattcattaattttttgtcttttatttgtttgtttcgaagagagtcaaattatgtttggtgtgtgattggaaaggtttcatgagtttccttggatatcaaaggaaactaattcaaatgttgtaatataatggtcaattgtagggaggcttttctataaaatttgtacagaatcatgtatttgagcgtaattatagttttttttgtatgatgtaaatttatacataaaccgtttgtaacatcgagagatgaaatttggattggaatgcgagaaaaataattttattttaatttttgtaatatgatcttcaagctatttcttcttattttatgttcttcggttaccactgtcttcatattgttttgattatactacgctatcatttgcccaaatctcttgacattctaatgtagagttgttgagcgacttgctaagattgttttccaagaaaaaaaaaattgtgtattccatacgtctaagagaaaatatttgtttactatgtgacttaaaaaatatataaatttaattattttatagttatatttggtaatgactaatgacattcaatccgaatatctgatcattgacattcaatttgaattttggctcaaatagaggttagcagagataatccgtctactggattagctatactggaggagaatgtttttttttggttattgttctttcattgatcggtatttggagaaaaaatataatttttcaggatattgttcgaaagattaatataacgaaacatcaaatatgagtttgtcttcaacggagcctacttccctgcatacaaatatagaagcattaatttgggcgaagtaatgtctaacggccaagcagaagaatatagtttctttcgtcacgaacttttatgaactcataaaaatggtgacatggtgtacatgtcttcaccaaaagagtggcccatattttcgtcatatctcgaggaaatcgtaaagtgtaagtaaaaattttctcttgtttttctgtttcatttgtttcttatcgagttaatgctagaataggcacatgtacactagcataaaatgtccgcactaatccacaatttgatcatgcacgtaaatattgttttctcaggttgcctacctacttttgtttgttatatccttgataacattatcatgttctaacattttcaaccttgctactattgtaatatggtacaaaagaaattgaaatattttatgcatgagatgagacaaccaaaagaaaataaaaatggttaataaaatatgaaaagaattgttaacaaaaaaaaagtaaaccgcaataccttttttcgtctagtaaaatagtaaaactggagaattctctttctttttctctagtaaaccgtaatagtaaaatccgtcccaccatctaatccagtttggtaaaattaaacattttttttttgttctaataatatttttattaaaagaattataattcaaatcaatttaaaaagttttcttttgaaatggttatttaattttatagatttcatatattatatatattctaaacgtttttcgttaaatattctaaacattttagaaactttaaataactataatatttatctttaataaaatcctaagattttttctttttaaaagtaattaaaattgatggagatatattaaataaggaaatgctaataattaggaatattatttaaatgataataattaatgttaatgacattccttgtaaataagttccaacttgaggatttatttacaaaaatggttgcaaaaatatatatgtagataacatgtagataacatgtatttttatttcagttgtctttgatgtcagattgaataaccagtttgagtttttgtctcaagaacagtggttttgtaagatatttctttcataataaagaaacagtaaaaaagaaaaaccgcaatacttttcaaaaaacaaatatgaaaagaattaaataaagatagtaaactgaaagccttgtccctattgcattttgccatctccgtccgattggtgaggtgtgatggtgtttgtacttgtgtctctggttttagcatcctcttgattttctctctgtcggtttgctactggtttgacttcgatgtaaggtctatccaattttattggtgcttccgacgttcacattaggaaagtttggtgagagtttctgatccttttgctcatttttagtgcttaaatcttgtttttctcatagtttttgaccttcattagaattttgtctcttggtttgatttctttgatttaaattagttttcccatatctgttgggttttttcttccctcttttggattgagtttctggagacaatccattgatccaccgatttatatattttaacttgtatcctactttggtttttaataaaatttagaggacaacaaaaaaatagtaaactgcaagcccgacccagtaacctattaaggtccaaaacgacatcgtagaacatagcaagtaaaagaagaaaagatatagagatagagacaatgatatcatcatcatcatcatccaacatg

SEQ ID NO: 23285 - DNA, 3003 bp, Unknown; identical to SEQ ID NO: 17149
  misc_feature (1)..( 3003): 2750-1469P.txt file - cDNA_ID_2135200; gDNA_ID_1620837; Annot_ID_169925

SEQ ID NO: 23286 - DNA, 3003 bp, Unknown
  misc_feature (1)..( 3003): 2750-1469P.txt file - cDNA_ID_2135289; gDNA_ID_1620396; Annot_ID_155787
ttgaggagcaatcctctctttgtgaatggggcagcgaatgtctcaaagaacttgctctacaagtaacgaaagtagaagagaatctcttctcagaatagtgtttgattgaagtagaaaagtcaagttaggttatgagatgaagaaacctgaagaggattgtaaggagaaggagcatcagagccgtatacgtcccattgacctgttgtgttacccaaatcttctaagtcaaagtagacacttttgtctccatacttagccaccacaccattagccctattacacatgaacacaacaacctcaagctaatttaatcacaaacaagagatgaaattatcagaatttaatcctttttaagctaattaatcatcactatatctatcgtttaaaacacacttcagccagcaaaaatctattaatatattttgaatttatagtgtggttatagtggcattttgatcctaattaatgaataaatgaaaagttttagttaccggatggatttgggtttaaagctcaggcgggaaggcttgatggagagcttagctccggcgagtgagctgccgccgagtccttttatggcggcggatggtttcacagcggcgacggttgcaagagacgccatgagcttcgatcactattcttttgttgtgtgtggtgagtgggaattttgtgtaggaaataatagcctttggtcacaatgagtcgagttttgatcttcttctgacacgtggcaactgatttcctcccggggattttcttacgccacttggaaaatgccacgtggaatctagtaggataaggttatctcaaggttttaactaaaatatttcgtgtcttcttattttgttatagggccccttctttatgattttgttttggaaaaaaccccaatagttttttaggtttactaaaaactccagccagtggcaagttccctgaatcacgttatagatagatttgtgaatcaccaccacttttaatttgagctctgatcttaggagttaggtgtcgacaaaatatataaaaaaatcacaacataaatagttaattttaacccatccaaaaagaaaagttcgattaccgttgtgtctcatttggcttcgactagtgctaatatttacatatgtgaatgtagagaggaaaggcaatagtcatggccaggtgattccatctgtaacatattcacaatttaacataattggcagtgtagtgtgatttttaggataatccaacactaacaattacttgttatatataatcgatccacatattctatactgcgtaattcgttactatcattgacaccttaaatggacaaaatcacactaaaaggttttttgcaaaccatttttgaaagtctaaaaatagtttaaagtatctctagaatttgaaataaaataaaaattcgttttgcagtagttatttagaggttttgaatgatttttctataaaaagtaaattgaagtagtgaattttttttttttttttttttttgagcaacgttttgaagtagtgaatcaagattcattttgtaatgaatctcgtataaaaaagaggagaagtggggtcatcaaaacatgtttgagaggacaagattccacgagagtgtggggatctaattgacgacccctaagaaatgggagaggcaacaaagagagaagaaaatagacgtctttctaattggagtttgtcacgtgacggaatcttattggaatccacaaaccaaagtcactaggctctgtccttttccaacacatgaagagaaaatctcggagattccaaacttgtggagagaaagatgcgactggccaacaataaataaacatatttagacacaaaatcctgcggtaaataattaacaattgctaatgcctaatgcataggatcctgctaactgctagcaaatgcgtgtcgcagctactttacaacttctcttaaaaacatattactatattagaatcgaactatacattgggaatgagtataccactaatccactaacatttgtctaagctatttccaagaaagaggtttctatagactccgatgcatatgaggaaatgtttcggtgcatatgataggaaaaatcataaccgatacatttgagtaaagaaaaatattacgtaagatttactataaaaataggaaaattgtgatatacctgtcgagttggacccaaataatcgacaagatagactttacacataatattgagctatgtgtattgacgtatataatctatcttctaataacgtagattagcacaaaattgacgagataaacataaggaaaacgggaaaagaagagaagttgtttaaacaaaaagggaaattgcaagccaacttgaaacttttaatttatttagttcacaagttgtgagaaacagttatttctcccaaaccacattttatcaatataataagacaaataaaagaatgcataacaattaacaaccaatagttatcgctcccttcatgcatgttatagacctgacgtggaattcaacataaacagctaactgcaagttcccaagactactttgttttgtttcatttgagatagtatgtcatagcaaaaaaaattgcatattacaaaatgtagtgcagatttcttgaaattatgaaaagcattacagtttaataacgtttcatcttggtcgaatcaaatcaaagaaagaaaatggtaaaacaaatcccaaattggttaaatattaacctgaaaagggaaatgttgacaaaataactgaaaagtaaagaaaaatatacggaaagtatattcttccttcatatgaaaaaaaaaactaaacaaaacaaataaaatcagatggggtaattaaaaaatgtttttaaaaattaagaggtaaatcaataaataagaaaatgtgggtctctccttgctcgtaaaaggcctatataatgacctaatgcgactcttctttcttccatcattctcggtttaactgtgaaacacataaataaaacaaagagaaagagagagaatatg

SEQ ID NO: 23287 - DNA, 3000 bp, Unknown; identical to SEQ ID NO: 6052
  misc_feature (1)..( 3000): 2750-1469P.txt file - cDNA_ID_2135381; gDNA_ID_1620839; Annot_ID_170020

SEQ ID NO: 23288 - DNA, 3003 bp, Unknown; identical to SEQ ID NO: 20883
  misc_feature (1)..( 3003): 2750-1469P.txt file - cDNA_ID_2135400; gDNA_ID_1620839; Annot_ID_170028

SEQ ID NO: 23289 - DNA, 3000 bp, Unknown; identical to SEQ ID NO: 3957
  misc_feature (1)..( 3000): 2750-1469P.txt file - cDNA_ID_2135426; gDNA_ID_1620675; Annot_ID_164231

SEQ ID NO: 23290 - DNA, 3003 bp, Unknown
  misc_feature (1)..( 3003): 2750-1469P.txt file - cDNA_ID_2135426; gDNA_ID_2926203; Annot_ID_201975
ttgtactcttctttacctcgcaactttgtttttcagggacgagtctttgttatgtcaaggtctggctttgaatgatgacttgcagcgtgtcttaaccaattatgaagcaattgcttctggattacctggaacttcttctcagatcgagaagcccaagtccgagacaggaaaatcccttgttgatgttgatggtccacttattgatacaggggacagcagtaatcaggcgaacgggtacgttctaccaaacttgactgttatgcacccaagaatgttggataaaatcacctatttttggatatgggttaccgatcctagctgcaatcttgagctcgatatatggcttgcacgtccaaactattacaatctaggatgtgaaaacgaaaagttacttatgaatctgggagtaactttataatcattttaatataaacggtgttaatttgtctcttaaccaagtaagaactggggtttcaggccaagtgaccttgtaaaagttttttttttgtcttataacatagctattgatttatactgtccaacgttttcacagagctacatcgagctctggtaacggggttctaaatcagttggccctccctgcaccacctgtaactaatggttcagccaattccaaaatagacctcctcagtggcgatgatcttgcccttgttcctgttggacctcctcagccagcaagtccggttgcatcagatcaaaatgcactcgcccttatcgacatgttctcagataatactaataatccaagtcctgcaactgcaccaagtggcaatccagctcagaatattcctttgaatcctcaagggcaccaacaaccaaatagtcaagctggagaagctggattacaacaatccaatggatttgcgcctcaagtgggttattcgcagtttgagcagccatcatacgggcaaggagtctcttctccctggagcagtcagcctgcacagcaaccagtccagccatcttatggtaatatatataaacagtttttgtttttcacacatctggagattagattgcagtatgccaatgtttctctggttatggcaacaaggagaaagaatttccttcttttggattcagaagaatcagcttcaattgtgtctcatgtctaatcattaattgttctgtttttatggtaatcttgtaatataaagaaggtgcccaagacagtacggcatttccacctcccccatgggaagctcagctccaagactatagtccctctgcggagtcaggaagtccgttttctcctggaatgcatccaactcagactgccttcacacatgctcaaccagttaacaacaacaatccatatcctcaaattccccaaaccgggccaccagtcaacaataacagtccatatgctcaaatgccccaaacaggtcaagcagttgccaacatcagtccatatcctcaaattccacaaaacggcgtgtacatgccaaaccaaccaaatcaggctcttgggtcaggctatcaaccacagcaacaacagcagcagcagatgatgatggctcagtactatgcccaacagcaacagctacagcaacaacaacagcaacaggcgtatggaaaccagatgggaggatacggatatggctataatcaacagcaacaaggaagcagcccatatctggaccagcaaatgtacggtttatccatgagagaccagacatcgcatcaggtagcatcatcatcatctaccacatcttatctgcctccaatgaaacctaagaataaaccagaggacaagctatttggggatcttgtggacatctccaaattcaagcctacaaaaccgacttccggaagagctggtaccatgtgaaaattcctccatccattcatcatttaccagtattcatctcctctatcctcctcagctaactctctttcttctctttgttaagcttttttcatcattgattttattaccctcttgggagataacatagatatacatatgtgttatgttcttccttataatttaccgttggttatgggtttgtatatttcttgtagagaaaagaaaactggaaaatcttttgttgagaactcagcgatttggggtttgtctcgagattctattttaggacattttaatctctcatttgtattttcagaccttttatttgttatatccattggcaataaagtttgatatcaattggatgagagttatggttcttaaatttgccaaaaggacagtttatgttctttgtatatgattgcaaccctaattccatagtcaatggagacatcaaaatgtcaaactatgcttgcattatataatctctttcgactcaatgatgtcaattaccgaaaaagtagaaaggaaggatttgttttgtttgcgactgttgttagttcttatgttgctcgtcgtaaacaagaaaaacctgccattcgtttgggtttttgaaatctagtctaacagaaagaaacaagagacaaatgaagaagagtaaatctagtccattcatcatcatcagtcttttggatcgtgcatatattaatttgtataagagtctgtctaacaaaattgtcaatatgtccgagtggttaaggagattgactcgaaatcaattgggctttgcccgcgcaggttcgaatcctgctgttgacgtattctattttgttttcttttcagctctcttcagaatttttgtaaatattttaaaagggaaaaaaatctcaaaatacgatttcaattaaaattgtagagattctcctcacgtctgtttgtgaaatgttgtctctaataaatttccgtaaattactgaaaacaagacacgagaaattgttaatttaacaaaataaaaatacgttacgtttggggtttgccacgtaactacttaccgccacacgttctcgtccttttcttcttcctctctgcattcttcacagagtttgtcaccaccaacaccaaacacacaatttcacattcttttgcatatttcttcttcttcttccattatg

SEQ ID NO: 23291 - DNA, 3000 bp, Unknown; identical to SEQ ID NO: 3946
  misc_feature (1)..( 3000): 2750-1469P.txt file - cDNA_ID_2135462; gDNA_ID_1620675; Annot_ID_164243

SEQ ID NO: 23292 - DNA, 3003 bp, Unknown; identical to SEQ ID NO: 19560
  misc_feature (1)..( 3003): 2750-1469P.txt file - cDNA_ID_2135468; gDNA_ID_1620675; Annot_ID_164246

SEQ ID NO: 23293 - DNA, 3000 bp, Unknown; identical to SEQ ID NO: 19561
  misc_feature (1)..( 3000): 2750-1469P.txt file - cDNA_ID_2135468; gDNA_ID_2926202; Annot_ID_201942

SEQ ID NO: 23294 - DNA, 3000 bp, Unknown; identical to SEQ ID NO: 5168
  misc_feature (1)..( 3000): 2750-1469P.txt file - cDNA_ID_2135548; gDNA_ID_1620767; Annot_ID_167356

SEQ ID NO: 23295 - DNA, 3000 bp, Unknown; identical to SEQ ID NO: 5164
  misc_feature (1)..( 3000): 2750-1469P.txt file - cDNA_ID_2135573; gDNA_ID_1620767; Annot_ID_167368

SEQ ID NO: 23296 - DNA, 3003 bp, Unknown
  misc_feature (1)..( 3003): 2750-1469P.txt file - cDNA_ID_2135650; gDNA_ID_1620645; Annot_ID_163210
ctgctttttttaacaaaattgtgaaaatcatttgatcttttgtttatttatgtgatcagtttaatacactatatttattcagtcaaaacctgcatttttagtcttgttttttcaactgagtattgattaacaggaatggaaactgattatatattgaattgtaaatgcagcagcagaaacggagaggattgaaaggcatggagaatatggacaccgactccgagtaaattttttgttccttgtttcattttctttttgtatggtttacgatttctcttttgaggaaaacaaatatgaagatgcacgtgtggcttgcttgtgaagagcgtgcgaagtatgccaacagagaaccagcagagcgagctatcgatcgagaaattactctatttttattttaatatttactcttatttttccttcttttggtttttttttggggggttcctaaattctttttcttttgtttcgtgtacaaaaaaaaatggtggagatcccttcttcataaatcataattccccttttataattatgaagaaaataaaagttctctgtctctttgaagactctttattgcttaaaacctaaataaaattcgataagcaagaataataaagtaataatgaatcttataatccttaaagaagaataatcaatttaatgaaatatttctctgattacgtctaaacgttttgacttcgttatgttaggccggaccggtccggtctgatttgaaccggagagggtggttatgtggattttaatgtctttggccttttggttgaatcaatttttgaaaaaccctcgcttattctactaacccttttcttcctaacctatttgaaatacaattttacccttctcttttactttttttaattttttatttattttttactaccaaataatttattaaaatcaaccaatcatacgcattctctctcttatctcattaatcacttaaatctacaaaaaaaggctggacaactgaaaccaataggcacaactatgttgatggacttctacgaaaacatataattacatactgtttttttttttctttttgattttcaagttatagtcaaaaagacttcagtcatacgcattgcttataatggatactattaaatttttttgtcgtatttatacaaattaatatgttttgtattggtacaactaagtacaacccgcacaactaagatctattcactttgctagttttcagaatattataaaatatgaaaatttaaaacaaaactaagaaaacttaaataatgcatacacaatggtaatgaaattacataattagtttttgacaaaaatcatattttctaaattaatgaaactcttatcacaaaatctaacattcatacactaacaaccttatactttcatggttactttgtatattttaacaaaacaaattaaaaattttaaacacttgtatttagataaatataaatacaccgatacaaagtaatggtattttgatgggggaataccatatgttccacccataaaaattagttttgagttgataacaactagatttattatattctcgatattgtacaactatgagcaaaaatgtgcaaccgagtacaactgtacaactatgggcaatatatttttcagatatttatagatattttttaaatatttgtagataatttataataaaaattagctttatttttttgtgataaaaatgtttagttttttttttgtcatcaaaaatacttaattttatagttaaataaactatttttttccctttcaaacttttttttttcttctcaaaacactattgtttaataaaataaatactaacattcataattttttgtgttttgttttggatcaaaatacgttgatgtgtacattcatatttattttggagttttttttgacaaaaaatcttagattcatacataaactaagatacatagttttacatgagcgtaccagttgtacctaaacgcttagatgtattattttaaaacaaaaagacagccgaacaattgtatataaacccaaaaacccaacataattatatctaaaaatttagccacaattatacctaaaaccaaaaacacaacactacgtaataacttaaacaagacgccttcttcttctctttgtcattctccttctcaatttctttcttctcctccccttttcttctagtttttatcacaaactatctctaaggaacaaaattcaaattcattcgaatcccaattgtaatcctaaaaactaagtcataatggctattagaagaggcttttaaggaacaatttcgattttaaatcgataattaattcaaatttgaattgtaatcataaaaatccaaattataatcgaaatttcatccaaaatccatcattttcaaacaaaatcaaagagaaaaaagatcaaactatcaaatctaataaaaaataaaaccctaattaaacacaacaccatcaatcatcatatatagaatagagatggatttttggattgatagaaacaaatgaaaaggtaaaaaagatggatatttggattgatagaaagaatgaaaaggtaaaaaggagacgaaagattatatatggaatagagagaaaagagtaaagagaagaagaagaagaaacaaatcaaaaattttgtttttgttgaattgagagaaaaataaattgaagatgaaaaaaaattgatctgagaaattagatttttttttctgttgagaagaaaatatctaacattgttatggatttacatctaacatagagattgggttataaataagtgaaaaactctagttttacttgttttttactattattctgaattgaaatagataaataaacatatgttttttataagggggctaactagagaatgtttgaagctgagggggtggagtaagattaaaatactggttatgttacgttataaattaactcatcggctttaatttaaaccataatcttgtaagaaagaatcaaaaatctgaataaaccaatg

SEQ ID NO: 23297 - DNA, 3003 bp, Unknown; identical to SEQ ID NO: 23296
  misc_feature (1)..( 3003): 2750-1469P.txt file - cDNA_ID_2135650; gDNA_ID_2926175; Annot_ID_199809

SEQ ID NO: 23298 - DNA, 3003 bp, Unknown; identical to SEQ ID NO: 20873
  misc_feature (1)..( 3003): 2750-1469P.txt file - cDNA_ID_2135701; gDNA_ID_1620836; Annot_ID_169903

SEQ ID NO: 23299 - DNA, 1278 bp, Unknown; identical to SEQ ID NO: 7862
  misc_feature (1)..( 1278): 2750-1469P.txt file - cDNA_ID_2135794; gDNA_ID_1621169; Annot_ID_173911

SEQ ID NO: 23300 - DNA, 3000 bp, Unknown
  misc_feature (1)..( 3000): 2750-1469P.txt file - cDNA_ID_2135831; gDNA_ID_1621169; Annot_ID_173925
cattggtctttctaaaaagttaagatttctgagttctgaaccttggactgagaatggttaccacattttcctaagatttcaactacatggactctctctaagacttctgaaccctgaaatataaaagtaatagtagcttaccactttgatgttttgtgtagtagctacacttttctcaaagtgaacatcagagttaccagctaataacttctccaacctcagacgaattttaccttcatctttcctaactgtattcccacgaaagtaaagaagcgttgtacgagcctcaaaaggatctcccataccatcatcgccctcctcattcaaagactcaacaacatgtacataaggagaaactacgtctttacttaaacgtgccatgtctttagaataacgcccaaaatccacaacaatgagaatcgacgcattcacttgttgccttagaaatctgaaagcattaggatgtgtcatcggaatcacatgatctttacctcctgaacgattccaatacttcgaattctcaagaaactccattaactcaacctgatcacacaacatgaaacaataatggtggcgattcataaagattcaaaattggcaacaaagtcaacgaatttgacattacccatcatcccaaatcaccggaatttcaaaaatttcgattaaaatttgacaatagttagggtttatagttcataattcgatcgccagacgctgcaatggtggcgattcataaagattcaaactttgcaaaaaaagtcaacgaatttgccattacccatcacccaaaatcaccggaatttcaaaaatttccgatcaaaattatacctgtaatagccgatcaaattcagtatctggatcagtcatgttcttcccatgagtattaaaactcaacgaagagaaaaaaggaacataaaacacatccgccaaatccggatcaaaaaccctaattgcttcattctcatcctcaccaccgttaagaagagaagccataagccaatactcaacgctatgttgtcttttaatcccagaagtctgaggccaagaaggtaaattcttccctgtgataggctcaacatctgagctatgaggatccatcatcgcgatattaaactttcgtgggagatcgtacatgaagacacggagaggttttccagaggagctacaaggagaagaagctccattgggttgggattggaggaggtagaagtaaggtcttggatcgacggttcccatgtagattgagaatgaagcaacgaggaagatgaagaagacgattgtacatattgttttgccgtacatttcttcttcgagagagatgatacagagaagaagaagaagaaagtgagagatttagatccaacggtctctgttttgggttttttcgttgcttggtgattgtaatgagttttgatgaaatgaaacgtattgagtcattagacatttaatgatttatgatttaagaaagattctttcagttacaaacaaatttactgtagttgttttttctttttcttttacacacaacataggtgttgtaattcaagaaattgcacattcactttagaagttttaaaagattaggtaattgcacattacaatcaatatttttttgtaaaatgatcactatactataatagaagctaaggatgttgaacacacaaaggattcaaaaagtaaatgtttggttttccggttcgatgttgaaagactgagttatagaggtaatggttcgaattaccatttttgcaactcttgttcatcttatttgattgtggtcaattggaaaaaacgtttacgggtttcttttggttttcagttttgttaccaacaatttgatcattgagacattgacaatccgattttgttcacatgtttgaaaataacgagcgaatgggccgaaccctgctgactcagacttggtcaaagtttttctaagcaaatttcattcttgggccgagtctagggataaagctcatatctagcatttatgtataaccaaaacacataggtgcatatagactagacgagtgacagtccaggatacatacatatagatatcctgataatgatatccatccttgctttgtgaggatcggacaactatgaagaatggactaaaattgtgcttgcctcaaagaagaaatttggtttcctcgacgaccaacttgtaaaaccagaggaaaactctccccagctatgatgattgaaaatccattaattaatactctcttgatatcttggatcaagataactattggtccgagacttggctaatatctcacacaaatagttggtacgtgatgtgtgggaacatatcatcacgtaaagaaaggaaacgtagtttgctttatttaacatacatagacatagttatgttcacgacactttaatgtctacatgtttttttgcgtgttggattacatcccaaaacaaaaaaaaaacatttgtgtcaaatgtttttaattaaaacaacgtgtcatttccttttaaccaaattttcttccctagatatataccccaatacatggtagtagatcttttttttggttttttttttggttcaaaggtagtaaactaattaagccttgattttattcctcttattcttcttagactcgtatttagttcacgagttacgtacaaagtttgtttttttgtctaagcaagcggaaatattttgtaagattataccatctacttttgctgcatcgtatttaaaagtcagaaaaacaacaatgtcactttgataatgacatctgtccatagacatgcaaaattgattcaaatttatgaaatcacctttaaattgtctaagatattcaaattaaatgacttcaaactttaaatcaaaattttaccaaatctacacttcagaacaaaatgaatctgaataaaattagatttagggaaacgtaaagacttcattatggaataaatcgtgaggacttttaagtcattttgcatctcactctcacgccgtaacagtctctctctatg

SEQ ID NO: 23301 - DNA, 3000 bp, Unknown; identical to SEQ ID NO: 4757
  misc_feature (1)..( 3000): 2750-1469P.txt file - cDNA_ID_2135867; gDNA_ID_1620728; Annot_ID_165999

SEQ ID NO: 23302 - DNA, 3000 bp, Unknown; identical to SEQ ID NO: 4757
  misc_feature (1)..( 3000): 2750-1469P.txt file - cDNA_ID_2135867; gDNA_ID_2926173; Annot_ID_199670

SEQ ID NO: 23303 - DNA, 3003 bp, Unknown
  misc_feature (1)..( 3003): 2750-1469P.txt file - cDNA_ID_2135960; gDNA_ID_1620398; Annot_ID_155859
attccactgcataaatttaccatattgaggaaaatgtttcactttgtttaaagttattcggttcttgaaagatcacagaagatatctttacctggtcgaatgcaccagcttgagtagaacaaatccacgcgtttttgtttgttgttaggcggtatagaaggaaccgatactccctgaaccaagaacgagatacaatcttagggtgttgttattgtaactggttctttgcaatgcaaagtaagagcacaaaaaatgaatctattcttcatctcttttctatataacctgttcaaatcccaaaccaactgatttagaggtaagctggcaattcaattgcaattctatgcagaaaaactagcctgacatcgaagctaactcgagcttctttttactctttatcacatcaatgtaaaagagtccatttttgttactagtacacatacctttgtaacacagtaataagagtttccacaattccatatcctgcgaccgattacatactctctatcactgcagaagaacgggaactgcaacaccggaacatacatgaaaggaaagatcaatctaagaaccactcatcaaaatgttacaaaacaagtaaagtaactagagaggcagagagtaactaaccttgcgtatccatctaacaatcatggttccagtactgggacactcttcaacagtagtggaattagaaagcattgtatcccaagttggtctaaactcatcatcccagaaaaagtctcttaacatcacaggagttgcatcttcaaacacagttctacttctatactcagtaggaccattctaaaacaaaacacaaaagacccatcaagaacaaaaagaaacaaatctctctatctcaaacacacaagagcaagtaatatattaccttaggttctctcaaccaagcttggtatctcataccaggagtaaaacgatccatcatctgaatccaagcttgaccaccatctttcctctcaaccaattgcacaagatgtctcaaatctaactctgttacagtattaggcaatctctcctttgttttcttcactctacaaaaaatcaaaacacacaaaaattaacaaaccaaaacaaaacccttagctataactaaaccatcacaatcatcaaaattagctttaccttgaaaccaaatccaaatgttgttcagaagaatcatatgaagaagaagaagaatcaggagaaactgtttgtctctgttgtcttaaagccatagtccatgtatcacaaacaagagcctttaagcaaggagctgatccaaaacccttcaaaggagaagtaacaacagaactaggagaagaagatggtaaagacaaatcaaaagatcttggagcagaacattgtaatttgacttgtcgattattagaagaagaaacccatcttggtttccatgcccatccaataaccaacccaataacaaaagctaaccatcctgtgattagccctaatattatactctcaagcaaagccataactttgcagaggataagtaagagaaagggtacgcctttaaatatgttaagaagaaactaaaaaagaaacgatttttttatttggataaagatgaaaactttgaaggcggtgagaggaagaagacaaagaaagggacatgagtggtgagaagaagagagataaatctatggacttatggtaaaggggttattattcgtagacgctaagtagtagtagccattgatggagcttgaaagaccattgctttttagaggaggagaaacaaaaaaaaaaaatggtggacggagagtgtgaaacgacgaccaccgtccattaaggaccatttctaaattacggttgattaggaggaacacttcaaatcttgcagggtttatttttctttccccaaattaaattctgagttttattagtcctttgatttttaatatcgtaacgttattttatagccgcgtttttgatgtcacattttataaatgtgttaaatgtaaatattggttacaaacttttataacatgattgttttgacttttttttggaagacttgactatggaattttgctcactagcattaactcatctgtttgatgtattcaaagtttgaacatctatttactaggtctttcatcttcttaaaactaaaaatttctcacatttcttattacttctatcataatatttacgtatccaaaaaaacgatcagtcatgtcaaaattgtttgagttaagaattaaaagatcattttccaagtttgagttagtttatgaaaatcagaaaaatattttgtgttttaatcagtacaaaattgtatatttgtgctgctaaatatgttagagtaatgcaactatgtttgttttggacattaaacaaaaaaagaacaatattgcaaagacgaatttggaatcctttgaccttgccaaggccatagacacattaccacttgtgcaaggagcaaatgacgatttataataaattacaaacaaacttatcttaataaatttatcactaccttgaaggggcattgagaccatagcatgttacatgaggaaaagaaaacctttgtactgattaaaagaacacttaaagagttaatccattgtcacggctattgtcaccaccattaccattgccacgcatgatcgtctccatgactccattgttgccattaccacatcgtttccacaatcatggcaaatgcaatatagtggcaaaggtgaaagagatagacagatagtaatgttccgatactaggggtggcttaaataatttttctatcgtaatgttaagatgataggtactattgcatttttggtagatgaagggtaaattatataagattaaaagtttgaggattcttttgcaattttcccatattagaaacgaaacatgttctcttctcaggcccaataacattttttgttaaatctttgattattaaagttaacccatcttggaatcaaacacgaccgttaaaatcagaaaccttggttttggatatagccagccatg

SEQ ID NO: 23304 - DNA, 3000 bp, Unknown; identical to SEQ ID NO: 1413
  misc_feature (1)..( 3000): 2750-1469P.txt file - cDNA_ID_2135963; gDNA_ID_1620398; Annot_ID_155860

SEQ ID NO: 23305 - DNA, 3000 bp, Unknown; identical to SEQ ID NO: 7748
  misc_feature (1)..( 3000): 2750-1469P.txt file - cDNA_ID_2136000; gDNA_ID_1621160; Annot_ID_173670

SEQ ID NO: 23306 - DNA, 3003 bp, Unknown; identical to SEQ ID NO: 18633
  misc_feature (1)..( 3003): 2750-1469P.txt file - cDNA_ID_2136020; gDNA_ID_1621160; Annot_ID_173677

SEQ ID NO: 23307 - DNA, 3003 bp, Unknown
  misc_feature (1)..( 3003): 2750-1469P.txt file - cDNA_ID_2136086; gDNA_ID_1620399; Annot_ID_155875
gagtctttagtgattatttatacaacaaaaaccaagaccgttatatgatatatgattttaaataaatagaaagtgatcaaagagacgatggatcgtgattaagtttataagctgcagcgacggattcagcaacacctccaggaataatattattgaaaggagaatgattcagctcagcccgaatcactgcttctgcgtcttcacttgtcacttctctgtccctcgttactttcacatcaatctccgcgataacgtcgccgagatttgtcttctcattatcttttcctattttttggttacgagcaaccgccttacttgctacagcagttacaccaccttcactttctatatcgcctccgatagcccttgtttccacctcttttatggcagccacgtcggtggtttcaactggtttgtggccgacattcatggatgctgctttaagagcctccgttaatgtcgttgacctcccgataagtgcttccgctgcggtggaaatctcttctgttgggcctacaaactttttcaaaacgtttcacatcattcggtattatattgtggtcacaattgttcaaaaccagtatgtgtttttacgtttttcgttatttcatatttgcgttttacgttgcgttaacatgagaaagtgagactacaaaataaaaattcaacataaattttttttgaaagaagtatatcaaacaaaatattaatttcctttgtgttttcaacaccatgcagtgtacggatttaactttacacagccataataattaactacaaagttgggccaagttaatattcacaatctttcttcgtccaagccaactcttgatgatactcattttgaatgtaaaataatccactttaagcgtgtactagaagaaacatcctttcaaaatgatcaaatctaccgccactagtctaccactaccacacgcttgttagttggttattatgcattaaatataaacgtagtacaaagaaagaacccaaaatctatacctgtccaccggggctagactgagagacgctaaagtgctcctccacggagatgttggtgacactagcactatcttttgatgaacccatcgttttagacttcttctttctttgcttccatgttctttttctttccttagtttaaatacgaaaacggaatgtggcgataataacggttccgtacagtttcatttgacacgtaggcttttaacagtgtaacgtgtccatatttagctgcttgtgagacagtgacccttaaatgcatcggcgagactatgtattaaacatttagagtagcgtggtgagtttaagaaatattggaagaaaggacctttcataacccttttatgcaaatttccatatactattctttttttttaaggtatgttgatctcttttaacgacttgcatgtttttgacgtttgtcaaaactcaaaagtaataaaatggagttccatggttggattttgggatttaaatttgttctttaatgattatttatgcaacaaaatcttataggcttccaatgcctatataaggtggatcaaaaactgatctcggtaaaaaagacagtacaaaacttcggttcgaaacttcctactctaaaagaaaacaaaacaaaaaatacaaaaatcacgaccgttattatatacttattgtgataaatatgtaaattgcaattgatatcaaagagatacattgcatggattgcaattaagtttataagctgcagtgacggattcagcaacacctccaggaataatattattgaaaggagaatgattcagctcagcccgaatcactgcttctgcgtcttcacttgtcacttctctatctctcgttactttcacatcaatctccgcgataacgtcgccgagatttgtcttctcattatcttctcctattttttggttacgagcaaccgctttacttgctacagcggttacaccaccatcgctttctatatcacctcctatagccctagcttccacctcttttatggcagccaagtcggtggtttctaccggtttacggccgacatttatcgccgctgctttgagtgcttctgtcaatgtcgttgacctcccgactagcgcttcagccgccgtggaaatttgttctgttgtgcctgcatactgtttcaaaaggccgaacccgaacatcatacgatatcaacatggtcacgtaaaatatttcaagttaaaagtttttttacattttatcaccgcggtagaagttatacaattcctactatgagctagcaatcggtaaaacggtaaattaaagggaacaccaacaaaacggtacaaaatctttaccaatctatgttttaccgcacttgcttacttcttttaactgttctgttatcgtaaacgatttttcttttaatcgtggctaatttttcattttaacctattacctgaccacaagtagtagattgggagaggctaaagtgctcctctacagagatattgtgaaactagcaccatcttttgatgaacccatcgttttagagttctttgatcttctttctctgctttgcattatctaatacactttctgttttgtgtaaattgataaataagtaaacggaagtgccgacaaaaaaaaagaaaaaaaaaaaaaaaaacggaagatgacaatagtaacggttccgtaacaatttacatttgacacgtcggctttcaacagtccacgtgtacaatacttgtctacgtatgccgttatgcgaccgtgactcttcgatgcataagagagaccaattactttttgggcctcagaagcttcgtagagcccaaacattctaccaagctttgagacacgtgcatagtccgtgccagctgtttcttgttttagtatttccgggtcgggtttcacccgtatccggaaatcaaattcatcggagcgcttaatttgagtccacaattaaagtgagaattttcctgaagaagaagaacttttgctttttttctgggtttgcttttttgttgtgtcaatgaaatg

SEQ ID NO: 23308 - DNA, 3000 bp, Unknown; identical to SEQ ID NO: 1417
  misc_feature (1)..( 3000): 2750-1469P.txt file - cDNA_ID_2136112; gDNA_ID_1620399; Annot_ID_155883

SEQ ID NO: 23309 - DNA, 3000 bp, Unknown; identical to SEQ ID NO: 1416
  misc_feature (1)..( 3000): 2750-1469P.txt file - cDNA_ID_2136122; gDNA_ID_1620399; Annot_ID_155887

SEQ ID NO: 23310 - DNA, 3003 bp, Unknown
  misc_feature (1)..( 3003): 2750-1469P.txt file - cDNA_ID_2136144; gDNA_ID_1620401; Annot_ID_155953
ttgtggaccctcgacaacgttagaaaacatcttctgctagatgtttgatggcctttaatagctaagtgatttatagagaacgacatataatgggctttagtttgggccttttaaaagccatagtatgggcttatttgctttgtccaagttcagtattgggtttataaggaaactttttatcgtgaaaaatagagtaatttatattcacaagcagatttccatttcgagttattttatttaaaaaggctgtgattactgataagactgatattattgagtgaaggaagtggtgtgggattctaaaattgctttgaacgttttgaataatcctgtcataatgattatgacaacactagctttatcatgattaccacctcaatcaatgtttaattaaccagataataaacgaaaaaattaacgaataagaagatggcagtgtattaaaatccaagcattgacccatccgacccatgatcttctcggatttgtcggtatcattacatgctgctaaatagtcttctctaacgttgattttgtctagccacatcaagaaagaaaaaactatattcaaaagtttaaatgttagggaaaccatcacataacatgcatttttaccaaaaaaatagttttgaaaaatgaaatattagttgaagttgcagagattcgaattaaaaccgcgagcctcttgttaaaaaataaatccctcaacttcaaaactgtagtcataccataattctggcttgtgatctcaatagaaatagtatcaaagagtgacaataatgagtaatgacagaaaatgagtacaaaagtgttgaagaaaaaaaaaaaagtgttgaagaatattatttatcttgagctttaagtatatttataacacaagcgttgcagatttatgtttacgtggaatagaagaaaacttttttccctcaagatttttaattttttgcgtagaggaatatttgtttcttcttcttatatattgacaataatgtacatgctatttctaaccaagagaaatacagctagaagttaaaaataaacaaaatataccaacttgaaaaataagaatgaaaattattatttaggttttagattgaacctcttgattttgtatagtcactaatgtttctgcattattttgttagtaaaaggataagatattaaataatatgaggaaaagaaatggacatccccggcaaatgaaaatggaaaaaggtataataaagatgaaaaaaagacaatgataaagctattttggtttaaaacaaattaaaagaaaaaagcaaaacgctagagagcgtgtggttgaccccttcgttctacacttgtcgattaccatcaccattaccattaccattaatctcttaccattaataaacataaacacgcacaatgagagtcggtggatgaatagatcaatttatttttcttttgcataatttaaaaaaaaaaaactaaaacaatagaaagaataaaagacaaaaaaagaaagaaagaaagataaaagatagagatgtaacgttaagcccgttgtgtcactttattccaaagttgcatgtatgggttgggtcttcttctttttttcttccttttgtattcactactaaatatatttttaatagattcgctataaacttgatttatacttattacctatttcatgtaaaatatttcttcttgtctaccaaaattcgttgttagaatagtaaactaaatctttcaagttttaaatatcaagcagtatcaagcagagcagtacaatggagacactttcttatattaataatatacttgcttgtgacatagctaaaaacaaccgacacttttacattttgttttcaactcgagttattgtttgttagtattaaaaaacaaactttaaatagtcttttgaagtttggaattgttggcccatattatgttgtaggtaatatggaatcagccggtacactggaccacagaggattgtctttccgtctacagtctacagaatcagccggactagttttgtaacttttgtttaaaagagctatttattatttgtaatcttagtttttaagttttaactaaaagaatgaagaaaatgtagacaaaatcgaaaagtcgatggtggaggtatgtacgtgtctttttcctttgtccgtcttgaaaccaacgaaacaaaatcggaaattgtctacgttaaaggacaatcacattcttagttaattaatactccataccaagggacatttacgtctttaagcaccaaaaccatagtattggattggcgaaaatttccaaatttccaaagcaacaagaccatgagagtccatccataatcatttttattataaacttaatagtcaatttccatgaagctggacttgaatagttaggctgtctattcttcgtttttatgtcttttacgtgaacaactcgtaattctttatctgtttttctgaacatatgtttgttgtcgcacacgtataatacaattatacaaatacatttgtttttagtctaaaaccatctacattgggatattttataagagttttttacaattaaaaaaataaaaataataaaaatgaaagaaagaaagtgaataattaaattataatataatattaatattttttttgtttgaaaaactttgtgggtttctgtcctaaattatttttttaatcattttattaagtactggtaattactaattaacggatagtttaaaataagcagattaaacgatcccggaatgctgacgtcagcatcataaatctcagatctcgatacgaaacgaatttctcactgcagcagctattactttccctttttcaccttttttttcctttctttttctttcttttttccatttcttaattttttcttcccattgaagattactctacgatctgacgaacaaggcaaccaaaaaaagggcaaagaacagagagagagcaaaaagcagaagaagatgaatttagacgagaattgtaaaatagtttatcacgattcgccatg

SEQ ID NO: 23311 - DNA, 3003 bp, Unknown
  misc_feature (1)..( 3003): 2750-1469P.txt file - cDNA_ID_2136159; gDNA_ID_1620401; Annot_ID_155960
tacgaatcggcatggatctgacgttgtgtttgttacggagatccttggataacggcgagctcatgagaacgcgcctcacgcttgaaggagctgtgaagtgagccttcctgttcttccggcgagaagagctcacacgcggattgaacttcatcgccgctgaatttgtgaagaaattagggtttttttgtgctgaagaggtggagcgttgtgtgcatgagtttatatatgagatattaaaagttacttaaacgctgccgtttctcacagtgagaattagggttttgaaggtttctgggtcagatgggctttgataagttttatatgggctttcaaaccattaaaatggaccaatctaaccttgagaaatataatgggcttattagattgttgtcaacttctaagttaagtgttgtactcaattctaaaaccaaacgcattaaagagtttgtattctttttaattttgttctctccaaaacaatgtgttgggttcttgagaagactgactgttattgattattttttttgtataattaaaaaataaggctgcttgaaatagtaatggttacaatcttgaatatttggttatttggttacaatcttgaataaggctttttgtatatttggttacaatcttgaatataaaatatatctttcaatgaaaaaaaaaataaaaaaaatagtaatggttactgactaagttggagataaggaaatcatcaaatcataaaagatccatttaggttagaaataaatacacacttattgaatatcatttgataaggcttatctcaaactaataaaacaagaatcgagattcgagaatctcactaaacaaatagattaggtgaatccgacaaaagccaatgatgccgtcacgctcataaaactcggattccacaagcccaaaatagacaacatgttttattttattatttgtttaccgacttaaaatattaatttaagatcgttaaaaaacaaactctacaagtttttgatttcagagtccaccgttgagcctgttcaattaaatcgttgaatctcgcggtgcgttttactttgattctttcgaattttttttatatggatgttgccgcgatggcgagatgtgtgggaaggtgctacgtttcgccggcgttcggtgagtctgaatcgcaccggttatcggagcggcggtttctgaaattgtctagctccacgaattcggatcccgccggtagtaaaagtttgaagcttcgcgggaaaattcatcggagaatgagctacttccgtccgatcatggcaaaagatgaatccatttcatcgcggtccggtaataatcacgtaattccgttctggttcatctctaatcctagtttgggttcctatgattcgtttttaacatttgggttcctgagaccagaaatttccatagttttagcataaagtttggaccttagtagacagatcaatgatgtatatctgaatagatctaatctcagataatctaaccaggtgaaacgaagcaaatcaatggaaagcaaaagaacattgtctggcatgattgtcccgttactaaatccgacaggcaagaattaattaagcaaaagggatgtgtgatttggattactggcttaagtggttcaggtttggtcctttgtttctgaattgatctctaactacatcttgttatgtttctactggattctttcaaatattctcgtattttttcaggtaaaagtagtctggcatgtgctcttagtcgagctttgcacaatcgtggaaagctttcgtatatacttgatggtgacaatgttcgacatggtttaaacagcgatcttagtttcgaagcagatgatcgagctgaaaacattcgaagagttggtgaagtggctaaactgtttgcagattctggtattatctgtattgcaagtttaatatctccttaccggatagaacgagctgcctgccgtgcattattaccacaaggagatttcattgaggtttctccaagttcatgaatttgaatcccagtctcaacatcaatctgactttctcttggttctcttgataggtatttatggatgtgccactccatgtttgtgaagctagagatccaaagggcttatacaaacgtgcacgcgctggtaaaatcaaaggtaactttgctttttctctgcatctgttttcaacttaacccatgttctactgattttcattaattatataaccttcttgatctatccatttgattatatgtaaatatattgttccccaaaacatttcttctccaggttttacaggagtagatgatccatatgaagcgcctttggattgcgaggttcatataatatccaatttttgttatataagttggaatctagctcatctccgaacttgaatctaatgttgtgtttccgactactctttgcagattgtaatacaaaacagtagagacaaggggctttcttcttcatcttcatcttcatcttcaccttcatcttcgtcttcttctctgtgtgaaatggcagatattgttgtgtcgtacttggaccaaaatggatacctgaagaaacactccacaaaatcacgtaattgtatgtaaatgtaatattaatatcattgttgtaacgtttcttaaacctattttacctatggacgattaaattgtgaaaacataaatgtaattcacaatctgcaaagagttggtaagaaaaacttgtttgattgattgagagaatgagattattatatggccgccaagttggcgccaactctccggctttttaagtaatcgagcatttgggcctaaaaatatacggcccagtgttaacaaaacaggcctttttaatatccgggtcggactctattaaggccggatctggttctacggcggcgactcctcctcctgactataacaaaaacaaaacgcggtggggagggcggtagtatcagacagatcgaaaatcgcaacggttaagattccagctactgaaatctatcaacgtcgaagaagtgaacgatg

SEQ ID NO: 23312 - DNA, 3003 bp, Unknown
  misc_feature (1)..( 3003): 2750-1469P.txt file - cDNA_ID_2136173; gDNA_ID_1620401; Annot_ID_155964
ggagagtgattagagtaacgtatcttgagccgttttctctggatttttatttgactcagctcttcttttcactgggttatattttttttccagaaaaggttaaaagaagtgggaaaagatcaaagtatgttaaccgatttaagactatcatcaatcatgccgtgtgtcaaaacccgctaaaagcggaagagggtttcttttgtttagtcttgttcactcatacatagagtcccacatcgctaacaaaagaagcgtgaaagagaagaggagtagtataaaaaacgcggccatggatcgtaacaattcatacctttctcggccttttggctaagatcaagtgtagtatctgttcttatcagtataatatctgatatgtgggccatcggcccacacgatattaactctattttttaagggagaaagcccattatgatagcttgctatctgggctttcacgagtcgaccatgcgttgcactactgcacggtcttggctcaacccgccaactattcagtctaaaaaaattattaagtatctatagagataaaaaaaatcgaaaaaccaactaataatccacaaaggcaatatatttacggacctacataaacattgacggttcagatctgggcttaagaagcccataatcaaacacatcctaatgattctccattattgacccaaacagctcgtattagtacagtttccaatcagcgaatcattggtcagtggtcatcacgcgccttccaaacacattcttttgttttcttatcaaatctaaattctttcttccgaacttctctctgtcccatcgaatcttttttctgagtggctagttttttgttttttctttaataataactacaatacatagcaaagctccattattttcgctctgtcagacacagcttcagtttccctacaaaacgaattataatcagatctagaccgttaatctcacgacctacataaatatagacggttcagatttactgagccattttgtaactttaattcgccggctctcttgccgtgttttcgattttgacaaacgaaaaaaaaatcttcaatgagataacaataatatcagcagcggaacaaggattgagaaaaggaacctttcccttttaataagccgatatagatccttggaggagaatttgtagcagaccgatctctgtctgttgtctctgtttctacgaatctctgtgtttgtcggaaatcgtaaattatgggtttgtgggatgctcttctcaattggcttcgcaggtcagtttctatgtcttctacttcaaattttttgtctgggttcgtgggattttgatttggattgtttctcttggtattttgagttcaatgattggggaaatccaactatttccgccgaatttggttttgtttacaacaaaattagggattttagctaattttgattcctgatgtattaatgcatatacgatcacataagtctctggctaaagaaagcaacaactctctctctttttcagctattgattgatcatcaaatctaccctttagttttgattatcaagttttaagtttagacaatacaattgtgagattccatgttggatatagatggttaatcagtagatgaagattgtgagagcaagaacttagtttcccaaaaaaaagttgcttgcttcgcatttgcccgatatgcatagtctcacaatgccttattgcagcctcttcttcaagcaagaaatggagctttcattgataggacttcaaaatgcaggaaagacatcacttgttaacgttgttgcagtaagtagtatgcttccccaaaaatcgttccctctttttttctctaaatgactcgttgatggcttccttttgcatttccttgtccagaccggtggatacagtgaagacatgatccctacggtgtgttatactacttttaggtggcgaagtatttgcttgctcttggactaatcgtaaaaaggatgtttactctttcttaggttggtttcaacatgaggaaagtgacaaaaggaagtgtcacgatcaagctttgggatctcggtggtcaacctaggttccgcagcatgtgggaacgttactgccgttctgtttccgcgattgtgtaaatctctcttgaaattagttttcgtactatctttatttaggtttcagatgattaaaactctctgactctgattctgctttcaggtatgtagttgatgctgctgatcctgataacctcagtgtctcgaagagtgaactccatgatttgttgagcaagacgtcgcttaatggtatccctctcctagtccttgggaacaaaatcgacaagcctggagctttgtccaaagaagccctaaccgatgaaatgtaagcctaaaacctaaaacacgacaatggacttggcattttttactttgattctaataatgttttattttccattgtttgccacaggggtctcaagtcactgacagatagagaagtctgttgcttcatgatatcttgcaagaactctaccaacatcgatcaagtcattgattggcttgtaaagcactccaaatcatcgaattaaactttaccccaaaaggagagaagtcaactctctgcagttgtcgatctttcttgtgtttttggtcatttgatgatgatgatggtgattgtggaagaagacacagcttttttcttttatcctgtgaaaaacaagatttgtctatgttctctgtctgattctttatctgtctttcttctgcgtatgtggctgtgttctctgtatattagatttgattggtgttccctcttcttaaagccatgatgagatcacttccttcggggtcagctttttcaattttacgagttcattgcatgttttgaaagaacaacaaaatatgttgcgtttttcgtaattttgaaaaacttgaggccaaaaacggatattttcgaaaaaagcaacaagataaaataaaagatttttccttttactctcacttgcactatcctcctcttcgcaacaatg

SEQ ID NO: 23313 - DNA, 3000 bp, Unknown; identical to SEQ ID NO: 1433
  misc_feature (1)..( 3000): 2750-1469P.txt file - cDNA_ID_2136195; gDNA_ID_1620401; Annot_ID_155971

SEQ ID NO: 23314 - DNA, 3000 bp, Unknown; identical to SEQ ID NO: 1428
  misc_feature (1)..( 3000): 2750-1469P.txt file - cDNA_ID_2136223; gDNA_ID_1620400; Annot_ID_155904

SEQ ID NO: 23315 - DNA, 3000 bp, Unknown; identical to SEQ ID NO: 1419
  misc_feature (1)..( 3000): 2750-1469P.txt file - cDNA_ID_2136231; gDNA_ID_1620400; Annot_ID_155906

SEQ ID NO: 23316 - DNA, 3000 bp, Unknown
  misc_feature (1)..( 3000): 2750-1469P.txt file - cDNA_ID_2136286; gDNA_ID_1620400; Annot_ID_155921
ttctatctctgttactttctccccggtagtgtttagtatttataaaatagtcctagtagttgtacgattttcacaataacttccatatgtgcgagaagctcaaaaacaggcccaagggtatttataattgcaacccctttgaaaaacgtaaattgctttatcaccaataatgtttgataatttataaaataattcaaatagctgtaaggccttacaaataggcccaattgtttttatggcttgtaaactattccccatttttttttggtcgataactatgccccatttgaatacctatttttcttttccacaatttgaatacctattttacatttacatgtgacatcttcttattggatcatacagattacaggctgtgataaagaatggaggatcaactttacatatttttcttttcacaaacaccattttcgggaagacaaaaattccaatataaagaattccaatttcttactatcattgcaagaatgaagattttttagctagataacctaattttccatgactaattagctagatagcctaattccatgtgaaaggtttggttgtgattggtgagatgacaaaaaatatatataactataatgtaacggtaatgttaaactattgttaaaaatagtaaaaaactgtacatggaaaagatggattttatttaaaattttcataataaagctatagttaaaacttatgataaatgaaaatggagtattacaataatattcttcatagattgaaaaaatataaaaaaagataaagataaagttgaagggaattgttaagagttattcttgaaagtagaagaagcgtgtggattggacatgggcttaaagacacacaaattctttctacgaattttgttaatttttgttatatttccttcttcactattccgcttagagcacaacaccacgatgacgaccaaggccatggagagaggatttaaggtttgtctctctctctgctatttcttccctttttggtagaaatttgaaaaaaaatcaatgggaaaatgctgatgaaatgcgaaatatgctcaaacgtgaagctgattctgggttctcaatccatggcgagaaagaggattttggctgaaatgggatatgattacactatcgtggtatgttcaaattgtgattattattgttttgctatggatgttcataacataaattgagtttggctggggattatgttttttttaagactgcagacattgatgagaaagctattaggacagagaagcctgaagatttggttgtggctcttgctgaagccaaggtacataataatactctagggttttgtaatcttgattcaatgtcttttcaatttatgatgatggtaattgttttgactaggcaaatgagattatatcgaaattgggaggtgagagccagtttgcaaaagatcctcaaccaactcttttgattactgcagacactgtatgctttgatgcctcaacactttttgattagaatgttaactttttggtatctttagctgatgttatggtgatggagtttattaggttgttgtgtacaaaggtgttattagagaaaaaccaaccactaaagaagaagctcgtgaatttatcaaaggtttcgtacaagttaactatgtacatgtgttctatgatactataagccacttgtaaggctgatcatggttgtgtttaagcgttttgtttgtaatctacacaggctattccggttcacacggaggagttgtgggatctgttcttgttagaaacttgaaaactggagttaaaaaaggaggatgggacaaagctgaggtacgcagatataaacttttctttctgttttgtcaaattttcttgtggattgaacaatttgtggtgatgtgaatgttgtggtgatgcaggtttatttccatgagataccagaacaagtcattgacggtcttgtaaaacttctaaaaccactcttcttcttactatcgatctcttgaacttagtttgttttgacatataaagtttgtgtgttctattcaatcttcagattgatgatgcaataacttataaggttgctggaggtttaacactggagcatcccctcatttcaccctttatcgattctgtggttagttcccttaatacaaaaagctcgcgtctttgatctacacttgtttgattagttttgtttcagcatatcattaagatagatgttcaaagagatgtttatatgataacactccactaaaaagagttttgttgtaatgttattgtaggtgggaggggttgatacagtcatgggacttcctaaagaactcacagaaaaattcataaacgatgtgttgttgtagctcaagtccctttttgattatgtaggaatacttttgaatctctctaatcaatcatttattttgtaatttggtaaaacacagatttatcgtatcatgtttttaagtagtgatgatgttttcagatttcaaactctcataaagcaattgaaatgtgtcaaagtttttgcagtttaaacaagtttcagacaaatgtggatttttaatgtctgaattacgatttgggccaattcacaatgttaaaggcccatatattggcccaatgactaaggggtaaaactcgcagggttttggagagataccattgaggtttctcttgtccctgttcctcttctaaaacctaaccgccgtttaaaccaccttcggcaccgccattgatatactctactgttttcgtcaaatcgaaggaaccctaatttcgagggcactgaggaagctcaatcaatggctacggtaaaggattcggggtttgaagcccttgagaagcttaaggcaacagagccaccagtttttctagcgccaagttcaatatctgaggatgctcgctctgcatctcagtatctattcatgaagttgaagccgcataaccctaaatgtccatttgatcagctctcttctgatgggtttgatgcggagcagatttggcagcaaattgatatg

SEQ ID NO: 23317 - DNA, 3003 bp, Unknown
  misc_feature (1)..( 3003): 2750-1469P.txt file - cDNA_ID_2136298; gDNA_ID_1620400; Annot_ID_155924
ctccattttcatttatcataagttttaactatagctttattatgaaaattttaaataaaatccatcttttccatgtacagttttttactatttttaacaatagtttaacattaccgttacattatagttatatatattttttgtcatctcaccaatcacaaccaaacctttcacatggaattaggctatctagctaattagtcatggaaaattaggttatctagctaaaaaatcttcattcttgcaatgatagtaagaaattggaattctttatattggaatttttgtcttcccgaaaatggtgtttgtgaaaagaaaaatatgtaaagttgatcctccattctttatcacagcctgtaatctgtatgatccaataagaagatgtcacatgtaaatgtaaaataggtattcaaattgtggaaaagaaaaataggtattcaaatggggcatagttatcgaccaaaaaaaaatggggaatagtttacaagccataaaaacaattgggcctatttgtaaggccttacagctatttgaattattttataaattatcaaacattattggtgataaagcaatttacgtttttcaaaggggttgcaattataaatacccttgggcctgtttttgagcttctcgcacatatggaagttattgtgaaaatcgtacaactactaggactattttataaatactaaacactaccggggagaaagtaacagagatagaacaagtgacatagactctgagtgaaggagttgaaacgtgtatgaccagtggaagaaatgggacgcggtggtgatcggcgcccacgttgtgtatcacgaccatctctacgaacaaacatctcctcaaaacgatgtgttttgatgatgacaaggatgcagccagaggggaagaagttaacattcctgatggctcctctaagaagatggcctagaagaaagaatatgtcttcttcaagaaagctcgaaagctcttcgatattgacgttatacttgactctgatgttcctcaagaaggttccagaatcagcgttgtggtttaccgtttcgccacgaaacagccaaatcaaaatggtttgattgtttcgtgtgtgcagttgcaaaaatgtttgtcatgtctattcaagtctattcatggaaattataagcatttaagactattcagagtctacgtaaagtccaaaagaaaaaaatcaaacgaagcagcctctgaacaagggtaacttcctacccatagaattttagattcttaaatgaatgtttgcttcttttggagtttgtggtctaaactttcgttgaccgtttattgtatatcaaatggtttgtttaatttaagcgagctactagactagtagtttgtgatatagtgtatgtcaattaaggataaacacaaatgttacatttatgtgattgatattctgtttttttctaaaaattgacagaagcgttttagttgtgaacaaatttcaacgtatatgttaactaatgtttaatggtgtgaaagtttgaaatggacgagacgatgtgaggagaatatgaaaccacaattgtttagtctttcgtaactttataaagccaacattccatcaaatgatatttctcctaacacgagatcataaggaataagataaagcaaaagagatgaaggaaaaatgaatgacttccaaagttctcttcgcaaaagtctacgcttactttgattgtgtttcttttgttgtcttgtgctattagtagatggagtccaagatattgcatccatgcttaaaaagatcaagaatacaccacatgtttttgggggaaaagtatattaaagcccaaaagaatgttttggaataagtatatatatattttgatacgatttttgtttcataaatggaaagccaaaaaaatgaaactatcatactaagaagttacatattaatagacgtatcttacatcttcataaactcccaaaaaaccctaaacctaagtgaagaaaatgtgtactagtatgagatgatagatgaacatatttagataagcattaaaaacatgaaaggaaatgtttgtaacaatcaattccaaagaggggtctactacaaacatatataataaacacgagcaaccgtaatgtttgcttccacattcaaaatttcaaaaaggtcgaattattagtgtattgtttttgtttgtttggttttagactgtggatgaacaaatcaatgcattgataattgcacatacttttttcttttctcttgctactcactttacatctgtaaatattgcaataaatttcatatatatatatatatataaatttagaaaaacaccaattaatgtctccttgcagtccacatgggcttcctaaacgtcaaattttcccaattttcagaattaggtgaaacgttattatatctaaaaaacagtctagataatatgtctgccacttaaacaaaaagcagcttcctcttttgtttagttttgatgatttatcaaatgaatatcaataaaaaaaatacgaataaaatcaattaatatactttgtaatatcaattgaaacaatgcattacacattaaaaaagaaatagtaacacataaaaagaaacagtggaaagcagaaaacgagaggggtgtgtatatattactaaagaattagtttaaatgattaacaaatgagtgggatttttgcttctcccaaagcgtaatttatctgaaaatgtgtctcgtgttgagagtagttgagattcttgctgttctccaactaaacattaacttttattaaaattaaagaaaataaaaagatggatcaaaaacgagatcccctttttcgatatccgaataatgtttttctttgcttttaatgtgtctctttcttatgatttaggattccaattccttccctttccccttcttgttctctccatattctcctctttagaaagagatagagagagtcttgtttttttcctgtcttgagtgatatttttttcagagccctgagttgttgtctccattaatg

SEQ ID NO: 23318 - DNA, 3003 bp, Unknown
  misc_feature (1)..( 3003): 2750-1469P.txt file - cDNA_ID_2136302; gDNA_ID_1620400; Annot_ID_155925
gagactttatacgatgttgatttggtagagagaatcttaggccactttctcgacaccttggaacaatccaacaccgccatagtcgaagttgacggaaaatctccgtcgctgatgctcgtcgggaaattaatcgacggatttctcgcggagatcgcatcggacgctaatctcaaatcggataagttctacaatctagccatctcactcccagatcaagctcgtctctatgatgacggactttacagagccgtcgacgtatatctcaaggtataacaataaaattcaatgtgaagagaagatcggagaatttggatctgatttgttttgaaaatttcgttttcttcaataggcgcatccatgggtatcggaagcagagagagagaaaatatgcggcgtgatggattgtcagaaactgacgttggaagcgtgcacacacgccgcgcaaaacgagcggcttccgctacgagccgtcgtacaagttctcttcttcgagcagttacaactccggcacgcgatcgccgggacgttattagctgctcaatcgccgtctacgtcacagtcaacggagccaagaccgtcagcggcaataaggaatctaacgataacggaagaggacggtgatgaagcggaaggagaaagacaggtggacgctgggaaatggaagaagacggttagagagaatcaggtgcttcgcttggatatggatacgatgaggacgcgtgttcatcggttagagagagagtgctcgaacatgaagaaagtgatcgcgaagattgataaggaaggttcatcaccggcgacgacgactgatcggccgagaagttggtcgattaccaaaaaattcggatgtaaattcaagacacaggtctgcgattcacacgaagcaacgatggttgatcatagatcacgacggtcttgaattgttttcgattgattttactctttttagtacagaatcagaaagcatattgttgtgattcttggattttagtttttgttaatccttcgagattcttgctatgcgactgctctacacaaatgtgcatcgttttgagtcttgtactcgaattagtaaaaccagaaatgacatacggcacaaagcccatcgttaaacgtttcgaattgagcccttttctcgacttcctccgaatgggccgtaacaatgggcttcagttgcccttatctatcgtaaactgggcactgttttggagagaaattgtttcatatttgtggaatgtgcgccgttttaacgtaggaaaagagggacgaactactcgctgttcagaatcggtagtaggacttcatgtcgttttataaaggagagttcctaaaaacctaaaccctactttagttctactatataaatcaaccggctttggctgagaagaagccattagcacaatccgagtaccgaatcaaacctaagtctctgtaaatttcctcgttttccgtagatttagttctttgtcatcccatcttattagggttattcgtttaatttcgtttgaatcagttgatactctctgattttccaatatgtgtttgaatcggcatattaatctttgatcgactcgattttgtgtttttagaaaataatttagatttttttagagaaggaaaaatattctcagtgatgaagaaacaatagatgacgagtccgatgaaatccattcataaaatcgtggggacaaacgaggcatttgtctgagaggattatttttcttcgttttagcattctaaaatatctaggttttaggaacgtgtataaaggggatttctcagtgatgaaggaacaatagatgacgagtccgatgaaatccattcattaaatcatggggacaaacgaggcatttgtctgagaggaatcctttttgttcaattagttttgttttaattagacttagcaggaagaagaaaggcatgatgaggattgttttattgtcatctgattcttattgatgaatctatacctcctactcattctgagtgccttctcttgctcttaattttcagtcacagatatcattgcattagtagtcactaaattcggattcaattatattgactctagggaacactacatttcaagtgaatctacagatactctaataatataacacaatctgctaagaccaagtgataaaccaattgaactaacaaaaaaaataagtttatgaaatcataactatttcttgatattaaaaaataacagcaaagatgccaagttcatataacataaggccttcaaggagaaaccataacttgtaatttcaaactgtatactggaaagcagactgtgctcaatgtggttttggataattccctgcatcctagtcctgaagttgaagcaaaacctctagtattggcattcttacatatgatgagttaatttctgagagggacgtacattctgattcaggctctaaaggatcgattaagatttttaatttatcaggaccaaatcagaaaaaatttatatgatttctatctgtatacttagaacagcatccataaaagaaaaatgttgttgaagatcaattggacattggacaaaaacctagtgggccgggccttctttgcatctactacttgaaagccttaaaaaagaaaattaattgaaaattaaattttacatttaagtgttagcatccaaggcccattagctcagttggttagagcgtcgtgctaataacgcgaaggtcgcaggttcgaaacctgcatgggccacctttaatgtttttacaacataacaatttttgattattttatactattatacaggtcagcacccctgactgagacagtatccatatctccacttcagatttcgacacgtggcaacaaaaaaaaccagacactccgattcccacgaaacaaaccaatcaaaatcgttgccttatcccaatcttatctcagcccttttgattattactctttagtctttactttgctcacagctttggatcaccaaaaaaaaaactcaagagagactttgtggccatg

SEQ ID NO: 23319 - DNA, 3003 bp, Unknown
  misc_feature (1)..( 3003): 2750-1469P.txt file - cDNA_ID_2136457; gDNA_ID_1620404; Annot_ID_156059
acattcttctaatttgataattggctcaatatgaaatgcttaatgtatgtcaattttgggccgaaccaccataacattaacactgcttttcttttccaattctcttttggtaagaagtgggttaaattcatctacaaaatgataatgtataacatactctcctcacactgttttgataccaaaaaacatgaaaaaaacatgaaaaagctagcaatagcagagatgcagagtgtttaggtagctcaacatattcattgcggtatccttagataatgatatattactaaaagcaaaatgtttatcttattatatcaagtacagatttaaaagttagtacctcatgagatcatgacacatgacaagtctaacgataagatgtttgtctctgtcattaaagatttaactttatttgtactaggtgatcacccgcgctacgccgtggtttttttggattttttgtattgtttaacttaaatatataaaaaatttatttatctaatcattcactcatgcaataagcaattacttttagtattaaaaatattttttataacaaattctcaccaatgcatcatacacataattcataaacaacgtttgtcttaaaccaatttaatagaggatagtgttggattctagaaacttaagaatttgatggtggagctccttacgtattcctcaccctcaattatttattatataaatatcaatttaggagaatataaatatcaatttttaagagaataacttactcaaatcattaagtaatctacgactattatacactcatactttgagtttggattacaaaaaaaaaatcttcgagtatgagaaaactattataatggttttattgaaaaatcatgtaatattaaaataaatttagtaatagtacaattaaatatgtaaatagaataatatctaaaattaaataataaatatatcattaacctataaattaaaagttgaagagattacattaattatttaatagacacatgggaaatgctaaagtgatgatgtgtcaatcatatggagagagttggccaactttcatatatatgattctcttaaaaaaatagaaaacctaaaaaagtaaacaaatttacatatactaatttttatgtctatatatatataattatttttattaatcaaaaggaaaattaacaaatttgattttacatgttttattggtcaattaaataaatctagaatgtattaatttaaaacaaaatcattagtatgaataataaatcattaaataaagaccactaaagtttaaaataacaaaataatttgatgaaaacttgaatttttatcatttataaaatcttgatttttttattatttgatgaaaatgttaatataaaattttaatgttttatttataagtttgaagtcatttaatatgagtttgacattaggtaaacctaatctatgagattatagaatgtagcaaaactatcaatgtttcttttccaaaatattttgtggtttttctttttggttcattatgttttgttatttgtgaattattttaatatgaagtaattatattgattttatatgatatacatattattttgatataaaatttaacacttatccattaaaatagcatgggcataatcaaaatcgggactattacgatgaaaaagatagttaaattgtatgataaaataaaatgtgtaagattaaaattttgggttttagaaaattactaaacaaaatatagacaaagtatgttgactattatttaaaatttaaatatcatcaataagatatagttaaagtcattaagtgtatagcaaaatgaaaattctaagattaaaattcgattaaaattttttttactaaattaaatatttaaaaatagggattatcatttactatttacaattctaatatcatgggtaaaaattgataactttttttaaacccgcctatctaggtgggcctaacctagtttactaattactatatgattaacttattaccacttttacttcttcttttttggtcaaattactttattgttttttataaagtcaaattactctttgcattgtaaataatagtagtaactaaaatcttaaaacaaaatattcaacctttcccattattggaatggtaatgtcttcaacaccattgaccaacgttaaggaatgtcttttaatatttttggaacctaaatgctaatactgtataccacaatcacttatgagtattgaagttgagatagaggaggtacaaggagaccttatctgcagaagacaaaaagccatttttagcaaaactaaagaaagaaaaaagattgaaacacaaatatgcgccactcgtagtccacccctatctctttggcaaaagccacttcactctttttccctttttatatattaaaaataaagattcttaaggctcttcatattttgctttttgtcaactctttctttgccatctgttacaaacaccaaactctcctgattcatcagttttaagtcttcttcaagtcccaggtaacttcttcttaattgtttcctcttgtgttttgttaactttttttctagcattcttgatctgttgttcttgtcacttgttttgttttctggtaagagaatagaatcttgttgtaataaagttaaactctgtctttcagttgctaatctaagctttggttccagtagatcttagggtccacacattttactaattaatccactctctctactttttaaacatggatcatcacacctttttggtattataatggatctctttgtcttttgcttttaatttaatgtattttggttacttactaatcacctttttgcatagtgaattgggtttagtttaatcaccaatctggtcaagaatctgaatgattcagaccaaagtacaccagcaatctggatgattcagaccaaagtacaaaagtctttagattcttgatttggattttgattgacttttggtttttgatcagggatcatcaatccaatg

SEQ ID NO: 23320 - DNA, 3003 bp, Unknown
  misc_feature (1)..( 3003): 2750-1469P.txt file - cDNA_ID_2136567; gDNA_ID_1620406; Annot_ID_156123
tcggaagttgattctctttaagatgatattatttaggttgactgattgatttgaagtttaatctatccttatgattaggagttttatctagttcgatttgtcattttccttaccaattaacacaacacataaggatacataacataacaaaacgatgcgttttcttaacgggtgtgggattagtcgggtaaatcacaatagcggtataataaacgcggatttgtggttaatctcggtttaatgaccggttcaattggaaacatatttttaaggatgaacttacaatattaagaattatcaaagtttatggtagaaatttaagagacaaaaaaagtgggaggaaaagctgaaaatacaattagtttatggctataaaatcagccaagaacttaaaatttttttgttttaacacaaatttctcttcgacaagttctcatgatttttttcgaagaatacagagagctatgagaacgttatgttttacactgggttcagaaaagcccatccaaggcctgttatcataattggctaacaataaaaagatattccaaaaatggcgcgtgattcattcgcggatgcatataatgcgaaacaaaaacttcattcatgtttgaaagtttgaaaccaaaacaccgtttcttctgctttagagtgtagatcacaagattcaatcaaaacaattaccttaaaacattatttttagagaaaaacaaaaaatttattaaaaaatttatttataaaaaatcttaaaacctttaaatttatatataatatatgaaaaacatgttcaacttatagttataacattaaaacatacgaaccaaaacgaccggatactatatccgatttgttttcaatatatttaaatttaacacttaaaattaccataaaacatgttgacttatgacaccacaaaacttgtgaaatgttgaattttctaactagtttacatcaaaaataaaaatttaacacttaaaaaaaaaagatatcatttttaaaaaacatcaagtgctaaaaaattaattatgtgtaaaccatattaaacctaaaacacctattaatctattatggtttgaatgttatatatctaactagtttacacaaaaattaaaattttaacatataaaagaaaaagaaaaaatgataaaaccttttaaataaaaccaagtgctaaaactttaattatgtgtaaaccaaattaaacctacaacacctcttaggggtttggatgatgtgtctaattagtttacacaaaaattaaaaatttaacctttaaaaaaataaaaataaaaacctttttaaaaaaacaagtgctaaaactttaattatgtataaaccaaattaaacctaaaacacttcttaggggtttggatgatgtatctaattagtttacaccaaaattaaaattttaacacttgaacaaaaagacaaaacattataaaaaaaaccaagtgctaaaaatttaattatgtgtaaaccatattaaatttagaacacctcttaggagtttggaccatggttaaatggcgggatccaaaattcagatttcacaacatcatattaatttaatatttataaaactttaaaaaaaaaaaaaaaatcaaaaacaaaagagttaaaaactttttaacaaaagaaaataaaaagtaaatgttaaatataaagatgtgaaaacatgttggatttgtggaatcgctaatgaccatggttaaatggcgggatccaaaattcgtttagatttcacaacttcatattaacttagtatttataatacgttttaagaaaaaagagataaaatagaaagagttgaaaactttataaaaaaaaataaaaaaaatgctaaatatacatgaagatgtgaaaaacatgttggatttgtggaatcgctaatgaatgacctaaatgccgggatccaaaatctggttagatttcacaacgtcatattaattattaatttagtatttataatacgttaaaaaaaaaaagttgaaaatcttataagaaaaaaaataatctaaatatacatgaagatgaaatgtgaaaaacatgttggatttgtggaatcgctaatgaccacggttaaatggcgggatccaaaatccggttagaattcacaacgtcatattaatttagtatttatagaacctttaaaaaaaagaaaaaaaatagaaagagacgaaaaccattttcaacaaaagtttataaaaaaaaatgctaaacatacatgaagatgtgaaaacatgttggatttgtggaatcgctaatgaccacagttaaatggcgggatccaaaatccggttagatttcacaacgtcatattaatttagaatttatgatacctttaaattaagaaaataaaataaaaataaatgctaaatatacatgaagatgtgaaaaacatgttggatttatggaatcgctaataaccacggttaaatggcgggatccaaaatccggttagatttcacaacgtcatattaatttagtatttatataaaatacctttaaaaaaagaaaaaaaaaaagtttaaaaccttttaacaaaagaaaataaaaaataaatgctaaatatacatgaaaatgtgaaaaacatgttggattattggaatcgctaatgaccacggttaaatggcagaatccaaaatccggttagatttcacaacatcatattaatttagtatttatatagtacctttaaaaaaaaaaggaaaaaaaatgttgaaaaccttttaacaaaagaaaaaataaataaatgctaaatatacatgaagatgtgaaaaacatgttggattattggaatcgctaatgaccacggttaaatgacgagattcaaaatccggttagatttcacaacgtcatattaatttagtatttataatacctttaaaaatagaaaaaaagaaagaaaaaagttgaaaaccttttaacaaaataaaataaaaaataaatgctaaatatatatgaaaatgtaaaaaacatgttggattattggaatcgctaatg

SEQ ID NO: 23321 - DNA, 3000 bp, Unknown; identical to SEQ ID NO: 1467
  misc_feature (1)..( 3000): 2750-1469P.txt file - cDNA_ID_2136569; gDNA_ID_1620406; Annot_ID_156124

SEQ ID NO: 23322 - DNA, 3000 bp, Unknown; identical to SEQ ID NO: 1468
  misc_feature (1)..( 3000): 2750-1469P.txt file - cDNA_ID_2136573; gDNA_ID_1620406; Annot_ID_156125

SEQ ID NO: 23323 - DNA, 3000 bp, Unknown; identical to SEQ ID NO: 1471
  misc_feature (1)..( 3000): 2750-1469P.txt file - cDNA_ID_2136597; gDNA_ID_1620407; Annot_ID_156141

SEQ ID NO: 23324 - DNA, 3000 bp, Unknown; identical to SEQ ID NO: 1481
  misc_feature (1)..( 3000): 2750-1469P.txt file - cDNA_ID_2136607; gDNA_ID_1620407; Annot_ID_156146

SEQ ID NO: 23325 - DNA, 3003 bp, Unknown
  misc_feature (1)..( 3003): 2750-1469P.txt file - cDNA_ID_2136622; gDNA_ID_1620407; Annot_ID_156150
tacaacgaaatccaacaacttctacagatgattactaagaagacgcctcaagatccgagtaaagtgtcgtcacatattcgcgacggtatcaattctgatcccaaaacttggaaactttgtttgatttcctccttctcttatctcaaagtttttgtattttgcagatcttgacatggtgtttgtgttggaggaagttggacactcgtgcgacttgtgccagagagatcttgctaaggatccagaacggcctaatgcttccttgagtggcttacaagaggcgtgcgtgctgtcttgtggtcatgtctaccacttcaagtgtttgagaggaaccactcttgatattgataaccattctaaagatccttcttgcattttctgcattagctgttagctactccaactgaatcaacctacactatatcatcccatgtggattcaactttaggtacttctaccattcaatgtctactagatctacgagagatttaacagttttgtcttaacaatgccaatggagttacttacaaataccagagatttactctgaaatcaatcaattttctttttacatccctgaaaagtttaagtaactttacatatggaaaactagaaccacgccgcatggtagcttctaaagccagaagtgaatcattgcctgttcaagaaacaaaaaacatgtttatagttccaaatatcattcaggtatcccttactaagtagcaagaacattcattacctcttgaattgagttaaggactagatcctcttcgggattggacacaggtttagattgatgatgcagttctgatcttaagcttctcatctctgactgcattacattgagctgttctcgaatctcctttagcaaactcaaatgttctcccttgatgctcgtatctcttggcggcttactcacttttctatcgtaattactagtcaccatcttgcctctaacctgtgagattttttccatctattagtaacctgatcaaatgtcttaaacaaaagatttagttcactaaaaataatgacttacatttctttcttcggcttcctcttcttccgagatgattgtaagactttctttcgtcctaggaacctcgaagatgtcttgaacattcttcggagacagaatcggagtctctaaagaagcatcttttacagagaatctttcagggttcttcatcatctccataatcgaactaacatcactcttagctgactcaagtatagtattgctaacttgtgacaccaacgcatgtgaaattgactcacgcctaatcaaagggaatttagatgccttctgagtatctctagagtctgaaatctctctaacatgctcatctattctcctaatctgttcccaatacgcattcaagtcttcacgaggagatacagaactactctctacaagacctttcttctcctcaaagctttcaccattaacatcagacaaaagtaaacttctttcactagatatgccatcaaatggactctgcaacagaaaagacttatgctttaatctaacaatgtcttcaaaaccatgaaagtagaaagctttatatagccatggccatggaatcagttttttcagttataacaatattgaaaagctttaaattaccgaaagatttctcttcatcttcctcttttgattgccacgagagttttcaccggaaaagatgagagtttcagggaacttattctcaatcacagcaggatcagagcaaccaaggctgagtaatttacatctataagcctgaacctgaaactcaagagacgcaatctccatttccttctgataaatcagatcttcgaaaagcacaagagatgtctcagcatgacacattttctcctccgccattctcttgtactgactagcttccatctccaacgcagctttctcaccttgaagccgtagaatcatcgataaagcctcgcttgcagcagatgaagaagcttcacgttctgcgtcaagttcttgattgatcttttgaagaagctcttgttgtgcccacatcgtttctctgactcctgaggtttctccatttcctcctacccccaaactcatcgttctctccaccattttagatcaaaaatttcttgcttttggttgatctttgatcaatgtgtgatttgttctatgattagaagcaggagaagagagatcagatcgaggatggtttttgattgatgcggcggagggaagcggagaatttaggttgatctccgattaaatgtccaccggagaaatcagatcgacaaggaaagccttaaaagcgaccagatattctcggaagtcccaatcaatagtgggacatattaacgtgtatacgaccactttttgaattgggtaaattaaactatactttataaattataatcatatttgggttaattaaactatacctaattatataatccagccgacacatcgtatttaaagtacgattattttgtttacgttttaaatgatttttattatgtaaataattgtttaaagaattagactgaaaatttggcgggatgagccagacccttgcaatagtgcaacgcatgggagactcgggaaagcccagatagcaagctacctagatgggctttcccccttaaaaaattgagttaatatcgtgtgggccgatggcccacatatcagatattaaactgataagaacagatactacacttgatcttagccaaaaggccgagaaaggtatgagttgcttaatctagtggcctctttatttataatactacttatttctcacatctaaatatactaaatcagcagtcacttttccaataactgatgcatttagtgattgacacatcagcttattactatttttttattctttcattttcacgcaggatttttatgtgtcgtttttagttaactttgtttctttctcaaacgattttctctttcatccccacgatctccacatctccactttctctcttccaaaaactccatgactactgtgtaaaatctcaaagatg

SEQ ID NO: 23326 - DNA, 3003 bp, Unknown
  misc_feature (1)..( 3003): 2750-1469P.txt file - cDNA_ID_2136632; gDNA_ID_1620407; Annot_ID_156153
gatgagggattgagtgttgggacgatcggaggaggaacaaggtttgtagaagtagagagtgcccatgtgaagtctcacttgaatcaagtctaaattggaaagccatagattgtgtgtgggtgtttcttcagctggcttcacgatcgtagcttgcttcacccgaatcttcatttgatccacgatcactaaaaggcaatggctttaaagacagaacacgacttgattagcatgacctgatctgctgatcagtttaccggaaagtggagactgataaagaagaaaaagaatataaaaaggctctttttttttgtcgacaatataaaaatgctaccacctcaaaagaaataagagatgaaaaacaagaaatttgagcactagacgcaaccactccatgaattgttgagaatgggtacaatcataattcaaaagtgataaagagaaatctttacaaagacagatacctaaaaaccccatgataaactcaacttacaataacagcaaagctttacaaaaaagccacagcttattgtctttgatgaacaaagagagtgattggctcagtaaggaacaagaacacgaacggaaggtggaccagatctcatatcttcaagtaacagatcaagaagcgcctttgctataggaccttcttttcctgagtcagacagaaagaaacccatctttaatcagccaatctatccatcatgtaagtaattaaaagtgaggcttttaaaatgtttatatgataatcttacttaccttcaccaataaattcttcatcccattgaatcacaggtctgatcggaattccactaccaataagcatcatctcatctgctttctttccatcttcgactgtcacatccattactttcacagttttaagaatccccttgcttacaagctgttcagcgagtgtaagtgttctctttgctgtacatccgctcaaaacgttatcaaaccgcggcatcacaagctccttaccaccattaacaacaaacgccacattcatgttcgggccttctgcaataaacccatctttacacacccaaatacctgcataagctcctttggcctcagcttccatttgtgagagtacgttagggaggtagttaacacttttcaccgtggcaaactctggaggctttatggggatggacgaggtcactaccttgacacctattgggttaatggcgaagttcgtttttataacaatggcatagagagttggtttgagacattgagatggagataggaggaaatcccctggccctgcagagagccagtatcttagagatccatctctacatccagaaacgctcacggtttgaatgagaattcttttaatagtttctcgatcgaatggaagtgggatcttagccattgatgcagatcgcaagatacggtcaaggtgctgatccaattcataaaggtatctgcttattcgtaggacaacaagcgaagctcagatgattgagtaataagacaaattagaaaagggggctactatttaaagtgactaacccattgatgatcagggcagtgtcaaagactccatgaccacggtgaaccatgtgatcatccaatggaagaaccatcgctgctggatcggttgtaattccatcaacaacacttgagtacatggccaagaactgttgtcctcctcttgctagttttagcctctcaccaaccttttaaaccaaacatacttcactgatactcaatcaatcaacgcctctaaacataaacggataacaaacaaatgtcgcaatccttcattacgggctgcatctataatttcattgacaaaacacagaaatgtctggtggttgtgtcaataaacatctctagctaacaaattgtgaacagtttcaagagttaaagatatgattgataagtacagacataaaagagaaaccataattacctcatagctagataaaacaggaacattccacgactgagagcttgaatctgtggagaaacgaatgcagatttttgtcatcaattccagaacacttatggaatttaacgatcaacaaattgatctcttttttagggtaataagtgtacattaccctaaaaagattataataaatgcatcaccaatcacaatccagaagaaaaatcagaaaagagagaacacaaggtagaaatgtcgaaccagaacacatgagaatcgttcttcttcgtgtcaaccgacgcgggaatcgaaagccatgtcttaaaggacatggaacttgagagagagacctgagattccaagtgttaactgtaaactccagcgacaaacctgccatggggtttgggactcaaaagaatagagagagagagatcattcggaaatagcaacttgctttgcattattattatctcagtcgtgaactggaagaagacgaaaaaatatttgggcctaacttcaccacaaaaataaaataaagttattcggcccataagcccaatatgacttttcgcattgtattttaatattcaatcaatcaaaaataaaagcctaaaacaaaacaaaccctctctgtcttttagtgggttttgtacgacgcctaatcgatgttagtattatatctgtagccaaacaagccaccaaagtggtatttttcttcttccttccttaccttgtagggctctgagctcgagttataaaaaagccaactttgatttctttgccagtatttcatccttaatccattcttgtggtcactttttcgtccttaacccatctaggtaagtcgatttcattgtttgttatttgagtcagtaatttttgaaaatctttgcttttttttcttttcttttgaatatcaaaagaagaaaagatttgggggataactagatcatctctttagttaaattgactctttgaggtgtgtcaattgtcactgatagtctgattaatcttttattggcatcttagaacagattttgattctaaagtcttgtgaatcggcagcggaagaagagtgaattgttcatccttatcttgccatg

SEQ ID NO: 23327 - DNA, 3003 bp, Unknown
  misc_feature (1)..( 3003): 2750-1469P.txt file - cDNA_ID_2136636; gDNA_ID_1620407; Annot_ID_156154
gcaagtcgcttctctgagccagactctcgtgattggcgtagccgttctactcaacctccaccctctggggaggaaaggtcgtgggataatcttcgtgaagctaaagattccaggtatgttgaagcaagtcaatataatcgtcaagaccaacctaattcccagttttcaagggcaaacatatcatccaaccaaggggtaattgatcaatagatgaatgtttttccctcttcttagccctttacattctggcatgatttcttatttttcttacttatttgtatatcgtgtggaaccagggtggaccagctcctgtcctcgtcaaagccgaagttccttggtcagctagaagaggaaacctttctgaaaatgatcgtgttctgaagactgtgaaagggtaatgccgttgtgacagttattagttgtctagacttttgtataactttcctttactgccaacatgaaatctttaaaatagactatgcacacttacaaagatatacttttcttgtccaggatactgaacaagctaacccctgaaaagtatgaccttctcaagggccaacttattgaatctggcatcacatctgctgatatcctgaaggtgtatgctatgtctcaagcatagatgaagtcttgtttgaatcatctaggctgtttgtgtggctaacccgtgttcttttctttcatttgtagggtgtgattacccttatttttgacaaagctgtccttgagccgaccttttgccctatgtatgcaaaattgtgctctgatatcaacgaccagctgcccaccttcccacctgcagagcctggggataaggagattacatttaagagggttctactgaatatctgtcaagaggcatttgagggcgcttctcagttgagggaggagcttagacagatgagtgctccagatcaggaggctgagcggaatgacaaagaaaaattgttgaagctcaagactctaggaaatattcgtttgattggtgagcttttgaagcagaagatggtcccagaaaagattgttcatcacattgttcaggttaacacctataagcttacacattttcttagacttcttttattttggtatctagcattaacctttcttaatttgttctgtgcacaggagcttctgggggccgatgagaaagtttgtccagccgaggaaaatgtcgaagctatttgtcatttcttcaaaactattggcaaacaacttgacggaaacgtgaagtcaaaacggattaatgatgtatatttcaaacgcctacaggctctgtcaaagaatcctcagttggaactgcgtctgagattcatggttcagaatatcatcgacatgcgctccaatggctgggttccaaggcgggaagaggtattctaggttttacaaggttgagacttgtttcctgctccattgtgtagtgattctaatgttctatttacattactcgtgcagatgaaagcaagaactataaccgaaatacatactgaggcagagaagaatcttggtctccgaccaggtgccactgcaaatatgagaaggggtatggtttctagtggtgggcctgtgagccctggccctgtctaccctggtgggcgacctggtgcgggtggcttgatgcctggtatgcctgggacgcgaaggatgcctgggatgcccggagtggacaatgataactgggaggtaccccggacaagatcaatgtctagacgcgatgggccaggacctctacattctccagcagtgagcaagtcggcctcaatgaacacgaggctcttacctcaaggcagcagtggcattatgagtggcaagacaagcgcactgttgcagggaagtggttcagtgtcgcgtccagttaccgtgtcagcagaacggccagcacagtcagttgcacctctgaccgtaccagttccggtggagaaaccacagcctagtggtcccaagttgagcgaagaagtgctccaaagaaaaacaaagtcgcttctcgaggaatatttcaatgtccgactacttggtgaagctctgcagtgtgtagaggagcttggtttgccgtcatatcacccagagtttgtgaaggaagcaatatccctgtctcttgagaaaagcccgcctgtcgttgagccaattgctacactcttggagtatttgttatcaaagaaggtagtcgcacccaaggatcttgaaactgggttcttgctctacggtgctatgttggacgacattggaattgatcttcctaaggcaccaaacaattttggtgagattgtgggaaagctgattctggctggtggtgtggatttcaaattggttagagaaattatagggaagatggaagacgataggttccagaagatggtggtcgatgcagctgtacgcattgtggagtcaagcgagcaggggaagtccttgttggcctcacaggctgcagacatagaggcttgtcggaatctgtaaaaggaatcattacttgacgattttgctctctctgggtcttatgcttgtgcgatgaatgttgtgttgtaagcttgaaggaggaggagaaaaggattctcagaactcaaaaatagttttgctcttcgttgaagctttttcttatgacattattctcaccactcttctttgtgggcatgagtccatgtccttttttgtattcttctgtgacttgtctttttttgacctttgcatttttgttttacggtctcagttattatattcagttgattgttgttgagacttgagacccctataaactggtcggttcagataattacattggaaatgtttgatcatcgtcttcctattattcctatctgattctgagctaacattagttgagtaaatgattcattcgaccttaagctttatcaagtttgatcaatgggcctgagtgggctttgtaaagcgtcacaaaaactctcccgcgcaggacagagaatcattagttattatcctgaaaactaaaatacttttttttttttttttcaattttaaacaaaaatg

SEQ ID NO: 23328 - DNA, 3000 bp, Unknown; identical to SEQ ID NO: 1473
  misc_feature (1)..( 3000): 2750-1469P.txt file - cDNA_ID_2136648; gDNA_ID_1620407; Annot_ID_156157

SEQ ID NO: 23329 - DNA, 3003 bp, Unknown
  misc_feature (1)..( 3003): 2750-1469P.txt file - cDNA_ID_2136652; gDNA_ID_1620407; Annot_ID_156158
ctcctgcaccgaaacgctatcttcgtcatcgatgcgtctgtcacgttaggactgcttctaatggcaagaacctgtagattcgggcatctattgatatgtccaaaatcagactcgtagccatagaaaattccaaaatagaggatatcacaaactcaatcacgatcttgataagaaagatatttacctatcggctgcgtaagagagagcgtggtcgctgcaatggcggacgcggatcttagtgagaccaccttcgctccaatcaacgactgatcgtagcattaagtctaccttctgctcgaactcaggggaccacaagtgagtcgactcgggataggaatcgaaccatggctccagatcgaagatagaccagagatacggatctctgcaaacagttagccacgatttttggacgaacatcggaccggtccatagctcctgaatcgtaagccttgaaatgatgttgatgagtatctctggagccaatccgccccaatcagacccgtcttcttccataaagattcttgttttgttttcaaagatcggttctttgtgttcggtaataatgtagtttaaagttacacgaaacgtgtctctttagacacgtgtcaatgcatctgaccgttaattttgttccttgacttttggatcacttccataaatgtcgtttgctgacacatgtttcggtatagaaatgtcacgtttgcaataagccaccattggataaggtttttaagttttcaagtcacaattggatatgttgttcaatcaagataagtaaataagcaagctaactttgatgtgaagctatgttacaacaagatctatgaggaggaacaaaaggttccgtcttcttattttagactctgagagctgcgacaggatcttgccatgaaattttcctcttatttgatccgtttccgccattcctgcaagaagatggcttcacatctttctgctgcatctcaatgctactgatcattaatctcttacatgaattactttcttcaactctcgtgttctcttgattattgtccactgcctctgtttcttgctcttcttctccctatataaatcaatttatgagtaaagacatgtttggtttctaagtctcttcacaatctgattaagagtgaaaaatgtgcttacagatatctgatttagatcaaacaaaggaactcttctcttaggactggttttggtttcatcgtgagccttttccgagtggtttaagtcaggaagcgaaacatgcttagtttccgcctcacttttgttactaggagacacttccactcggatcttcttcccaccatttgatcttctgacctttttaatctcttgtggctggtcttgtctcaaatgtctgtatctccgtcgcagaaatctgttaaagaggttataaacgaacgatatattaacaagtgaggaaaacatcaaaggaaaggactaatgatatattttgtcaaggattgaaactgtctttacctgacttcagccattagtgttgcctttctttctcgcactgcctgtaacctttttctcatagcttcggtttcctagtgtatataatcaaccaacacacgttaacaaaagctcataaccaaatgatctcaaagatcagagtatcgagctgataatatgtacacaacaaggttttaaatcctaaaactatgtttaagagttaagactaatagagatttgcataactaactacacatagaaatcttaataagtaattaactttgttaaggaagcagaagcaattaaacttaaaagtttcttctttctattattttaaagaagaaagttgttcctttttccgggttttccgagtagctctgagcccagatcaatctttgagcaaataaaattacattctcagatccagagacaactaaaaccagacccagaaactgaaacttgatctaaaactcaagaaaagagagttcgtaccatatgcaattctccatagtcttgcataaggctatgatgcctaaacctgacctttggatcctcgaaatgattagagttcaagggagtgaaatctccgtgagttggattcatcagatgagtaaattacagaatcacacaaggagagaaagagagagatgaagagcaaaagatgaaaacagaggaaagagagaaatgagaaagaggaaggttctgggtttcgtgtagaagtctaatatcaatgtgaggagaagtcagagaaggacaaagaagcagaaaagaaggacacatcatgttgttgctgttgttgttgttgttgttgttgttgttgtgagaaggaaagaaaagaaaaaagaaaacaaaaattaaaataaaaggcaaaatttgcttttttggatgtgagtgtgttgggttgagacagcagtgatgaagatggaagcagacttatgcaggaaatgggtaatgacttgtggcactaagtaaattgtgtaatgggtcaaagaaaacacataaaagcaacttccttttttaataacattttatcaactagacaactttttttatattaatgggttagtttggttagagaaatcttgaagaaaccaaacctttctgttttgtttcttgtgttccattgtcgtctgtaaatattaagtttatcttcattcaactgggtccattgtatagagaccgatgagaatggaggttgaaatatatttttcagactttttaatataatccctcaagaaaagtcagatggtggaagagaaaaaaaaagattcgccttttagttattacttaaaaaaatacggattttgcagaaaactctgtcttgatttctggaaactggtgcaaggttttagttttcttctatataaaaaaaaaatcttcttattacgtcaattgttaaaagattgccatctcttcacatgcattccatttactctgttaccccaaaaaaaaataaagtttaaggcaatgactttttgcgttcacatcgatgattctagtgtgtttaatgcatcagttagtcagtgaccatcagctgatgcaatg

SEQ ID NO: 23330 - DNA, 3000 bp, Unknown
  misc_feature (1)..( 3000): 2750-1469P.txt file - cDNA_ID_2136706; gDNA_ID_1620406; Annot_ID_156114
taattttttttttccttttctgccagaagatatgagtttgtatcacacaaatcaacgatcaagtgagtacatgttgatagaactggactcatgcaatgccacgtgcatgtgattaaaggagatgcaaactttactgataggataattaacaaaatattataatatgaaaatcaaagcaaatttccattaaaaaattgtttagggacgttattagaacttagaagcaaagcaacctttggcccccatcagtagaccatatctgattatacgatagtataatattatgactatgatacatcatacatatatcatatatatatggacatatgtgattggtgattgagagacgttttgggtcattgtttgcgtcatacgactatgttacttaatcaggcattttaatattcttagaaatatttgtttcttaaagcttattaatatatcacgtcaaaatatatattgtgatatttgtatggcaaaaaataccaccaaatcatattaacatattttcagatctgattctttgttaaagaattcgagtgctttaagaattattcgagaagagattctccataaagaaaagaaagatcatcccaccaaattagaatagtaattagtatatcaaaaacagattaattattaaataagtcaagggatccatgcccctacggctctcggaaaggacttgataggaagtagatcccacatatccacttaggtgtaaaggtgtcatgctttaataagttggatttaacagtgaataattcagataaatatttgttttttaaaaacgaaatgatatcaagtactatatatatacttgttttccaatcgaaaattcgactcctaatagtcgacaaaacaaataaaagactccttaatcgcctcagcctttgacctgtccaaataaaagaagaaatcgactaagcattttggatcgtttttagacatatcgtacttaaaacatttactaatacacgatcattacacaagagtatatgttcggataattctgaaagatcgttttctctttttctaaagaaagcagaaaatatgagaaaattgactagaaaaggtgggctggaaaaagagaataaataaatttatagtacacttctactttttagaatattaatttcgaaatgttttcttgtttctgtcagctattaaattttcatgtatgagataagtgtacaccaaagacaacaaagagaaaagttttgcaggaaccaaaaagagaaagaagtgaaagtacaccaaaggaattggaaactatcacgatttaagattacttcattttcttctctacgtttagtttccttttcgatttatctttatcttttcttgtttttttgtatttacattggaattatttctatttctgtcagacattgtcaatgtcgcactactatgtttaaccccgatttagaaaataatatcacagactacttggttatttcagtattagaaaacaaagttatattttcgaaaataagatttcaaataaacaaaataaaaagatgtgatcaaaaccatcgatcaaatacagtttttccagaatgcttaaatttgaaataatgatgatatgtatatgatcaatgatcaatcgtcgaatgaatgtaaagattaattattatcatgaaatttacaataaactcgttatgttcatgaacgcgacgtaccaggcccatatcatgagaaaaatggaaaagtaactatgggtatagaattttcgttttttctcttcctcatatcaaggcccatatcatgaaactggatacaatagtatgtaattggccttggccttcatttttgggcttgaagcaacttaggctcggaccacaaacttacacaacattttttgacaaatctgaagaaaaaaatgtttgataatatctgaaatattataatacatttagaagttaaaaaatcttgaaaatataaattgtttgataatatctgaaatattataatatttagaattagaaaatactgaacccatggatttgtctaattgattaataattgtaaatataccaatctgtttaaatactaggaaatttcatttgacaaacctgtaagtaattttaaaataatgaatagtgatcagatttatacgtcaatgacacggaccttggagaccactttccacacaaaatccatattttttaacaaaccgacccagcccaccttctcacgaaaaccacctgtaccaacagattaggcacgattttaaaaaaccattaaccaaattttatattattaaagaagatatttaatttatagaaaactattgacccaaccttatccaaaaaccaataccacacgtcaaagccacactatatataccagttgcgttgaataacatctaacatagaaccaaagataaccgaacatcagaggtagataaaccggagataaccgattaaatggcggacatagcgattttggtggcggaggagtacgagaggaggatgaagcatacgacggtgggttcgagatcatcgccggtggaatttgattggtggaagataattccggcgaagatgactatagcttttgacaagatgaagattgagagtttgaagaagaattttgaagctaaatctgagtttgctttagccatctctcatggcttcttctctgcttgattccattttgttcatagctaatttcgtttcttaatttctgttttttttttttgctttttgggaagttttatgtaaatatatgtaaattaatctgtttattttatcaaccgttgaatcaatgacttggtcttctccggcgaatcactgttgagtaaaaaaagataaaaaaaaaaaacaaatctcagggactttgttgcatacgtggacaaacttctggggaagaattctaaaattttaaaacttcatcatcttaatactgtgttgagaaacttcggcgtaatttttgcaattcgacccttatattctggatttctcttttaaatcttttcattcaaaattatataaaatg

SEQ ID NO: 23331 - DNA, 3000 bp, Unknown; identical to SEQ ID NO: 7950
  misc_feature (1)..( 3000): 2750-1469P.txt file - cDNA_ID_2137036; gDNA_ID_1621175; Annot_ID_57322

SEQ ID NO: 23332 - DNA, 3000 bp, Unknown; identical to SEQ ID NO: 7943
  misc_feature (1)..( 3000): 2750-1469P.txt file - cDNA_ID_2137036; gDNA_ID_1621175; Annot_ID_174133

SEQ ID NO: 23333 - DNA, 3000 bp, Unknown; identical to SEQ ID NO: 5181
  misc_feature (1)..( 3000): 2750-1469P.txt file - cDNA_ID_2137078; gDNA_ID_1620768; Annot_ID_167392

SEQ ID NO: 23334 - DNA, 3000 bp, Unknown; identical to SEQ ID NO: 5187
  misc_feature (1)..( 3000): 2750-1469P.txt file - cDNA_ID_2137114; gDNA_ID_1620768; Annot_ID_167407

SEQ ID NO: 23335 - DNA, 3000 bp, Unknown; identical to SEQ ID NO: 5077
  misc_feature (1)..( 3000): 2750-1469P.txt file - cDNA_ID_2137210; gDNA_ID_1620761; Annot_ID_167140

SEQ ID NO: 23336 - DNA, 3003 bp, Unknown
  misc_feature (1)..( 3003): 2750-1469P.txt file - cDNA_ID_2137225; gDNA_ID_1620761; Annot_ID_167145
ggaagcaaatattggagagagccagcaagctcaagttaggttaaattctaattagagaaaaacacagtgtttatagtttagataagcttatcatctctaaaaacttgcattgcttagggaaaggcatgcattttctcacaccagatgctatctgaatgaattatggtcaatgttatggaatacttacagcttatcaaagaaaatatgataaatgacaacttagtgtatgttcatttttgcagagagctgacgaactacttgaggaagtgatactctcatggactcttaatcaactaagagaatgtgagactacagctcagaatttgtgcccgacgtacataaaaactcaagagtacgtcttctcaggaacgagaatatgctggaaatggctattggttctgtgttataaatcttcttccaaacttatgtgcatcatcgttcacaaaccttttctcataatgttgttgcagtataaaattatgtcaaggtccctatgaccctatactgataaaagcatgggaagaatgggatgcaaaacatgggtctgagaatgatcacccagattttccggagaaacaagtcagattcttttcactccattagattttaaggtctgtttatataggatgctaaatgatttgtagaagcaatattcattttctgtgtggtgtttgcttccagtgttatgtcatgtttgttctggaacatggtggcaaagaccttgaaagctttgttcttttgaactttgatgaagcaaggagcttactggttcaggtaagttgtagagtatagattctatttgctgttacagaaattatgtaaaaatgatattttttcttccggttaatggcatgtgtttcacatctaaggccaccgctggcctggctgttgctgaagctgcttttgagttcgagcacagggacctgcactggtaattttagtgtttgatttggtaagtttactacttattagttttctctcgcttgaacttcttattttcatttctcttttcaggggaaacattcttctcagtcgtaataactcggatactctgccttttattcttgagggaaaacaagtttgcatcaaaactttcggagtacagatatccataatcgactttactctttcaagaatcaatacaggtgggtttctgattctcaatactgcgacataatgtaaaccataaggtccaatctaacacttaaacagttaaactaccaataatcatggtgctaatgtgctcaggtgaaaagatactctttctggaccttacttctgatccataccttttcaaaggaccaaaaggagataaacaagtaaggaaaattaattaagttccttattatcccaagagttaagagaaatgtacatttattttaagttttaataacgttattatgcagtcggaaacttaccgaaaaatgaaggcggttactgaagattactgggaaggaaggtaagcgtaacttttccaagccttccttttagttttcatgccgctaatttggaaatttctgcagactagactagaatattaagccacaacattatctttctttctagaaagcatgagactgtgatatgagcattagtacgcaaccaaactgaagtgtgcctaaatgatttgatgattaatttaattgccatgttttgttttgttctttctaacaacagctttgctcgaacaaatgttctctggctaatttatctcgtggatatcttacttaccaagaagtcatttgtaagtttgcaagacacagataattattagttgcatcaactaagaacagcttattgatactcctttcgttcgtgtgtatatgttttaggaacggtcttcaaaacacgaaagagaactacgatcactaaagaagcgaatggagaagtatgaatcagctaaagaggctgtgtcagatcctttcttctcagatatgttgatggaccaaatatcatgaagaatataataaaccccgtaagtgattaaccagaagctctctctcttgtatatttgtttgcctagccacttaaatcaacagtactagctcttgcttcgtaatattatctaaggctccgttatctatataccaatcttgattttcatctcttcaaatgaatccaagaactgatatgttagtcttttcttgtatgtgacaatagtttaatggtagcttttatctatagaaatacttttgaaaccatgaattcttttaagaagaaagtatcaagatctaccaattccacatgggttgtccctacttgcatgaatagatcttcttatctcaagaacaaaagttgtcacatttttattcttgtaatgagggaagaacaatattcaaacgcgtagatgataaaaatgagagatttgctttaaaattaggccaataaactaatccatttaaacagctaacaaaagctttatgttgtctgcttttttgttttttcaaaatctttccgctttgttgatttctttaaatctttgtgggttttgctgagctaagcaaaagatcatccattgtattaattaatctcatgatcttaatctgcagcaccagtgtctcttctttccttttctcctttttggataagagaaataaaaataccaatttgcagcttctttcttgaaaactttggagagctttatgcatatgcttatgtctgaaacggatctgacaaaaatgggtttttctctttcttgttttttttctggctagcataaggtaaaagcttatatctttgcacacaaaaatataaagaacagatgagattagtcagaggccaaatccaaaagacttcatagcaaagtaaacatcttttgcctactttcttctttttttctcacttagtcacttgcatgtagagtacagtcagcatcttctctctttttctcccccaattctctcaagagaatctctaagcttttgttcttcttacaaatcatgtacttataataaacccaagaaagaagaagaagaaaaacaaaaccaatcccaagctgtgatg

SEQ ID NO: 23337 - DNA, 3000 bp, Unknown
  misc_feature (1)..( 3000): 2750-1469P.txt file - cDNA_ID_2137247; gDNA_ID_1620761; Annot_ID_167160
tttacggtccatggtttatcataatggcagaaactcaaacaaatattctatctagtttcatataatctccttcttttaaggtattagaggtaatgcatgattcgtgactatgttgcaagaagtcttggtttcaaacaattagctttggctcaactccatgaagaagcaaacatagttcttcgaacttaacagagatctattagctggccatatgaagtacacttagttttctgttagaagaagcacatggtgtgtgaagtaaaaaataagttatcatgttaattaagtaatcagttttattagacccatacgttaagagtctctcaagttgattattttatctgaaaagtcagataaattagcttacctgttttgaaagcttttagattagatcaacctcgacttcttacctgtctttagtcaactttgaacaaaaaataatatggattatacaagaagacgaatacatgagactatggagctcaaatgcacactgaagatcatcagttattgttccttttttattacagaagacaaatcaaagaagataaaaagatcttccctttagaaaaaaacagaactgtagtaatgaatataaaggaagggtgatgatcatttcttgggttggaacttggatttgatgtgtttaacagttcctggagaagtctgaaaggcttgagccaagatgttgtcaggaacaggaggagtagaaccaaacaaagtagcaccaagagattgagttccaggaagctgactattgaaagctgcaataacagaagcagggacatcaccattgttcttctggaaatggacaagtcctttggggaaagcaaagacatctcctttcttgagagattgagagattagcttattggcagtagtgagaaacccaacgtcaagtgttccttcgaggacgaaaacgacctcagtggcacgtgggtgggtgtgaggtgggtttaagcctcctggtgcgtagtcgatacgagagagggagacaccaagtgtgttgagtcctgggattgtcataacgttagctcctgtgactaaggcaccgaatgtgttgttggtaagacctggtttagctaatccttgtgagaagaaatcggctgatgtgactgtagctgcgtctttgcaagggaagccattgattttgattcctgcaaaaaagaaaaacaagaaagagattagaaattgaatctttttctaggaaaagagatgaaagtaaaggtttttgcaagtaccagagggaagatcagcgacgcagagatcttgaagcatgtcaggatctgcggaggaggagatgaagaaggagacggtggtgaggaggaggaggagagtaagagttggtgaagccattgggattgtggtagtggtggtggtgggactctctctaaacaagtagttgttgagagagaagagaattaatgaattatggtttataaagggaggagaattgaagaattgaagagagggtgacttttctcgttgagggaaaaagcaagcaacatgctgtttttctttcttgcacacatctgtctaagtgaaatgtcaaaggtcaacgaattactaaaacggatggatcagagctttgccaattgaaaatttatgtttacactagttttgcttttacacggtactgatattatttttatttaattattagtggcttataaaaaacaattatcaattattatcacctaataaagtatgtatcaggtaataaatgttgtcttatctgcataaactaattttacttgttggcttctgtattttgatcatcgtgagagaagaatcattatatattaacacgctcgttcatgcctcaccgttaatctgcaacgtccgcgtttcagggttagttcttctcacgcgaatcgtgaagcgcgtgaagctacgcgttgtctttaatgggttgggtttaggtgataatacccgataccgttggtttgggctttttagtgttaaaagcctcatctaatacgacgcgtaatgcattgaagacggaacaacaaatcgttttgaattctttattgcttccttcctatacggcatcgtgtgtttttttttgtttcgaggcaaatttttttttactagtgcatgatgtagagaaaatagaattggttaaatttattagtgaaaagattgattaaattttatttacaagtctttaaacggtaattgaaagcttaatcacaattattgaagacctttccacacttttttgtatgaaatctttgtctagtagctttttgaactcttgcaagcaaaatctgaaatttctttccacttttcaggaccattttttcaaaatgtttgaagattcctgagactttctgttctgcagattttggtgaaaagaaaattggaattatataatgaactctatacttctgactattatatgagtaatagtgtgaatttgaaattaataaaccctattaatataatcttgcaccacttaaataaaagcccaatcacaaaactgacttgttctaaaactagttttaaacctaacctattgatgaaatgaagtgacaacttcatgagtgtcaaatcatccttaaatatatacatgaaaatatacaacgaaagatacaaggtggcagtttcgtgaaaatcttaatttcttaacctaatgatcaatggagcgtaatggaggtttaggccccaaagttgtggtctatcagtcacattcttcagtacgatcttgtgatttacaaatggcaagatcatgaatcatgtccatgatgtatgtactttttctaattaaggaaagaaaatatcttaataaatctctcttatgactatgactggtctttaatgcaattctctctctctcactctctggtcttcaattataattgagtttctatataagaaaaacatatgcatactacaaaagaccaagacggatgctttattttcttggctgcgtatatactgacaactctagtacgtctccataatcatttcattcaaatttcattaagaggagaaatg

SEQ ID NO: 23338 - DNA, 3003 bp, Unknown
  misc_feature (1)..( 3003): 2750-1469P.txt file - cDNA_ID_2137255; gDNA_ID_1620761; Annot_ID_167164
tccgtattaaaaagaacatttaaaatctgttatcgtcactgtaataaacaatgtcaatggttacttatgtataagaagtagaagaagatgacggaaaacaatctttgtcactcttttgcaaggactgatcatcttcttcttcagtttgatgaaccaccggaggacatgaagaaagtttttcataataatcagtccctgcgactctgcaaagcatcctcgagatcaagttctaatccaacacgattccttatagacgcagctgcatgacaagacgacgtcattttaaataacctctccaattccttaaacctctcgcagtcaaacttatgactcttcaacaacttcctctgtctcgacaagaagagcctcttcatgaaatcctgatatgtcggatctctcgaagtcatcaagaaataagcataacccacaatgattccagtcgctgtagcgaagaaagtgattggttccatcacatcccatgagaattcccagaaagttaatctaaaaaagagtccaatttgaaccatcgaagtagctaaaccacaccaaagaatcttcctcacttgtctatgagccaaaacatcaatctcttctttcatgattctcaatttgttgaattcttccttgatttgatcttcctctggattctggtccaaaggcatcgctcttctaatcagatccaccacctgaacaaaacaaaaaagtccagatttttagagaaatcgagacaaaacagagtaaagtgagacaaaacagagtaaagttctgtttttgtgttctaattaagaccttgtctgggtgaagatagactttatcacgaaagatcaagacaacgccagcatcgtcaagaacacgagcaaagacatgagcttcatcgggagatctagcgatacccattccttgagaagcttctaaaagtgtagagtaagagacaacatctctatcagccacaccaacaagcttcttcttcatgtcttcaacattcacaagcctcattagcttcttcgcttccgctatagttatctctttcttcttctcctcttcatcctccgacggtgttttgacggtgacgcagcttcttaatccaccgtgaccaagccatgtcctttgcgaagaagctctaatggcattggacattgccgtacgccttatcaaacccattgaccacattatttgacccacgaatctgaagatcttagctctggatttggtgaaagcgaaattgaataaaagttaggttcacagatcaaacgattaaaagatatgagaatcggagaaagagatggaataatataacgcgcttaattatgattcttctgttattaatatcataagattacacgattaggaaaatcgaagaaaagaaaaaagaggacaagcacgaagccatttgctttttatctatcgaaaagtaaaaagattggtactagccaatggccattgttgacttggcatgaagaatggcttttacgaaaatctcaatcaataagttacaactttttgttaactcaaaaatccacattctaaatttgattttcttgataaagttgtatttattctatccaacaaccatcccgacaaaagaaacagtgaaaatgccgttgttgagacctatccttttcatcggagttgaaattgacgcggaatatatacggatttaggttactttattacccacatgacaaacaaacaacacgtaactgagtttaaaaagagaaaaacacgattagtttacgtaaactcttgtttagtttttcttgtcaaattgtttaggtggaattcctaattacaaatccatattctaggctactagcttgcattcactaatattcgttgtgaaaaactcatatgagcatatatagacatcaccatctttttgcactactatgaaaaacaaaaaacaagtctcattttgattgcatattagaaacgatctaaaacattttcgactaatatattgacatacctggaagtacctgctttcaacagtttgcttatatgataatgtgaatgaagaagacgaaggaaaataagttttagcctttctatccacggcttgagagtttttgcattcttttgaaacgaaagcaataacaactaattatgttctctcttgttttgccctttttctctccttgagaatagtagatttgatcgttatacgaccataagggccaaattctttatttaaacttttttttttggtaattaaaacccaatttcataggaaataaaaactagtacattttaggaccccagctaaatatgatgataattaatgtaaaaatacgacttgggaattcatatgtttttaatgctcgacttttgagctgactttgcaataggcttaccacttccgttaaaggataagtttatgaaattattaaaacataaccaaacaatgacatgacgagttgtatctaagaagagatgcaattaaaaaaacacttaatctaaactaatactacttagttagcctggccatactattattaaagatgttttaatcttatgcaatagtttttttttttgtcaaacaatcttatgtaatagtttaagtttgtcaatttgtcttattaaaacaggaggaactgcacaactctaccaaaaaaaaaaaaagtctcaaagactgtgccaaatcttgcctttatgactccaaagtgcacgtttattcagataaagtattcaaaaaacaaccaaatggaaatgagattagagagcgaggttcagagatgatgggcgactagttgcaaatacaaagtgttgtttaaatgaaaagtgattaattatttatatagatctttattggacccaatgctatcacctcatctcaattatcaagcccatgggttggtctcatcaaagcccaatcaaagcttcccaaacaaaaaggaattaagatgaacaaacaaaaaaaaacacttcggagcaaaagatctggccaccacaacacaacgatcgacgaatacaataggaaaatttgaaatctcgtcgatgaagatg

SEQ ID NO: 23339 - DNA, 3003 bp, Unknown; identical to SEQ ID NO: 20590
  misc_feature (1)..( 3003): 2750-1469P.txt file - cDNA_ID_2137262; gDNA_ID_1620761; Annot_ID_167166

SEQ ID NO: 23340 - DNA, 3000 bp, Unknown; identical to SEQ ID NO: 6100
  misc_feature (1)..( 3000): 2750-1469P.txt file - cDNA_ID_2137737; gDNA_ID_1620844; Annot_ID_170156

SEQ ID NO: 23341 - DNA, 3003 bp, Unknown; identical to SEQ ID NO: 20922
  misc_feature (1)..( 3003): 2750-1469P.txt file - cDNA_ID_2137737; gDNA_ID_2926205; Annot_ID_202162

SEQ ID NO: 23342 - DNA, 3003 bp, Unknown
  misc_feature (1)..( 3003): 2750-1469P.txt file - cDNA_ID_2137741; gDNA_ID_1620844; Annot_ID_170158
atggttcttgtgattgggaggtgtgacacccaaattagatttatcaaactcaatttatatatgtatgtaataattttacaataatccggataatatatcagaatttaaatctatataacaatcaccaaaataaattaaattacactgacaatatgaataaattcaaaaaagtacatactattgtactacaatctattgtcggcagtacataataaatcttaacgttagttctatgggattttgtgttttgtaaaagccaaaagaaccttacaagacttttgcaaataataatatggatacatttgaatctcaatcgttaaacaatttgtaagctttaattcaaaaaacaacagaaaagagtttaacaaaacaaaacatatgaaaggaaaaagagaaatggatttggatgtgaagaaaaaagtggaagaaacatattggctttgtactttaacaaaaagaaaaaaacatattggttttgcttccaaatagtgactgcgttttgcggtacgggaaaagtgcggtgcagttcaaatagtaacgaaaatacatagatatatatatatgtagagattttgatattgttacaacactgttgcgatgcgattttgggtatggtttcggttaccattcatagcctttgtagtagtggctatacaaatctaatcttgatcgttgtgttgctttaattaggaaatacaagggagggaagatataaaaatatatctaaaaggttatttgattgatatcgacatatgaaatttcgaagtatgaacacatgaaagagtgtttacacatttacatatgtatttttcaacacaactagaaaagtttacaagataagatgaatccaagtggatgaaattatctgtcacttgcatatacatacactcaaaatctgaaaagtcagaacttgtgaaatgattaaataaaataaagttcgacacaaaaaagggatgaatcatgtaggtgacgagagacaggtattactgttagtgatgcaatataatcaaagcttagattcaggcccatcctcatcatcatagcctgcggcaacaatcaagaaaacatgttttagattcaaatgcaattttttatttttattttattttcatttccgatgaacaaaaaaatacttaaaagcaactaacttagttacatgctaattttatattgtaaacattttttttatataattaatatgggattaaagaaaattttaaaatagacaaatctagtactcttgtctttgtgcgcaagatattaaggttttgaatggatattgtggttagtgctgactgatccgtcagcggttcaattcatattatttttggggcggacaataaaccgctacaaacttagtttaaagatggtctgcagttagtacacagcgcttttcttttattttcttgaattcgcactattacagagtatagttttgtgagtatagtttgtgaacgataaataaaaagcggtccgatatataaacggttttgtgcgcttggacatgtgtcaccattcaaagcctaagatcattaagtccatgacatgtagacatgtttttttctgcaatatacggcaaacatatttgcttgcgacattctaaacctttgttaagttttgcaccattagatacgataaactcaattctcttggaattaaaccatatatacatggtataaaaacctttagaagagacttctactatacattaagtttttttgtttttattattatagaaagtaatcatttgtgatggagagtgtatggacttgattagtttgggaaaattattcaaaatttcatttcatacaaaatgtggtttagaatttagaaaggtaatttgcaaagcactaaagcagctttaatatatctctttcatgaatttttaaaaaataaaaagatacgattttttttggggaaactaaaatctttgtttttctctcttatctctctttgtgtgtttcaattagtgagaaattagtaactctctttctcactctctctctctctctgtttcaactgtctgtgaatcaactgttcttgatctccagaaacctctacacaaacaaaaggtgcgttcttttgcgttgaaatggctcatatctcaaatcgtttgtttctctttgtgggtttcttgttgttaccatgtttaaggcaaactgtctgatctgctcagacatttagttgtttttcctcttcatcactctgcgctagttttgtttccgaattcttttgagacaatattggtttagtttcttcttactcgattcacactttacgacattggattcctataaagtgatttacttttctctaaaaacggcaactttgttgcttaagaatctctctgttcttcaggatttgcattaacgtctctcgtttcctgaaaggaattgatgatttacgccagtagaatttgaatattgtctatgtggcagatgtaaagaacaagttacaaagagatattcacaagaatccgtctggattcatgtgtgaatagaaatatgagcaaactctgttcttgatctttgtgctttcttttcataaggattcatgttttgtgattcttgtaggtcctactttgattaatttaatcacagggattagtaaacaagtctcagaacatagattaataagatccccaatggtgataaacaatctcaagacagtctttttggtaatacatacctttattctattgctaagatcacatgctagaatttggtctttactacttcttgaggtttatttatctctgtgatcttattgaaactgctgttaaactatctacttaatcatttgtctctattgcttttaggtcatagtccatcgttgaccaagatttgaatccaaggctttcccggagagtatatactagttaacaaaacactcataaaaagctctggcttgaccaaattttctacttaagcataacggtggagatctgtttttttgtgtgtggctatataacaaccttattgtctaggctgggattaaacaatg

SEQ ID NO: 23343 - DNA, 3000 bp, Unknown
  misc_feature (1)..( 3000): 2750-1469P.txt file - cDNA_ID_2137741; gDNA_ID_2926205; Annot_ID_202161
gttcttgtgattgggaggtgtgacacccaaattagatttatcaaactcaatttatatatgtatgtaataattttacaataatccggataatatatcagaatttaaatctatataacaatcaccaaaataaattaaattacactgacaatatgaataaattcaaaaaagtacatactattgtactacaatctattgtcggcagtacataataaatcttaacgttagttctatgggattttgtgttttgtaaaagccaaaagaaccttacaagacttttgcaaataataatatggatacatttgaatctcaatcgttaaacaatttgtaagctttaattcaaaaaacaacagaaaagagtttaacaaaacaaaacatatgaaaggaaaaagagaaatggatttggatgtgaagaaaaaagtggaagaaacatattggctttgtactttaacaaaaagaaaaaaacatattggttttgcttccaaatagtgactgcgttttgcggtacgggaaaagtgcggtgcagttcaaatagtaacgaaaatacatagatatatatatatgtagagattttgatattgttacaacactgttgcgatgcgattttgggtatggtttcggttaccattcatagcctttgtagtagtggctatacaaatctaatcttgatcgttgtgttgctttaattaggaaatacaagggagggaagatataaaaatatatctaaaaggttatttgattgatatcgacatatgaaatttcgaagtatgaacacatgaaagagtgtttacacatttacatatgtatttttcaacacaactagaaaagtttacaagataagatgaatccaagtggatgaaattatctgtcacttgcatatacatacactcaaaatctgaaaagtcagaacttgtgaaatgattaaataaaataaagttcgacacaaaaaagggatgaatcatgtaggtgacgagagacaggtattactgttagtgatgcaatataatcaaagcttagattcaggcccatcctcatcatcatagcctgcggcaacaatcaagaaaacatgttttagattcaaatgcaattttttatttttattttattttcatttccgatgaacaaaaaaatacttaaaagcaactaacttagttacatgctaattttatattgtaaacattttttttatataattaatatgggattaaagaaaattttaaaatagacaaatctagtactcttgtctttgtgcgcaagatattaaggttttgaatggatattgtggttagtgctgactgatccgtcagcggttcaattcatattatttttggggcggacaataaaccgctacaaacttagtttaaagatggtctgcagttagtacacagcgcttttcttttattttcttgaattcgcactattacagagtatagttttgtgagtatagtttgtgaacgataaataaaaagcggtccgatatataaacggttttgtgcgcttggacatgtgtcaccattcaaagcctaagatcattaagtccatgacatgtagacatgtttttttctgcaatatacggcaaacatatttgcttgcgacattctaaacctttgttaagttttgcaccattagatacgataaactcaattctcttggaattaaaccatatatacatggtataaaaacctttagaagagacttctactatacattaagtttttttgtttttattattatagaaagtaatcatttgtgatggagagtgtatggacttgattagtttgggaaaattattcaaaatttcatttcatacaaaatgtggtttagaatttagaaaggtaatttgcaaagcactaaagcagctttaatatatctctttcatgaatttttaaaaaataaaaagatacgattttttttggggaaactaaaatctttgtttttctctcttatctctctttgtgtgtttcaattagtgagaaattagtaactctctttctcactctctctctctctctgtttcaactgtctgtgaatcaactgttcttgatctccagaaacctctacacaaacaaaaggtgcgttcttttgcgttgaaatggctcatatctcaaatcgtttgtttctctttgtgggtttcttgttgttaccatgtttaaggcaaactgtctgatctgctcagacatttagttgtttttcctcttcatcactctgcgctagttttgtttccgaattcttttgagacaatattggtttagtttcttcttactcgattcacactttacgacattggattcctataaagtgatttacttttctctaaaaacggcaactttgttgcttaagaatctctctgttcttcaggatttgcattaacgtctctcgtttcctgaaaggaattgatgatttacgccagtagaatttgaatattgtctatgtggcagatgtaaagaacaagttacaaagagatattcacaagaatccgtctggattcatgtgtgaatagaaatatgagcaaactctgttcttgatctttgtgctttcttttcataaggattcatgttttgtgattcttgtaggtcctactttgattaatttaatcacagggattagtaaacaagtctcagaacatagattaataagatccccaatggtgataaacaatctcaagacagtctttttggtaatacatacctttattctattgctaagatcacatgctagaatttggtctttactacttcttgaggtttatttatctctgtgatcttattgaaactgctgttaaactatctacttaatcatttgtctctattgcttttaggtcatagtccatcgttgaccaagatttgaatccaaggctttcccggagagtatatactagttaacaaaacactcataaaaagctctggcttgaccaaattttctacttaagcataacggtggagatctgtttttttgtgtgtggctatataacaaccttattgtctaggctgggattaaacaatg

SEQ ID NO: 23344 - DNA, 3003 bp, Unknown
  misc_feature (1)..( 3003): 2750-1469P.txt file - cDNA_ID_2137800; gDNA_ID_1620408; Annot_ID_156185
gcattcaatattcatacatgcaaatccaacttaaccacaactaatttcataaaagaaaaaagaaaaaaaagtatatgttttcttctgttacttgttcgtcttgttaacttctaacctacaaatgtagctgctatctgtaaccagcacagttattttccttgattattttatcgtcttcaatttaataatttcggatcgaacttctaactacgactaaaggggatggatctgcgtccaagttggccatacgtgtatatattatacatagaataattcacagacctcatgatttttattttcattttggttataagtttaatatatagatgctatctgtaaccagcacagttaaaaagctcttcttaattaccatattaaacttatatttctgatatagctaggacgcattttcctaatagataattgctttttaaaagaatgtctttttgtaaagagtgtacagaaaagaaggtactaggtaggcggttttgtacatatgacattgacgaatcttttttttctaatgaaaatttattcttaacaatatttatttgatatcaacttgaaaataaatttataagcctttgtgaattctcacagcatatcacgaccacttgaaatttgttttttcttacattttttatatatatgatctcgcataagagagagaacctgtaacgttgttttattcttggtcaagtgtgtattagtggttatgtaaagactaaatagggtatagtcgtatagaattcgtaattgtatatgtgaactatactaatttaataagtgttagtttatatatgtatccatcttttgtcgaggattatatgtatctagtttgtacttacatttacaaaccagaatatttacaaacagtgaaaagtaactttataataaaacatgctcaattctttatatactagaacataaatcaatatatatatatgtagaaattaactaaattaatttcttttaaatgataataatacatttggatcaaaattataacaagctttaaaaatcatttaacattacatataatttggtttaagcaaatagtactgtagcatcatcataagtaatttaacgtagaaaaatgttgtaacatcaaatagtagttcagtgttggtctcttatgctagttctagaggtctttgggctcgtaagtcgtatctacaaagacatttaacaatttgatgagaaacaccttctacttgagccttaaacattatatattgtggtcatgctatgggatacagagaacactcgtcgatgagtggttaatagccttgaagacatcaaattcatcctttctagttgtatggtccctaaaaaatctccagatcagattaaaaataataataataataattgcatgccttagacttgatcggaatgagattgatgaaaaatttggagttctatacttcgaaggataatcacgcatttcataaaattagttgattatatgttcttcaattcaatcagagactccaactagatcgccattcgattaaggaccataatcaaatagtctctgatagagtctatgctggaattgaagtacatataatcaaccatagagatgagttggagatatacttacggagccttaggaagattgccaactctaaaaataaatataagttcctaaagtgggcatgtagtatgagaacgaagaccatatgaacatatgaggtaaaattcgggcggccatcaccaatcaatgttcaaattttcaaatgctcgagagatacgtcagtacctctcggaacaagctctcgtgttagggcagtaggtgctttagggctttgaaaagtggagtcatgggtgctaatgaatttgatatttcatccgccttacgttcacggaccacgaatgtatataccatcatatcattgtgagaaactatgccgcattatcaacgactttttggaagttgagatatatatccatcaatgaaacttattatggtttctattcaatgctacaagaattgactaattataatgccaaatacagtattgaagtcgcaaggatcatactacaaaatgtgtccataataataacgttttttttcgtaatccataataataacgtttataaattatagtgttagttgttaacatctaaccgtaaatacaaccaactttaacaaaattttttttactatatcggttaattgactcttgtataagttaatatatatccaatgaataacgccatagacttcaaaaattcaaacgtatatatttaaaatctgagaatatctcctcaagaacagtgttaacatctaatcgtagatacaaccaactctaaccaaaaaaatgacatatatcggttaattggctcttaagtaagttaatatccaatgaataacgccatagatttccataaatctgagatgatctctgcaagaacggaggtttttttttggtcaataagaagaacaagtttatgtactaaaatgttcctttagaaagaagtgaacaagttggagaccgtgcttgtaaaaccccttatacaatagtagactttctttcatttaagaaatttaaaaatgattccaaataaaataaaataaataataaactttgacattcatgtaaaattttacgtcgatattgtaaaacaattacatatttattagcaaatatctctcaacgtcaaaggcccggcaaacaattcctaatctccgcccgttacggtgcaacacacaaaatgataattgaattactatttttttataactatattacgttaaatgatttattaatataaaaaaacgtaatttaatgttccattaaacaactatataaaccaacttagcgaccacttaagcatttcccttactatttacgttctcttctttctcctccgacacactccaaaactcataaatctatctgatgcgaatttgactaactctttcgtaattcaggatcttactacaaatctttaactcaccaatcttcttcttattcaaagattagagagaaaatg

SEQ ID NO: 23345 - DNA, 3000 bp, Unknown; identical to SEQ ID NO: 1496
  misc_feature (1)..( 3000): 2750-1469P.txt file - cDNA_ID_2137810; gDNA_ID_1620408; Annot_ID_156187

SEQ ID NO: 23346 - DNA, 3003 bp, Unknown
  misc_feature (1)..( 3003): 2750-1469P.txt file - cDNA_ID_2137814; gDNA_ID_1620408; Annot_ID_156188
ccattgagaatttggtggattgaggtcaaaataatagcaaagagtttcacaaaagcattgatggtaaacttttgtattttgccattgtagttgtctttttttttttgtaagacgacactgcctaagatttttcttgacccctctcattctgcgcatagatcaccattgaggtcgctaagccgtactgtgtaatttgctttggctaactaattgaagttgagccaattatgaaaagaaaatgttaaatatcaccataacaatcatctgcagtctttacgcctaaaagccaaaagactagaaaaaaccctcccatagatggtttctttgtattatccagagaactcttgaagcaaaatcgttaaagaacggagaccggatcatagctcgtcatttccatatccctcatcatcttcatcccctccgtattcttcaccaccagctggtttttcatttaccgcaataagctctgtgtcaaagatcagtgttgcaccacctgaagtttgcaaggttgtttttagttataatgtcgaaatcccgtatttttttcacaaacatgaatacacattttaaaagcttattgatgaagcgtatttataccggggatagtaggtggagagccttgttctccatatccaagtttagcaggtatctttaacttcctcttctcacctacacacgctcctagcaaaccttgatcccaacctgcaacaaaaccgaaaattaccattgaaggaattaagaaaatgttaaaagaaaagagatactcaaaagccaaaagcaagtcactacctttgataacctgaccacttcctaatttaaactcaaacggatcacccctttcaaaactcgaatcgaatacagttccatcagtaagtttcccctgccacataacaacactaagttacacaacaacaaaaacaacaataaacatttcttcatgacaataatgaatcccaattttgttataagatctagcaaaaacttaccctatagtgcaccttgatcgtatcacctttgtgagcctgaacttcacatgtttttggcttaaactgcaaaaaaaagaaactctttattatctctgaatccaatcaagaaccctaagtatcttacaaatttgttgacaagatcacacttgtcaaatccaaaagactccaactaaaccaaatggtcaaaagacaaaccaaaacagaacacagcacaatcaaaaccagatccaaattcacattccagaaaacaacaatgaataaaccaatattatagctagaaacagtatacgagatcgttcatttcctgatcggaaaatataaaaattaccttgacaccgatctgcaattccgacacatctccggtcttcttggcaaaacctataaacagatccaattacaaggaattagattggaaacaaagagatcatgattttagcacattcaataatgagaaagaaagatgaatggagaaccttggagtgaaatgagagagaagaagatcaaaaagagagagtaacggagactcatcttgctcgccataatcgcttctcagttctcactcttcagttttttccttttcttcagtgtatagaggtaatcttattgggcctaggtaggcctgtggggttctgcatttttgtaaaagcccatcttttatctctacaagcaaagttgaaaatttcggtttaagagttttatcatttcactacgttagagtcttatatttctactagcaaagttgaaaatttcggtaagagttttcatttcatttcatttctttctaaatctactcaagagtgttcactatggtggttacaccggtatgcaaagagttatttaacgagcaagaagacaactacattatctcttaattatattagaatgtttcgcatgcatctaattgtagtttaagttgctgtaatgttttacaaataaaagttttattttataatttcacggtttaatatctttgtttaatatagaagaggaagcaaacaaagatgagaagctcacacaatctcatttgaagatttatgtcactatttaaagttatagaaaaaaacagttaatctctattattattatcatattctattctaattttttttctagtatgtcacatattatttaaaagatgagatgagtgtaatttttttttttttttaataataatatagactgcggtacaaatatctagtaacaaaaatatttatggttttttaaccattgtgattttatttagaatatcttataatattatgggacaaatgaagaatcttttaatttttaactaactaagctaaaattttaatttatatctcagaaaatgattcttcatatttttgaattcgaaaattctagcttgatgaaaaaccaaaagccatttcgactaaattcaaagaaaattacaaccaataagactttcatagtttaatgttacaattaatatccaaagaaatttattaaaatgaaaaagtttttaaggtgatccttgaagagtttttatattacccaaataaacgtcgctttactttactagtcaacttacaaaatcagcattaaccacacaaagcaataaacaaaaaagattttttaccatttgcttaccttatccaaatctgctcccactgactcttccttcaatcttctcctctgtaatctcttcacaatcccaaaaaatctcacaatcgttttttgcttatctctttcaatggacacctctctctcccaccacggatctctcccgtttcccccatcgcgccgcaatttcgttaaacaaaaccgcggcggcgattgcgtttttctcccctcgcgtcgtaagttccgatacgattcgttggtggtggtttccgctgcgtcttcgggacagagcatcgacgcgcctctagttccacggtcgcctcagggaaggtttctaagttccgtcttggtgaaaaaacggcagctctttcatttcgccgtcgctgatttgcttaaacagctcgctgatgataaggaagcttccttatctcgtatg

SEQ ID NO: 23347 - DNA, 3003 bp, Unknown
  misc_feature (1)..( 3003): 2750-1469P.txt file - cDNA_ID_2137818; gDNA_ID_1620408; Annot_ID_156189
tgtaaaattgcagaatccagaaatgtttgaatctttggttgaatccagaaattatgctaatcaatggtttattagtgttggttatcactatggaatggttgtttctgttttatgttctatgatctggcttttatatggagactgattaacgtatttgaatcgatgttttgcagaaggatagctcaacttaaggagagtgattgccaaattgcaattgaagacataatgtacatgttgatcttgtacaaattctcagagataagagtgcctcttgttccaaagcttcccagttgcatttacaacggaagactcgagatctcgccttcgaaagactgggaacttgagtcaatccatagctttgacgttcttgaactcatcaaagaacatagtaacgcagtcatcagtttaagagtgaattcgagtttgactgacgattgtgcgacaacggagatagataagaatcgtctcagtaaagtatacacagcttcggtcttatatggatactttttaaaatctgcttctcttagacaccaactcgaatgctcattatcacaacaccatggaagtttcactaagcaactgaggcattacatttctgagttcgatcccaagatattgcggagatgcgcaaaaccaaggtcacatgaagcaaaaagcctgatagaaaagcagagtttagctctttttggtcctgaggaaagcagcaaagagagcattgtgacatcgttttctagcctgaagaggttgcttcttgaggctgtggcgtttggtacgtttctatgggacacagaggagtatgtagatggcgcgtttaagctcaaggagaatgagaatgcagaggaagaaacaaatagcagtgtttgaagtatgtatgaaccagtttgctagaagaaaacttgaatatcttttttggtggacattgcatataatatatagattaaatcagggtcaatggctatatgaaattatttttgtctatagtttgagtaatcatatgtatagtgtataatggatgatttaatagagagattggttttgtcattttatatatccatcaatatattgcaacttcagaggaaaagaaaatagttaaaaaccacatttattctaggtgtctctcatatttgaccagtttctcatctctcatcaattttcacttgtggacgcatgttagttaattgaaaataaaaagacaaaatttatatgtaaatgcagtatactgtatactgaatatagtaattatgtttttagttactactccttatgtttcacaaaaagtatcattttacaatttttaacacaaattaaaaaaacatctaaaaatttcttttacctattgtaatacactttttatttttaattaataattgaaaaaacagaaataaaacagatatttgattttaaaaacggcatcgaaaacacaaaacaacaatctttgttaaacaaaacaaaaaaatcttaaaacgatattttttgtgaaacagatgaagtattttaaattaaaaattgtaaattaaagtttatagttttttttactatcatttataagaaaatatgtttgataaaacattaactactatgtaacataagtaaaaccgtaccctacaaaaaaaaaacataagtaaaagcgcatataaagatgctactatcttaactttaaaacatcacaaccaaaacgatcagcaaatacgttccatatttttttgttaaaatattaaaatttttaaagaaaatgaagacaatttttgtctttttaactcttgcagttttggtttcatcatgtaagttctcattcttgttcaattaaaaatatatatatatatatatatatatatatatattatagtttaaattttaatttaataagttttcaaaaaactatttttacgtgcatcaaatattatgataaaatctatttcagaaggaaaatctcagttttccggccctgcattaagccctaatattgatccagcagacgaacatattggacactctcccgaagacatgaaaattattttttgccaacaatgtgcatttcattgtattgagaaaaagaagaatatagctcattgtgaaaattctatttgtcgttgtacattggaagacattttgtaagacattatatttttagaataatataagaaataatcattgtgactgattttctacctttacagcctcctttcaatttttaataaaaattaataatatagaattgaaaatacattgagttatacatttttacatatatttaaacgactatatacactgaatctttataacaaagaaaaaaaaatcaaaattgtaatttttgtttgtatcttctatatgtattaagtgttacatgtgttatttataaaatgtttgtgaaggttatcacataaaatttactcatcatctcatggtttgcttttttagaagagaatttaattttagaaatagaatataaaatcataagtcatatatttctttttttgaatataaacaatccgaaaaaatacctagaaactatcttgtttgttttgattataaacaattatatatatatatatatatatatttatttagtctaaattttacgatgtttactaattgcataacaaccgttaaattagaggattgaatctatcaaaaatttaaagacaaaatattataataaaaagtttaattaaatgaggtattttttatcaataaaaaacaaagtaacaattaaacgtccaattaaaaatgaaatatttttttggttttttcctacgtcggtaactaataacgtcacaaagttgatggtatttgaaagaattagcggcaatttattccccccataaattttcatttgtgacctaaaattaactttccctttctctctccgtgcctcttcccattctctttcaatcttgtttgaatctccctcgattttcatttctctttcaatttcaaaattcgcacctcctcctccaaagttgttgaaatcagattttgttgaccggagagtagttatttatg

SEQ ID NO: 23348 - DNA, 3003 bp, Unknown
  misc_feature (1)..( 3003): 2750-1469P.txt file - cDNA_ID_2137843; gDNA_ID_1620408; Annot_ID_156195
taaggtggtccaaaattttgatataatgagaaacatcaagaacattgtatgggaagactgcaagtttttacatgtatcatcatttacacttctccgtttgtaaccacagacaataaggcaaacatgttcaaagcttccgaaaagcggataagagagatgagtggacatactccgataatgaccggtaagggtgaaacacaaccagataataatctagtgcttctaacaccttcatctccattcctaatatatcctttagttcatatttgttgtactcatcaggatctgcaaagatataagaaccgttgtcgtcgatatgtcaaaaaaaagcatattgaaggggaggtactctcatgatttgaaaaataaaaaaacagaagaagaagatattacacaatcttttgatgtaaaaaacaagattcctggcctgcactatgctttcttcagctttagatgccaggtacaagcacgtaagagcaacaagtcgaggctcaaactctaccatactctttctgagatagtatagtaacaaaaggaagatattagacaccaaaactgaaaactttcgtaacacagttaacgtttttgatagcagagatgcaacatagagagacactggcatgacaagaatttaactcatttcattcctcacatacacaaagatgcacattgatgtatacgatcatatcaaaaatacattgcatacctgatataaacccgtctcatatacgtaattgcagtagctacaaccctacataagtagaaaaaccaaggcgacgattcatatacaagtccaggttacaccagatattagagctagttaaatctacagaagcaaaacaaagtaatggaagtactgcaacagtagaatctctttgatatagcaaaaattggacccccaaattgtaaagaaccaacctttgcctcactttaatgtgctgagccaatttcataatatctgaaaacaacaataaatgaagaaacaaagagacataaactcaaaaaacttctctgatcaatctctaatcaaaccagtgcaacagagacaacaaatttgcttaagtaagcaggagaattcgaagaattaagaagaaaaaggatttcgtacgattagacatatggaacttgatgagcttaaaatcatcaattgagattccacgttctttatcgagatcatgaactacgtcgacttcttctggatccaaaagctgtttactgtttcgtacaaacgcaaaaacaaaacaaaaaaattcgagaaattgaaattagaagttgcttagaaggagaagaagaagtgaattttgatgggtaaagttttaaagaacatttactagtgagatgaattccagaaattggcagccattttttccggtagaccgtcgagtctttggtaaggaggagaagcttttttagctcataagttcaacatttttctgttatctgtcaaatctctttggttggtggtctcatgatctatcatatcgttgcttttttctgaaattaaatttaaggctcggcccattatcggcccaataggcaaacaaatgaaagtattaactctgatataacatgttcgttgttttttgaataacagaacatatagatgataaaaattgaaatcttataaatagctaagaagtgaccgaatatatcatttcgacgaggtataatcagtttcaaaaggattaaatttgagtttggtttttttcgtcatgattaaggctataaaaattctagctttatatcatcagccacaccgaatatttttctctcacaagtttttgtatcatgtattgttcaaacgcttgatcagtgattttcttctaaccataagtttgggtgttcataaaagaattttcagaagaacaccacacatttttcgtttgcctaatatacatgttcatttgttttattgagcccatactcctttatcaaaactaactttttttctttaaacatactaaattcaaactaaacttagactaatacatactcaaattaacaccctacatgtttctcacgttcaatatttggtacaagccaaataggtaaactacaatctaaaaacgcacgagaaaaaccgcatgacaaaggaataagccaaataagttgactacaatctaaaaaacgcacgagaagagtatcgattatcccgtgtctaaatttaattccggtttttcgctatcaaaacaattcaagaggagttattattctctaattcaccttatagaattctttgggattatgtgctaacccaagttaaaatctaatgtactcattaataaaaggtaagtaatattaaagttagtggagaataaaatctgttgaagaaaggtgaggaagtgcaacggaccatgtttgacacgtgagagtcaaaaaggcaataaaaaagtcgtcaacacacacactctctccccgtctatataaacatcttcttcacagtccccacaaagtcctcttccgttgccttttcgctttctccgtacacttggccttccttctagcgatcaaaccctaggtcccgccattgttggtcccagacttcaatcgaagctccaatttcactaatttcaggtgaatcttcttctactatttctcttccgtcagtttaatgtcacgatttcgccggaaaaatgtgatctacactgtttcggagtgaaatgtgaagtagatttcgttggtttcttagctagtttgtgcttttctcgaagttgtttctgtgtttatttcatgaaacgattttgggttgcttttgtgaagttgattttgttgttgcctcttagttcgttttcttgcttgttaagtgtttatcgagtcactatgtgtagttcatgaattacgttttctacggaaacgattttggaaagttgtgtgtgagatttagagattttctgttttttacatgattcttgggttgttctgtgatttacattgattctgagttttgacagtcttctatgaattacaggtgttgtttattctctggaagttggcgatacaatg

SEQ ID NO: 23349 - DNA, 12 bp, Unknown
  misc_feature (1)..( 12): 2750-1469P.txt file - cDNA_ID_2137892; gDNA_ID_1620409; Annot_ID_156209
aagcttgtgatg

SEQ ID NO: 23350 - DNA, 3003 bp, Unknown
  misc_feature (1)..( 3003): 2750-1469P.txt file - cDNA_ID_2137954; gDNA_ID_1620409; Annot_ID_156232
gcgccctggacagattcgtgtatatatatactcggggaaagcttgggtttctgatgatccagaggcgttcaaaagtgttttctttcttcttcttcttctggttgtctccatctttgtgttaaagatgtgaatatatgttttaggacagcttcatttttgttgaaagcttaaaaaacagggtcttttataatctctgtgattagtaccaaattgcagatttgcagaactacgtttttcttggtttgtcaggtaatgtgaaactgaataaaatgaatattatttgaatcaactgagattttacattatcttctagagttttgtgtttgagattcaaagaacactagactgagtatgaagattttgggtgagtaaaaacaatcagggtgataatttatcatacaatagttttggggtcaaaatggaataattctagagtatagagcccatgttgaaaagctcgaaaattctttccaattccagaagaaaaggttttgctgtttccctgtgagcgatcttcgatactcgtctgggcatggcgtttttgctcaacaacgcttcaatttcatctcatttacgctcgtcttcttcacaggtttggatcaaatcttgttaatcgattattgttggaattttgtttgatttttgtgacaattttttcccttacgaaatttttgaagaagacgggtgatgctttatcaatatcgcgtcgtggattccacattgagccaggaactcgagagaaagctgtaagttaatctctgtttctgttcgagtcctggatcattttggactcagtttttgtggaattttctgcatctattgtgatttgaagatactaattagggttcatgaaagaattggcttttatatagattccctgagactctcatgtgtgtccctagtaatgttcgttgtctgaatctatttgaaagagtaatttttatgagagttttgagttgttgttgatgcttatgctgttgttatatggcattttcttaaagctcttgatgagtttgtgtttgcttaaattgaaatcctgtgtagctcttggctgaagattctgctttgaagagattcaagtctcataagaaaagtgtgcacaaactgaagaggattggtgatgtgctcactgttgttgttgttgcaggtaaaaacactttagttcataacttttggtcgaagctaatcagattcttgttttgttagtggtctagaaacataatctggtatggttcaggaatcataatgaatctgagtaagagattgactaggctaggcacacttagatattttcaccttgcttcttgcaattaagaaagctgtagattgaatctcataggtttcatgtagagctgagcttattatgtcaaatcaaactaacaacgttcttctctgttgttcttggtaatatgaattatggattcacgacatactcgaaatctaaattgtgacttatctcgtgtcttgcttgtttttttgtcttaggatgttgctatgaaatctatgtcaaagctgtgatgaaaaaagaagctctggctgcagggaaaagctcatgagtgttcttgtctttgtatgcctttttgttttatcctttatacagtgtctctttctaataatctcacaataatgtttgtttactcaatgaaaatggcatctaataaagtagactaaaagaaaaagacattgtccagggaaaccaaactctggttttttctgacgttgtgtggaatctctgctttttcttctttttaaatattccttagcttttcacttatttgtactttgcttaaagatacactctccatttatagataactgcaacgattaatgtcttatccatggattaggtgactgtatttatgtgaaattgtgaatgatcaatcacacttaatggtttacactggacatgaaattgtttcgaaaggattagtagagcgagtgggccggttcggtgtagcctacctctatcttgggcctctctctaggcccaatttgggttcaaaccggttgagacgaggtctcaaaccgaaatctaactttacacccttaattttcaacctaattgtgactcaacaagaacatatccaccactgaccacttgttttccacaaatcatgcaaatttgattaatacctactgagtactgataaaaacaagtacaaagagctttcatgctcccttctgataacattggttcaccaaagatgtaatataaaaaatgttggaatattagttgaaccaccttggagaacgtataacaaagaagcccaacaaatcaagttacttttgcttgatttgcacacattcatgtttgaaagctacaattcatatgttctatattatctacatttatactcatagttgatatgttgtcgaaattctatcaatttatgatattgataggtttgcaatttcgtaaaagaaactctcacatctattttgactaacccacacgtttttaaaaataataaaactatgagtaattacacatcctaaagagcatttactcatcagtcaaaattagttgatcaatattgagtatgattcgtgaagtcatgcatgatacaacgtcgataatttttttggtaaaatgtaaaagaatacgtaatcaattttttctttggaatttttaatactttggaaattacaaatttttttgttgaaaataagatttcaggaagacgaggagtaatattcttcttagaccaacatcatgacatgttccctggcgtgattattttcgcgacacctgaagaaacggcatcgtttaggtcaaagtcatcatcatcattctctattttgcaatctcataaagacggttataaaaatcacagagacacacccacagacgataaaagctctaacggaccgaccaccgccaagtttttaattttacactaatgctactgccacctcttattccgccagatccaccaccgtctccgccgcatcactgattcctcaaccgtcaccggagataaatccttaagcaaatagaaaatg

SEQ ID NO: 23351 - DNA, 3000 bp, Unknown; identical to SEQ ID NO: 1510
  misc_feature (1)..( 3000): 2750-1469P.txt file - cDNA_ID_2137973; gDNA_ID_1620411; Annot_ID_156263

SEQ ID NO: 23352 - DNA, 3003 bp, Unknown
  misc_feature (1)..( 3003): 2750-1469P.txt file - cDNA_ID_2137985; gDNA_ID_1620411; Annot_ID_156266
agatggtgaagatattgtgcttgagtcagaagatacaatgagttgggcttcggcgccgcgatcaccgttaccggaagttatcatttcaagatctgtatccggttccatacccgaaaccaaaaacggaccacaaccactacggagaagcgtatcggaaactgcaagctacacatcagagatctccgacgtatcaacgatcgaacgatccacgtttgatttggtggagaagatgcattacgtcttcatccgcgtcgtgaaagctcggtctttaccaacctccgggagtccagtcacaaagatctcactctccggcacaatgattcaatcaaaaccggctagaaaaacctcttgcttcgagtgggatcaaacgttcgccttcctccgtgactcaccggatttatcttcctctccaattctggagatatccgtgtgggattcatcgacgggaatcgaaaccagccaattccttggtggaatttgcttcgacgtgtcagagattccgctccgagacccgccggatagtccattagcgccgcaatggtaccgtctcgaaggtggtggagctcacaacagtgatctaatgcttgccacgtggacaggaactcaagcagacgaatcattccccgacgcgtggaaaactgatacagccggaaacgtgaccgcacgagcgaaggtttacatgtcgtcgaagctgtggtatctacgcgctaccgtgatagaagcacaagacttgttaccgcctcagttaacggcgtttaaggaagcgtcatttcagttaaaagctcagttaggttcccaagttcagaaaaccaaatccgccgttactcgtaacggagctccgtcatggaacgaagatctactcttcgtagccgccgaacctttctccgatcagcttgttttcacgttggagtatcgaacatcgaaaggaccagtcaccgtcggaatggctcgcgtgccactcagcgcaatcgagagacgcgtcgacgatcgcttggttgcttcgagatggttaggattggaagatccaaacgacgagaagagaggaaacagatctagagttcacattaggctttgcttcgacggaggttatcacgtgatggacgaggcggcgcacgtgtgcagtgattaccgacctacggcgaggcagttatggaaaccagcggtgggaatcgtcgagctcggtataatcggttgcaaaaatctattaccgatgaagacggttaacggaaaaggatcaacggacgcgtacacggtggcgaaatacggttctaaatgggtccgtacccgaaccgtgtcggattctttagatccgaaatggaacgaacagtacacgtggaaagtatacgatccgtgtacggttttgactataggagtcttcgatagctggggagtatacgaagtcgacggtggaaaagaagccacgcgtcaagatctaagaattggaaaagtacgtatacgtatatcgacgctggagactggtaaagcgtatagaaatacgtatccgttactgatgttagttaacggcggcgttaaaaaattgggagagatagaattggccgttagattcgtgagaacagctccaccgttggatttcttacacgtgtatactcaaccgttattgcctttgatgcatcacattaaaccgttgagtttgtttcaagaagatatgttgaggaacactgcagtgaagatcttggccgcacatttgtcacgatctgagccgcctttaaggccggagatagtacggtatatgctcgacgccgatactcatactttcagtatgcgtaaagtcagagcaaattggcttcggatagtgaatgtagtcgccggaatggtcgacgtggtgcggtgggttgatgacacccgtttctggaagaatccgacatcaactttactagttcacgcacttgtcgtgatgctgatttggttcccggatcttatcgtaccgacattagcgttttacttgttcgtgattggtgcgtggaattataggttcaggtcacgtgctgctctaccacatttcgatccaagactctcgttagctgatgcagctgatagagacgagctcgacgaggagtttgacgtcgtaccgagcaaccgaccaccggagatggttcggttgaggtacgataagctacgaaacgtcggagctagagttcaaacgattcttggtgaagtggctgcgcaaggggagaagatgcaagctttggtgacgtggcgtgacccacgagcgactggtatattcgtggggctgtgtttctttgtggcgttggtgttgtatcttgtgccgacgaagatggtggctatggcgtcagggttttattacttccggcatcctattttccgtgatcggaaaccttctccggtgttaaatttcttccggcgactaccatcattatctgatcggctcatgtaatattgtttttttttttggaggggatgtatatatagtttgggtcgtttaaccttgttgggccttattgggttataatgggccactaaatggatttttatatgatttcctattataggtgctgtgtttgaccatgtctaaaacaaagaagtgtttggtatgacaaaattgatgaacctactttttgagcagagtggtaaatgtgcggaaataagcacacaaggaaatcgttgttggtgactaacaaaaggagttatccactgcccaagcattaccaactaccaccaaccaaactcaatttggaaatttcaaaggtccattagtcaaagcagcattaagtcattcagtaatcaacaaatatattcatatgaaacccaaaataaaataaaataaacacttttcaagaaaaaaataaaatactgagtactaaactggaaaccctttataagcaaaaagaccaaaagttaaaagttaattaagatttggtttaaggcgctttgctttattagagaggaaggaacgaaccatcatagaaatctctccttcgttcaagtttttctctactgtgttggttgagcaatcgagtgatg

SEQ ID NO: 23353 - DNA, 3000 bp, Unknown; identical to SEQ ID NO: 1512
  misc_feature (1)..( 3000): 2750-1469P.txt file - cDNA_ID_2137993; gDNA_ID_1620411; Annot_ID_156269

SEQ ID NO: 23354 - DNA, 3003 bp, Unknown
  misc_feature (1)..( 3003): 2750-1469P.txt file - cDNA_ID_2138062; gDNA_ID_1620410; Annot_ID_156257
ggaactggccgttttacttatcgttgtatcatatttgataagattttaattttctgggatttttttttggttttcattgatgtatctaataaatttatatatatattgattgggcatacaaaaacctcttgtcttcatgcttcttagattatgcgtttttcttttgatttaatcctttgttaatgtgtttctgtacgtatgactcattagtcatttagtagttatgaacaggttcagtgtagctaagctccgccgtgttagcacttaaataaacaatagtaaaatcaatttcttatgataccttaactatcttcggaaacatatgataatatcgaatataaacaactatttattccacatcaaaagcatgcactaggcgatttaaaactaatgatatactattatagcattagttaatttgtattaacgataaattaagataactcgaaagagtaatcttaggtttgttgatgataggcttgagatatgttagtggcgaattagaaaagattcagagggaattgtacggaaaacgagagagccgtgccgtcgcgtaaaaacagtgcaaagcaagaatagacgagcgatttgcgcagaggacccacgtgttagtgacgagtctcatgcgcgacatgtattccacgtggcttaagatgtgtcccacttcacgtgtcgtaacgtctatggctgacgtacttataatatcgaagtcggttcgtcgtttactctaacaccaatcgctcgtagacgatttcaaagatctatctagccgagagagaacgagtacggattctctgattgtgggccgttggatcaaagaaaactcactgctcgtattggtcgttggattggattggtgacactaggaatcaatggtgatgatggagaggggtccagattaggtaggtggtggtcattgtagggaaaacacttgagaggggagtaggtccattaggacatgtgcataagttataaaatctcatacaaatcatacacgggaaagtttggttgggcggttgggagagtttgggattgtctgtgggttggtgtatgactccaccatgttcccctaatcatttttccttttattatttcatgatttcttacttgtattttctgttttttttttcatcgatcgactcaattgtttgacaaattagctagaagtagttcatggacatttttattcaaatgcgggtttagtcctatatctataatgatggccctaagagtgataggtttgaacgttttaatagattttttcgatagcaagactctttacacttcgccatttttaacattttttctttggctattttgtagaatcttctagaactcttaaaatcttgtaggatggtttagagattctaaagaagtgcggaagaattcaaatgatcattagcacttttcagattctcctaaatcataaatcataattaacttcgtatcaaacacatttactttcaaagatcctaatctaagccatgttgatggaaccattgtgatggtgcgacttggtttcatgcatgttatgatgtaatacgttctcgacacgtgaattatgtctgaatgaccactggtcaaagtgttttttatgttgaatatgcgtatagaatttggggaaaactgttgaaaaatggttccaccaacaaaacctatttttaatctcacattgaaagccatacgtatcaatggacgtcgatatctaaatctaagctccaaagagccgatccgaaaccaacacatggctgaagtgatcacctgctaagatagaaaagattagtgtaggaatctctttagtaaatgtcgaagttgaagattaagtcaccatcagttgacaatgaactcagagaactccaagtatcatgagacaatgacaattaatgaagaaattgaaacttgaaagttggaacggttgacgtcggtgggattaatgtcacatatgtgtaacatggcaatagaaaatactaaaacttaaaatgaatattgaaaagaaagtctcaattagtacgtatgtaaattgttcaattgtgcattatcaagtttacattagctgaaatgacaactaaatgaaatggtgatgcgatcgtagaaaagataagttatagacaaatttagagatttaacatttgcaaagaatcacttttaacatacaaattttgtattgtggattatcaaggtaacattataattgattagctcaaacttgtatttaggtatagtaggttgctgagctgggattacaatgaaacagctgtattgaaagacttggtaagtggtccattcttagtctttgaatcgaaggcatggttcgatcggaactcgtcctaaccgtatttcgcattactatttgtatgtaacagagtctaatctctcttaacttaacaacacaaatcccataaaaatggatagaactagcaaaataaaaatcaaagaattttactgaagttactgaactttatgattgtaatgatcaacagtatcgtctttacacaaaaaaatatatgaagaagatgatacacaacacatttcattacaccatctgatccatctccatcttcaagtataaactcattcttatttagtttacaactattttttgtcttttgggaatcttataaattatttcggggtaattaacgtcaataaaataacttacacctaccgatataagactaaggtgaaaaagtatacgttaagaaaagtgaaaaactttaacaaaagaaaaaattcaaatcagaatcactaacccggtaaaaatgtaaaaccgtttcccggacccaaataaggacctggataacaacccagacccgaaattaagtcggatccggatctccttgatttattttttaacatttttgtctttcccctggaaatttgaaactctctcttctttttttgttcttcttctcattggttgatcgatacgcgctaaatttctagaaatctcagatccataaaattttccgaggagagattctctaatcagagaacctcacaatg

SEQ ID NO: 23355 - DNA, 3000 bp, Unknown; identical to SEQ ID NO: 1520
  misc_feature (1)..( 3000): 2750-1469P.txt file - cDNA_ID_2138093; gDNA_ID_1620413; Annot_ID_156315

SEQ ID NO: 23356 - DNA, 3003 bp, Unknown
  misc_feature (1)..( 3003): 2750-1469P.txt file - cDNA_ID_2138101; gDNA_ID_1620413; Annot_ID_156317
atcttagtataaacaacataaaacgtaactaacttagctatctttctacattttaacccctatgaacaagaggtgggttgaacctattaggctattacatgtgacccgctaaatagccaaatgtgggtaaccacctcaaatcactacaaggctcatgtcaaactctcattaccattaatatccgggaatcaagtttatcagaaaatgagattgtcttgcattcaaactaagaaaagaaaaagaaaaaaaagcaagaagcaatggagatgagtaacgcaatgaatgagtaatagctcaatgtctacataattggactcgtacatatgaactcaataaaataaagcaaatggacccgatttgagaccagtaatggttttgaaatcatatatttccaagcgtaccaaaatacacttacgattaaaacttgaattttttttggcaacaaacgaattatatttttgttagtattaattattgtattcaacgaattacatttgattggccgtatactctggaagtgtgtaagtataatattttctttggcttacaaagcaaaacaaaaatttgatggagagagtcaaacaaaaaaacaaaagaagtaggtcatatgtttatccattcatacgttggttggtaatcctaaaaaccaacaaacaatcatatatgtatacttgtccaattatgtaaactactccattgataatataattgttaattattgactcgacttatctactgattatgaaactaccaacaaatgaagaaagtaaagggagtgtgaaaacaagaatcttaaggtataacgaagatttgttccgcgtggaaaaggcattaaaagtgccacgtcactctctctttttattttatgattttcgtatctcttcttctacttgcttcccacgtttccatcaagtttccgtacatatcttcttgttatctgatccacgcgatctttcaacgcgtacttttcacgtatttgtgttgtcatgcctttgctgggattgtgttagatgctcattgctgacggtagtttttagagaacattctagaaagaaactatttttctaacaaaaccacgaactttgttttctagttattccactttctagaatacacctgaccaaattagaattctagaaatgaattttaaataaaccaaaacacctaaacgaaaagcaaaccataggtttttggttttaacatatttcaaattcataaaagtgaaaccaacctacaccatattaaccaatatttattagagtttttatatgttttatgatattgttcaaaacttcaaaagagatttattcatataacatacctataccataccaatgaatattaaaattatgaattagtatccttatattatatgaagtcaatcaaaaaacttagaagcatttcaaacggaatcaaaccattcatatatgaagtattattattatatctagaaggtgttgattttaaactattccgtataatatatctagaagacggctccgcgcgtggggaatgcatcaaactcagagagtttaatagctttttttggttgacgtcaactactcaaaagagtttagtttttgatgtgtatatatccaaataaaatatctttaaaaagaaaataataataataaatggtttcgagaaaacacgaggaagattctcatccaaccgaaacgactctttcgtttttagtagtctcttaagctacgcggtgtcgcaaatcgtgaccacataacccgttttttccttcttttaccccttatctttccacgtatttacgttaatacctacactcttcgctgccacttccttacccaccaagtcacaagggtatattcgtcactttccacacgtctttggtccacacaaactcggtatctatatatagttcccaaacggacacgaacacatcatcacaactactatcacaccaaactcaaaaaacacaaaccacaagaggatcatttcattttttattgtttcgttttaatcatcatcatcagaagaaaaatggttgcgatatcggagatcaagtcgacggtggatgtcacggcggcgaattgtttgatgcttttatctagagttggacaagaaaacgttgacggtggcgatcaaaaacgcgttttcacatgtaaaacgtgtttgaagcagtttcattcgttccaagccttaggaggtcaccgtgcgagtcacaagaagcctaacaacgacgctttgtcgtctggattgatgaagaaggtgaaaacgtcgtcgcatccttgtcccatatgtggagtggagtttccgatgggacaagctttgggaggacacatgaggagacacaggaacgagagtggggctgctggtggcgcgttggttacacgcgctttgttgccggagcccacggtgactacgttgaagaaatctagcagtgggaagagagtggcttgtttggatctgagtctagggatggtggacaatttgaatctcaagttggagcttggaagaacagtttattgattttatttattttccttaaattttctgaatatatttgtttctctcattctttgaatttttcttaatattctagattatacatacatccgcagatttaggaaactttcatagagtgtaatcttttctttctgtaaaaatatattttacttgtagcattggagatttgttatgagattatcttacttagcatttagtgaataatctattagcctattttgccgacgtgaaaataccattttctatttaattttgattacttatcaactactattaagctgttattttcccccatcacgaataaaaacaacccaagaaatagatatttatttgaatttgaaacttacctataaatttagttgagctaatcaaaattaaattttaaagcatgatcagaagtggaattcttgagagtgttgtttgtgatctgtcaacatcttctgtccaaataaatggattcaaagaacatggttcaacaccatctcagtgtcacctttgcgcatg

SEQ ID NO: 23357 - DNA, 3003 bp, Unknown
  misc_feature (1)..( 3003): 2750-1469P.txt file - cDNA_ID_2138145; gDNA_ID_1620413; Annot_ID_156334
agctcaacctcaaacagctgagaagaatatagaagaaacacattaaacattattgactcagtcgacaaactaatggactgaagacaatgcaaagaaccttggggattgaaaataacactaaagcaaaatcgtaagatttgcaatacccatttatggaacagtagagagaatatatgtgatgcaaaggactggctccacagctgcaccatcaaatcaagtatatccttccccctctcagacactttcacatagtaatcagcaaggacatcgaaaaagcataacggaccatcagcatctgcttcatcagaagtaatcaaatcctcttctttgctaaggatcacatctgcttcaaattccagctcgaaaagttaaattccagtggtaaaaactgatttgaattcaaaaaaatggggacatgaaaagtgtaacctttggctcgatcgtctacttcgagagctatatcagcaaataagtcttgtaacaagttgcgtgtttgtgctggagagacaacagcctatacaaattccaaaatcaattttatagtctcaaattgaagatgacaaaatccagaaatctagccgtgaaaaaagctgaaaacaggtatataacatttgttgattgataaacattaatcagatttgctgcatgacattgatctcaatcggaaacggtagattcaaaatgaatcaaaaccaaaaaaaatcgaagaaaccatttcttaatcagaatttcgtggaattatctaatgcatgtgtctcgaattagagaaatcgtgttttctgggcaaaatcgaaacccgatcaatacaaatcgagaataacgaagaagaaaaagagcaaacccgtgtaagcttcttcttaatctcttgtgtaagagcttcaagataagcagacctccgtgaaaaagaggaagacggcgacgaaactttctccatttcaaaaaccactgatccaaaaaggaactaccacatgcgatcaacagcgtcgatctattatcgctagtatgagaaatcgagagaatgataatgattgcttcttcgttacgaattattttattcaatcaatcaatgaatggggtctcctctggatttaaaaattagtcgtaattaggcgtgaacttcttttctcttttgctactgtgaactccgataaagacacgagaggaaaaaacgaagatatagtttgtttcaaaacgacttcgttgcattctggatcagagagatgacgtgttggttggctgaagacacgtgtacctcttcaggcccctgtttatttttcttttaatctttttttttttctaaaagtaatcaacgtcgttgtggtagaatagtttcggaatgagattgattaatgtcgttttgtatcttttcagaatttgttatgcaatacgacaatttattcatatcaccttcttttagatctgtatccaattatagaaattggatgatttgattcatcaaattcaaagaacccttaagataccactatctcctttttaaaatggatcaagacctcattatccactaccactcgtggcaaaatgaaaactatataaaatcaacacaaaatggagggaaactaaaatttacgcgctaatgagtaaagttggttaaagcttctttactctcaacatttggacctgacgtcttgtcgtcgttatttatgggcttggtgatgttttattgggcttaaattttgtacattttagtgcaaataaatatttcgttctaaacaataataacgaatcgaaaagcccaagacatgttatactcgagagccaacagtcaagctgatttcaacgtatctcgtcacgccacgtagttgattaacagccgaagatcgccgctgataaagaactagattgacggctgacgagttaatacgtctgctctactgtcaaattcacaattcaaagcgaggtagaaaattagagtcagagtcataagagattatgagtaatcaaacgaactttcaccaaattgcgtgtttccattgttgagaatttagcaaatgaaaacacattacaaaagcgaaatagcaaaaaaaggaaatcaaatcttgctacatttactaaaatacctacattgaaattctcaaatctaatttccagaaacagatctccaaacacaaatctgaaaaaccctgattaaccgccgaatccgtagagagtccttccttgcctcttgagagcgtagacaacatccatggcggtcacagtcttcctcctagcgtgctcggtgtaagtgacagcatcacgaattacgttctcgagaaagatcttgaggacgccacgtgtctcctcgtagatgagaccactaatacgcttgactccacctctacgagccaatcttcgaatggcaggcttggtgattccttggatgttgtctctcagaaccttcctgtgacgcttggctcctcctttacccaagccttttcctccctttccacgaccagacattttctcgagagaattagatttctttttttcgctactgtgtgaagaagaattgcttttgattttcagatattgactggacgtgtttgtttatatataagagggcttttgttttcaaccatccgatttaataacccatctaacggctgttaagctcaatccttgtcaatactgatatgacatgatagccgtcgattgattttaatcaacggttattaattgtgatccgcatgataactacataagtgttcttcagagcttcgctttgtagttactagtttgcatgggctggcttactttttaatgggccggttatggatcgaaaccaaacttctcttattttcgaatacgcaggcgtttcggtaactgcctcatacgtcgtcggttgcatagtaaaataaatttatttctttttcttctctttttttttttttggtcgtatttatatttcttctcctaaaatcggtgaagtatctaaaaacccgttatttaatgcttaaaccctaatcggaaaatctctccgccactgttctctccgactcactaatg

SEQ ID NO: 23358 - DNA, 3003 bp, Unknown
  misc_feature (1)..( 3003): 2750-1469P.txt file - cDNA_ID_2138164; gDNA_ID_1620413; Annot_ID_156339
catacgcttttctaaagtttaccatttttaaatttcgaggttttttcctcctaaatcggataagtttaccattgttagtttagaactattttgttgttgttgttgttaaatgcttaattagaactaattaatctgattacattgttaataaaaagagatggtttcacctcgagcaagtgaaaccatagtgattaagacatatttgaaattaataattggtatgatcgtaagagaaatacttttttttttttcttattaagaaaattacgtaagaaatattttctttgggtgtacttatactctgcttttttctttttgacgttattgaagattggctaatctttggcacttaaggtaaagcatcttaattaatcatcattgatcccttctattcaaaggttaataaaaagaaagttgattatttatatacatatggcttagttctaatgtcgcagtaagattctttggttcctcctaaattatataattggtggatatatacaacacttcctgatataatataggacatggacatacatgatacatttgtacatgcataggcagaacaaatagtataatataatataacaataataatgatcgcgtggctggctaacataacactttctttttaattaacattatcatatggacacatcacacatgcatatatgtcttcacgtggaactcaaaagttttaagagaacttttgtaattatcaccatctttttatattcacctaaaaggtggctagttactgtccgtactaatgtccatatatattcgtataagatacgttctatatatgtatacatacgtgcatacattatagtactatatattgttggagccttaatcagaaatcaagggttggtgtaacaacaatatatgtacatgtgaaaattttaaataagaaaaaacatgtattaatacttcctccaatctaatcaaactcacgtacatgtatgtcttacgcgtatatgtgtgtgtataaagactacactttactacgtagtaattgatatatagtatcaatttaatatgtgtttataacatatatctatttttttaaacatatctatttaagtttaagtttaagtccaataatttcattttactagtaaagatcacaatgtcatttaccgcattcacttaataattgctgaattcacatagtgcctgtaaattaagactaattttaggtttcaaataatttttcttttttacataacttacgatcgatattttaaatggtattggtaagtttaaggtatatagatagtgtgtctaaactagagttcgttgaaattggtctgaggtataaatacctaaaaggttatatatgtttttagtttaatgtaattcgataaattttagtcgaaaccgttaagagatatcagaatttcgttttcaaataatatgggatataattacccgggattaaccgtacctgataaaatatagctctcgtacgtgtcacatgcctaatgcctagttaaacttaaaacgaatatctatatttactgttattgattgtgagttaccaactaaaatattgttaaaagacattgtaaaactacaaatggttcgaactgtatactaatgatgtaaactcgtgtttcatcgttatgtccgatatttttttcattcaaccattattcaatttcaagatttctttattgtctttttttctttctagaaagcctatatatttaattacccactttgcatattcagaggataagttgatacgtacttgttagcaacctgtctagatcatcttttgattgtagatttgactttaaatttctcacaattataaatatgaaaaataacaagcaaagaatttacaaatgtatataattatatacacgcattgatgaataaacatatttagaaaataatgtgttctaaggaaattttgtggcattttttaaaaaataattaaacaaataagaatagtgtaaagttgtttaaatatgtatgtataagtggcatgcctttgaggatacgaacttaaaagggagttaggtaacttgcttgggaaataaaatagccaaccttaatttgaggtttcctcaatgttcttatcaaaaagaataaaaatttcggaaattcccttcatggattttgatatctaaccctaatcgtgaccttctttgatagctacaatctccctctctttgcttattccccaagcaattttagcttacgaatgttttgactaactccacatcggtttatctcttaagttccccacctacaaatatacaaaaaaagaagtaaaataaaaataattattaacaaaccgatgaagtacttatcatttataaacatgcttatgaaatgtattttctaaaacataaccgctaaccagagaagtttcctagagttctgcttcagactcttttggtcgatcaagaagtctccaagagttgtttttgttgggtctaaacaaaacttggccagggaacaaatcaaactatattattaatcttctacatctggtcctaagttccttactatctcatgttaaaatttgaagtctaatatactcaaagctgtcaaagaagcagaacatggaagaggaactgtcatatctgagaaaccaaaattggcaatcttgcatttcatatttagaatctacgccatagtattgagatggaaacaaagagttttcgaagagggtcaaagagtttgacttatctttgacaccactcatacattagctgttcatataatctaacaactagtcaatatcaagtgtctccaaattacggagagtacttctctaccaattatctttttgtttttcataaacattttactaattgttttttctatatctcctgctcaagcaaacacctaactctcctttcctatatatacactaaaggttgaaaacaatgaatccacaatctacagcaaaacataagcgaggcagagtcttcagaaaacttacctgctctaaacaacgcctccgtgtccaagctcacttcaatg

SEQ ID NO: 23359 - DNA, 3003 bp, Unknown
  misc_feature (1)..( 3003): 2750-1469P.txt file - cDNA_ID_2138189; gDNA_ID_1620416; Annot_ID_156425
taaaattcttcagtcgtaatatagctaaattaatagtcacgtacaatgaaattgatcaaaaaatttgtggtaaactattttgactattagttgttatctaaatgtcaaaaagaaatgggtagttaggtaaaagtagtaagttatacatgagttataaatttctttgatcgtaataatatagctaaattaagaggcacgaaaatgaaattggatcaaactttcaaactatttgacgagtacatgtcaaatagagaaataattaatgagtgttagcatgttaggtgtgaaggtagtagtaagtagtaacacatcagttataaattttctttgtttaatctcttgcatgtaaagatcttattgcaacaacctcttattatcgatatgcttagaaaccataatgcaatacttcttttaacaaattatatacataccgcacaaaaagataatatcaaaacttttgtggttgtcttatagttatagctagcaatttatatttatgaacttaatatcatattcaatcattacaaacataatagtaaatagtccttaaagtatgtgctattttccattattccgtacttccatttccttaaattcccagatagaaaacgacaatagacaattaactagttttccgtagttaatagaggaataaaagttaatgagttatgcataagtcacttgctaatattgtaattgatttgatctgatttttaaaaattataagaccgacacaaatagaaagaaggtagctccaactgcggcctgcccataactttgtttacataaaagggattagtttttagttcacactatctttggtgacaaaatgtatatatttcttattatttgattatctatatttagaggaaggtttttgagttttggtggatttaagaactacacatatcggaactacttttatgagcctccttttacagattcatttaaagagagtgggcctcaaatttagtgcctttaatttcgttgttttcctgttgttatatgtttcatttgatttataaatttcgaataaaaaatagaaatatatttctaaaatatcacatttttaagtttcagttctaaaaataccatcactagtttgtttttccaatagtatcacaactttctttgtaagaaaatacttgtttacccaaaaataaaaatagatgaaaacacaatattttttaaaatataattattttggttcactatttccaatttaagaataattgtctattagtttttttggaaaatcaaaacgtatttattcttaaacatataaaagttaaaataaaataaaaattcattttaagaataatttatttttatttcatactgattaaaggatgtataattttttataatgttagttataaatttgtaacttatttgaaaatgtctcagttatctcatattgtaggcctgtactgctttcaaaagcccattaccaaagtatgggctgtccaattactactttggttttttttcaagtccatcttcttcacttcctaatacggactttcttctcctctccgctggattttgtctctcagtctactttatccgatcggcgccggcgagattcaaggtgatcttcttcacttcttctattgaacatactatcgaaaagacccaatcttcggattcattagttcccactgcgctttttctgattctatctcgatttgttcaatccgattccaacttttgtttcgattctgagtttttaataatgctagttctaaaccaaaatgagattatttgatgattctaatcaatctatagctcaagtaatagttattaacgaattgggttttaaaaattcgatttttgagtctttaacccgaatttatgtcactcttttgaaaatgtgttgatagggtaaagaagaagatgagtggtgaagttgttttagctgctagagtttatcgtgaccttctcaaagcagtggtgaaacatgttggtaaagaagatcacaagtctcatttcttagactttgttaagcaagaatttcgaaagaatgcaaactcagagaaaataaaccttgctcgaaattacacatatcttctcaatagcattcactctcacaaggttcagtcttttttatgatctcttaatcacattggcaatgcatttgtgtgtttagtctctcacatggataagttatctggttgttgcaggatctgctgttctcatacaacattgcggttgatagaactgaagaaatgaaacgagtgcttaataaatctgcagccagtgtagggcttcgtcttcctgaagtttacgagccttgatcatgcattcattcctctttgtctttccgggggatgagtcgttatgatttcttcatttctgtggacaggtctttggttaatttttgattatatgagatagtaaatgaagccagagagctcttttcctttaagcttttaagtattgacaaatccgagttgtgtgggttacaattttttgttagtgttgcaccacatttgttttaggatgtgttccatgaacatattcatgatcttgttatgtttgatggaaaccaccaaagtgagagaattcagaagcaattgcatattctgagatacaaagaagccagccaaagtaaatgaaaaaaatatttcttatgacttcattagcattatgatacgaggcataaaaaacctttcttgaaaacttaaaaactatttagaggaacttgttccgatcatgtctatatttggatgatgagtcaaaaatggtaaacaagatttatgaagagaaattagaaaccataagggttttatccaaaactcgataagccatccaccgctagtgtttatcactttatctggttcttgttttgtattttttctatttatttatttagtggagacatcgatgctgacactttcattttcttaatcattctttaaggctctggtagctttggcttttgatctaaaagctgagagtcaatagagagctttgtgctgagcatagcagagaagagttatg

SEQ ID NO: 23360 - DNA, 3000 bp, Unknown; identical to SEQ ID NO: 1550
  misc_feature (1)..( 3000): 2750-1469P.txt file - cDNA_ID_2138218; gDNA_ID_1620416; Annot_ID_156436

SEQ ID NO: 23361 - DNA, 3003 bp, Unknown
  misc_feature (1)..( 3003): 2750-1469P.txt file - cDNA_ID_2138237; gDNA_ID_1620416; Annot_ID_156441
ccgatgtgggacattgtccctaatacgccccctcgagatgatggctcttctagccattgatctcgatatgtttgggcatggatcggcgggccaagtattgggccgaaccgatgtggatcgggttgagtatgtgcggatcgggctctgataccataaaacatcataaaaatccaatacagagttttgataggaaacacacaaaaacataagacaagctcacataaaaaatctaccaaacatttcttcttccatggccattcctaagcgaaagagatccaagactcgaagacacatcctcaagcaaagcttcattcatggcatctcttagattcatctcatcagtagcatcatggaaacatccacgtgtcctagactcacttatcagtgttgcccaaatcgaaccacttagagccaaagttgtctcgttcccaatcacccataaacagtgtcttgctcgagtcagtgccacgttagctctttgacggttgttaagaaatccgacttttccattaccgttacttctaacggtggagatgatgataatgtcttcttctcctccttgaaaaccatctacggaccgaacattcaaagtgaattgctgacctgataaggaactgtacttatctccgattttctcttggattgctctcatctgtcctttgtaaggtgagaccactccgacactcaccttcatcctcctttcacatgaaactttgtaaagatttgatataatttcagaaatgacagcaacttcaaccatgtttttgggactatgtccatcaccaaactcttcttttccacgtccaacattgataaaagaaaatgagtcaaacatgtttcctttaagaaacctcttttgataaatactttctttaacattttcagcatctttgattctcccaccataaaactccttgttggggaaacgactaatagaaggatgcattcgatattgaacatcaagcaagtgtttgttgtgaccaagcaaaaccaatctctcaaacaagcttcttccgaatttcgccttttcacacatctcattatgaaccattgcaggcaattgaaactcatctcctattaaaatggcgtgacgcagtcccggaagttgcaatgcagcaactgattcacattccttaagctgagccgcctcatcaaccacaagcagttctacatttcctgtcctttccacgttcatttccgcagcacccgaggctgtgcagaggataatatccgcgttttgaagacaaaatttcctaatatcttcgttttctaacatgtctggaatctcaaaacgttttggaagtaagcgtagagccttgaggcaatcatcactgagtcttttgaagcaatcaaatctgaaatttccttcctcgaaatcaaccctagaagaattctccctcaagaaatatctgatacgctgaagagtttgacgagaagcaatcattttcttcacatcttcatatggaaggtaaaccttgggaagatgtgtatacaaatcaacgatgcatgtcttcacttcttcacttaagctattaaaattcttctgaacgaattctccaaaagtaggaatgttaacaacaacttcttccctttcatcttcttcattcattctttcaacttcttctaactcgtagacatgtctctcatactttccctcggggttttcaagaaactgtatcagtgactctaatctctgcatccatccagaaaatggtgaaaacagtttaccaagcttaccaatacgctcatcaagaaacacatcgagaagaacatgatcgttcttgttaatccccattctgtcccggtttccggataaaatgatattccctagcctgtaagtagcattttccgctgtcgagttttccttaaataaggataagagccttgatgtaacttgtacaatagctgtgtttgtaggagcacacacaactgtcttgcaccttagtttgagaagggcaaagagaagagtcgcgaccgtctttgttttgcctgttctaggaggtccccatatcagtttcacactgttcttatgggtacagtttcttgtctcaaggcagcccaagattgcatcctcttgggaagagttcaatttcgttgaacggattatatccaaaacaaggtcagatctcccatcattttcagaacaaaaacattgttctgtaccctcagtattagcctgaagcacactcttggttagagtcgatatgtcagcttcgttgtgcaaagcattccaaattcgagtgtttgttgttaaagtcattagaaaaacaccgaagctatagttctcaagaggtgatatcgatctagacaaatgaacagagattttaagattttaagatcacctctatagttctcaagaggtgatatcgatattagactgtgggcttccaacctaaaaccaattggcaataggtggagaggcgcatatcttatatataccacttaagatcctactcaacttccgatgtgggacattgtccctaatatcgagaactctgatcgcctgaaaccgagaatctgattctggactatggaaagttttgaaatttggccggaaaattgaaaccctaaattttttttgttttgagagagaaaacccctaaaaacccaagctctgtttggtgtatctctttcttgggaaacaagttcttttattgcattttttttccctatcctcgtattttccatacaaaatcaatgttaaattttaagtttcaattttgtccgcaaattagaaaacttggcaaagtaaccttcttagtgtaaaatttttagaatgccctcaaccaaattttaaagtgtttaaaaaaaaaaaattaaagtgtttaaaaaaaaaaaaaaaacacgaagagccaagtaaccttatccattcatacgcctcaaacagagacgacagcgtttgaagtagaagacaaaggacagtgcaagaatctcttatcaacatgagaaaaccatcaagcaaaaaaaagaaacacaaaagctatctccgaggttagagcaatg

SEQ ID NO: 23362 - DNA, 3000 bp, Unknown
  misc_feature (1)..( 3000): 2750-1469P.txt file - cDNA_ID_2138271; gDNA_ID_1620413; Annot_ID_156323
ggaaagtctcaaacagtagttagagttcccgatcgtgtccttttgaaagatcccaatatatttggtttcggtatatcttagttgatatgatcgtatttgcatatttctataccattgtttcaataggattaagattgacgtgtgttacttgattgaaccaaagcatacttccttcgagattatagattattgataacacaagattttagattcttgataactctttggattatgttttttcgacaacaacaaatctcatatttcgagcgatattagatatttcttaaacaataaatgacattatgtgagcattagaatttagaagcccgtatgctatgctggtatcaaaaggcttgcatttctacaaaatgactttcttcattaattgtcgacctttcatgctgattatttggtcttccttattagatatttttgtatcgctgactggttcaataatttattttactcaacttagtattgtgttgatttttatagaaaaacatagccaaaaccccaaaacatacaaaactacaaacaaataaaaatatatataatatgtgatgaatcatatttcaaaccataataggcgttactagatttttacccgcggtataccgcggagacaatttatattttaaaggtagtatatataaaagtttacaatttgtaactatctatgtaactatttataaaatatttttattttatagtttagaattgttattaagtaacaacctgccaaacccgtcccgctaacccgtcccgctaacccgtcccgtaaaaaaaattcatttattttattaatgttgatcttatttatcatatgtttatgaatcattgtctaaatattttgtaattttgtagtaattaaatgctatcaaatatctctgcggtttgatgattataattgaattgtaatagtcatgcagaaaaacaatatcaataatgataattttgtagtaattaaatgatattaaatattttgaaagttttattttattaaccaatcgtgtagttaatgtagagagattttaggaaaattgttaaatgtcaaatatttaattcgaagaattttcttctaattatcaaaaacaaatattaaaatccaatggcaaccattgtaaataagtcccaactacaagatttatttcataaaatggctgcaaaaatgtatatatagatattaaaaacaaacatagatatagtgtcaagaattccaagtccaaagaatattatggacacaagcccatctgtatttttcttagttgaaaacttggaatgcgtgattctctacatgacattgatatcaaatctcacaaaaaccaaacatatataattgatcaaacaagaaagtaaaatttgttttcaatctctaagataaatgaaccaaaaaaatcattatctcgaaaggcatttaggaatttctcaaaagagttactgtcttaagactctttgctatctcacatcaaagcgatatctcgtgaaaacgtttttataactctatcttcattgaaagggtaaacttttgttttctagtagtatactttagataagtatcaagtatgagacttaggattttaggtaatcatcttcagaaacagaaacagaaacagattaaggttagttataatgttcatgaacttcgtctcaaaattaacttcgtcttagtttttaagatgataactcttctaatccattttaaatcaaatctcactttatattcggcaacataaccaatccagttcaacacaaccaccattagtttgaaaaaatttcaactaaattagggttgatatatacttaaactcttaaattattatgattttttcaaactttgactatataattaaaccgaataatttgatttaatacttaattttgttatttttgttctataaaaccaaactaagtcatcataagagataaatgataagctctatgtaaagttcttcactgtctacaagaattatgtcatcttattctgactattatgtagaaacttttgttagttcatatccaaagtaaaacaaacttagtttaaattggatggttgattaccatttaccaatgttaacaacttaaaacttcaataacgtaacgagcatgtaaaactaaccaaccaaaatttaagaaaatgtatatattgattccacttttcacttatcaatctgattgatttattaagtgtaaattgcaaagtttaatctcatttttttttcaaattttttatttttcaagaccaaaccaaagtaattaattagatcataccaaaaagcgcaaaatggcgccgtttcgagaaaaaacccactccatatactcttatatttttccatataattctttcagaaaaaataaaagttcgaattaattgggtttgcataagttttgttgacattgttgtttaatgtaatgattgagtcaagtctataaactattaaactctagggtttaatatgtacaaattctcttaggctacttttgattaggactcccttgtgaatgtcaaaacataatgcgaccccaaaatatctttataagtataattgttaatcttttgattctaaaatattgttcattgttttccaattagggcttcaaagactcttgagaagcatcattaaacatttaaatgtcaatgactaactttacatttaacatataattaatctaccgaaaattagtgtaagttgcaagaaattatccaaaaacccaaaataaagcaagcgctaaacttttaaaatgctacaaaaaaactggcgccgtttcaaaaagcatacctctttttgattggttaatacatagtcacgcggatcgtgctttatttgaacatccaccgtcgatagactaaatccaacggataataatcctctcccttctttttttttcatttacctataaatatcacagagtacccttcaactttaaatcacaaatcttcaacttccgatactttcaatctctctaaactctcaatttcagtaatcgataaccgtagcaatg

SEQ ID NO: 23363 - DNA, 3000 bp, Unknown; identical to SEQ ID NO: 1555
  misc_feature (1)..( 3000): 2750-1469P.txt file - cDNA_ID_2138357; gDNA_ID_1620417; Annot_ID_156457

SEQ ID NO: 23364 - DNA, 3000 bp, Unknown; identical to SEQ ID NO: 1563
  misc_feature (1)..( 3000): 2750-1469P.txt file - cDNA_ID_2138361; gDNA_ID_1620417; Annot_ID_156458

SEQ ID NO: 23365 - DNA, 3000 bp, Unknown; identical to SEQ ID NO: 1560
  misc_feature (1)..( 3000): 2750-1469P.txt file - cDNA_ID_2138431; gDNA_ID_1620417; Annot_ID_156485

SEQ ID NO: 23366 - DNA, 1218 bp, Unknown; identical to SEQ ID NO: 1556
  misc_feature (1)..( 1218): 2750-1469P.txt file - cDNA_ID_2138435; gDNA_ID_1620417; Annot_ID_156486

SEQ ID NO: 23367 - DNA, 3003 bp, Unknown
  misc_feature (1)..( 3003): 2750-1469P.txt file - cDNA_ID_2138480; gDNA_ID_1620763; Annot_ID_167257
acactctattttccttttattattggtgtggtattgtaacactttttcttcttttataattggtgtctcgtgattttcatttcacacagttaataatactttcccacatttatctttaatgtcacacattgtgattaattctctagatgaacaacacaataaatgagctgtagagttatgggcaaaaaaataaataaattttggttggtgagataaacttattttgtaaaaatcacttgtttcctatttattttgaacgtgtgtttgtatatttttctctctctctcttcaacatccatcttcgaccatcaatgtcaatttctctcttatgctccctagaatttctgtcatacgcagcccttgggccattaccatctcgacaaacttcgttatcaatgataatttaccaaccttaacaaaatcaaacaaataattcaattaaggtgacatatattaaaaaactacaatgtctaaaaaaaggagaaaagaaaaaactacgatgtcaaagaaaaaataatagaaagaatggataaattacacttcatcaccgatgacaaaaaccagtaaattgattgtactagaaagatcttacgaaacactataaattaaaaagatcttacaaacaaactagagagaaaaaaaaatctctagatctaaaagcatctccaacagaccctcaaaccctcaaatttgaggggtttttaactctaactccaacaacccttcaaaccctcatggcactattcacaccctcaaaatatttctcttatttcattttagtctttgtactttatattccttacaaataattctattaaagtcaactatttcaaatatattcatataaatttaaataaatgaaaattatttaaatataaaaaacaaatacaacaataatagtacactgagcatttcaacacaaattaaaattaacattacaatgataaataaatacataaacacacaaaataaattaacacttgaaaaaattacattaaaacataactaataaaaaattaaattcgtaatgcaatattaatattcaggtaaatttgatcctgaacctccaagatcaccaaaatattgtccataaacatttgatggaatcggaggttgttgttgttcttgatttcttttttgtatgattcttgcttgttcagatcgtataaattcacatgtattactatcatcaatatcgcttaaacgtgttagcaatattttattttccttccctatttcttttagagctaatttttttgcttgattttgcatacgcaattgagccatctcataatccttgcttctagttgatgcactttctttcaaaaaatcaagagagacatctcataacaagaagcatgccgaaaagatgttgaacgtgcgtttggagtcttacaatcgaagtttgctatcatagcatgatcgtcatgttactggaacaaagaagtattgcatgatataatgacagcttgcattataatgcataacataataattgaggatgaacatgatatcaatgcactgattagagattcaagattgatgccaccgccaacagttgaaacggggttaaatgaacagacaagatttcaacaatttttatcttataatctacagataaaaaataaagagactaatttatcactttgaaatgcattgagtgatcatatatgggagcattttggaaatatttatatagagtaattttgtaattttataaatcattttatgtttttttttatgttttttttttaatttatatataatattatattattatatggagttttttttttaaatcttgtttggcataattgtttctataatatatgtgttatatttatttgtgaaagttttatcactataactgattattgttaaaaattgaggattataatgtaaatacttcaaaaaattaaaataaatttgtgggtataccattggagtaagtgaccctcaaatcttcattttgagggtgtgccccctttaaaatgagggccattgttggagatgttcaaagaagaagaaataaggtgagatggcatggggaaccatgactagagcaaccttcaagacactctattttctttttattattagtgtggtgctttttcttcttttataattggtgtctcgtatttttcatttcacacagttattagggacctcccacacttatctttaattgtcacaaactgtgattaattctttatatgaacaacacaataaatgagcggtgaagttatgaacgaaaaaaataaattttagttggtgaaataaatttattttataaaaatcacttgtttcctttttattttgaacgtgtgtttgtattttttctacttttctctcttattatttgagttacttaatataatataatttatctatttttatataataaattaatatttaatttttcttatattttaagatttatccgttgttttttttaagtaaataattatatataaaataaacgaaatatctaatattaagtaactaaaatggagaagaaaaagaaaaagagagagagagaaagcatgccaaagggagcgaaagagaaggatgaaattgagaggggcaaattcgtgttactaagtatattaccgtaaaacaaatgaaaatcgaaagaagtgtctctttttgcaaacaatgttggccaaagtttgttattaaggtgtactagttgggtcaaagagttgttatttgttcctttgggtcgacatagagtcgggtttagttttgttaattgaataattctaagcctcaaaaaaatcttaagaattaaactgtcttcttcttcggtcccagccaaaaatccagaagattcttaaatctcatttctgcggcgtaggtgaagtcttagcgataagctttgtttcttcttcttcttcttctttacccatggatttttaacgaacaagagaagagaagaaccaagttttcttcgaaaggattgaactttgtttctttctcttcagctacaacaaccaaaaaatg

SEQ ID NO: 23368 - DNA, 998 bp, Unknown; identical to SEQ ID NO: 7724
  misc_feature (1)..( 998): 2750-1469P.txt file - cDNA_ID_2138588; gDNA_ID_1621159; Annot_ID_173636

SEQ ID NO: 23369 - DNA, 3003 bp, Unknown; identical to SEQ ID NO: 18621
  misc_feature (1)..( 3003): 2750-1469P.txt file - cDNA_ID_2138612; gDNA_ID_1621159; Annot_ID_173658

SEQ ID NO: 23370 - DNA, 3000 bp, Unknown; identical to SEQ ID NO: 4384
  misc_feature (1)..( 3000): 2750-1469P.txt file - cDNA_ID_2138832; gDNA_ID_1620703; Annot_ID_165172

SEQ ID NO: 23371 - DNA, 3000 bp, Unknown; identical to SEQ ID NO: 4384
  misc_feature (1)..( 3000): 2750-1469P.txt file - cDNA_ID_2138832; gDNA_ID_2926174; Annot_ID_199745

SEQ ID NO: 23372 - DNA, 3003 bp, Unknown
  misc_feature (1)..( 3003): 2750-1469P.txt file - cDNA_ID_2138881; gDNA_ID_2926146; Annot_ID_197735
ttttcaatatgtatatgaattactatcttcacaattttttacaaaaagctaccactctctctatttttctgcaatcactcgttttatttgttttattttttcttacagtttctctttccatcctcttataattttgtctaaacaatatgtgccataccttctaaacttttcatatgctccatatttcttcttcgaaaatctcttacttttcttgttagtataagcattttttaagctcgtcaagatgtactctgttttgttttctgttattctaagaaaatgttttaccttctaaactggtacttaactctatcacttttctcttttgatgcagtttagatccttttcaccttcacgctttccagactgaaagacctcaatttatatcttcgagaatttgattcaaattgatacgattaaaaacaccactatcaaaccacgtcattgttacgtttctttaagttatattaaaaaatgttggattagttgtataaaattctagaaaaattctttctaatgcccttttcattatgcccctttttaactttaccctttttttagccattttcatttttaccctctttagccattatgaccattttacccctatttgaaaattgttttaggttaacaaaataaaatattaatatttttcgcctaaaatatccaaaataaatttcccgccaaaaaaattcgaaaaaaattaccgccaaaaagttttttgtcaaaactagttttctcgcaaaaaaaatattttttggcgggaaatagatttacaagggattttaaaagggtttaaaaagatttacaagaaattttaaaagagttttaaaagatttacaagggattttaaaagggttttaaaatatttacaaggattttaaaagagttttttaaaagatttacaagggattttaaagtgctttaaaagatttacaaagcttttttaaagatttttaaagggttaaaaattgttttaaaaaggttttaaaatatttacaagggattttaaaagagttttaaaagatttacaaggtattttaaaagggttttaaaatatttacaagggattttaaagggctttaaaagatttacaaaggttttttaaagatttttaaatggtttaaaagtgttttaaaagatttacaaggtattttaaaaggatttcaaaagatttacaagagatttttaaagatgtacaagtgtttttaaaagatatttaaagaatttacaagaagaccctttaaaaactcttgtaaatattttaaaatcttttaaaatctcttataaatctcttaaaatacttttaaaatctcttgtaaattttttaaaacccttttaaaatcccttgtaaatattttaaaacccttttaaaatctcttgaaaatatattttttcccaaaacaattttacaaggatttgcataatcatttttttggcgggatttttctttttggtgggaaaaaagtttgccagaaaatttttttggcgagaaaaataaatttttggtgcaaaaatttggtgggaaaatttcagtttctaattacatgttcctattagatgaggataatttggtcattctgttcaagggaaatggtatttttaaaaaaggacaacataaaaagatattgttgcaaaagggtagtaaaaaaagagtagttttgcaaatctcccaaaattctgtaagggtttaggtttaatattatttaattataattatattgcttccttttttataagtttaaatttaatatttgttattttcgttttttattttaaattttaaaatggaaagtaattattatttttaaaaatgttaattaattagatgttaaatatgttaattattgatgtgacagcttccgattagttgttttaaaaaatgttaaataattaaatgctaaatatgttaattattgatgtggcagctttcgattggtcgttctaaatcctatgtggacggctttagaagcaaatagcctcaacttttatatagtatagattttcagtttttggtgttcaatttttcgatcaccggttttgatgagattgaaaaactctgtgggaattttttatggccgggcaacccgaacaccacacgagttgtaaaagtgctttcaaattattttatttattttataaacatttaaatcttaaaaataatatatgagaattaaaattaataaataaaattttaaccataaattaaaaacgaaagtaacaaaaaaaatttaaaaaatgaagtaatttttttttaagattgtaatattttttttaataggatggttttttattctttactttttttcaccagcgaccattttattaagttaggagaactaatccggagtcgatgtacttacatgaaaaagaaaaaaaacttcgtgttcttatattttttgttaggcaatcaacacagacattgttacaacagagaataactctaatataaaataaagacaaaaaatttcaaaagcttttttaaaatattgtaattcttcaaaagcttttaaaatgttgtaattctacaaagcagctcaactaaataaaagttgcattttgcagacatacgaagtcgctaatttttcacatatcggaattggaccgagaaggtggaaactacgcgcctccatcgagagtggtgtaaaccataatctattacataaaaaaaaagataacaaaagagacgttaaagcaatgtttctctgttacgcgctgacgcatctctaacctttttaggttctgtactatctttatcttttagtcaagtgttagaaaagtatcttaatcagacggttagggttctttattattactagccgcaatttttttattgaaacaaataaataaaaaaataacccaagaacaacaacaatctggtctgctgatgtattaattaaagaaaaaaataaaacagagcaagaaacaaaaaaaaaaatgtaaagaaagagaaaaaaagctttcgtagtgtctattgaaaccagagaaaagccaaaggggatg

SEQ ID NO: 23373 - DNA, 3003 bp, Unknown; identical to SEQ ID NO: 23372
  misc_feature (1)..( 3003): 2750-1469P.txt file - cDNA_ID_2138881; gDNA_ID_2926146; Annot_ID_139100

SEQ ID NO: 23374 - DNA, 3000 bp, Unknown; identical to SEQ ID NO: 6110
  misc_feature (1)..( 3000): 2750-1469P.txt file - cDNA_ID_2138881; gDNA_ID_1620845; Annot_ID_170177

SEQ ID NO: 23375 - DNA, 3003 bp, Unknown
  misc_feature (1)..( 3003): 2750-1469P.txt file - cDNA_ID_2138885; gDNA_ID_2926146; Annot_ID_197733
atatcttacgtattagttataaggatagctcctcaaacatctttcaaattacttgttttcttatcataaatttcgaaaaacttagatatatttaatctgcatattcatttagtttatttcataataaacgtctaatttttaggtaaggaatatgtgtagcatgtttggattttatgatcactttagccactaagtggatctcaaaattaaaaagaatatattgaattaaaaagatatagaaagaatgatggttcaagttctgactaattatactctcatattttagttgttatgttgaattaattactaattatgtattagttattttatgaagtctaggtggcaagctctcatgtgctgatgtgtcaagttgtgggagagagttaaccttctttcatatatatgattaaaacatcaaccactagatttttatatgattgtgatgccccttaaaactttgatatatttagcgccttggatttatagatcacatgtaactggattctgaaagctaaagtcgtgagtttttgtgtagaatttttataaaaaacaactttaagaactttaccccacacacaagctttagaaatcattacaacgcttgattagtgttgttgtagtcaacatatgtcattatatgattaagtataagaactagatatgcaacgagattcagaaagttaagtcgtatatgtatttgtgtagaagctccaaaaaaacttctataacatcacccccatccacaaagctaagtaatcatacaacaattcaatcattaagcatcaattcaatccatatcatatatatttatgcataagtctacacttagctaatatctcatctagaagctaacatttaggcaaccaaatcaatcaaaaactctagatctacaaacgaaagaaaataaacaacaatcaatcttgtttagatgagttccatgaactacatgtaaccacatgaaacacataaccctaattcacattggtctggatgaacgagaaatcgctacccttgaccaacccgatctcgatctgcctaagctttctctgactcgtactaatgatggatataagcttcagaccaaaaaaaaattagaaaaatattctaaaaatattctaaaaataataaaagactaagggcgggtaacacataccgattatccgactaacttgactcttagctatccgactaatgataccgaccaccacagtttctctgacgaagcttaacgacctaattagtttgcttatacgtttaagttataataaaatgatgcatgaaaaacagtattgtttgtataaaaatcaaataatataaaaaatcatataaaagacaaaaaaaaaaatagactaagaatatcaaaaacttacaccttattacaaactgtacacaatcaatcataattttataactaaaaaacaacaaaaagtattatatacaacaaattcatcggtttatacaaaaagaacaaattattaatcttgcagtatatattgaattatacgtcttttaaataaaagtattataaaaaagaaaaataacaaaatgatatttagttttacaggatgggttatatggtaggacagattttgggtcgaaattagtttgagactgtataccatgggtaaattcttaaaattaacaatcaaaatacaatttatacaatcttaaacactagacaaaacaactataatttaaaattttgattataaaagatcgacccccagtgtatccacaatcaaacataagtttataccaattaaattaaaatacaacaatatcataagtttataacaaaaaagatatatatatatcatccggtgtacctttggtcaaatcctgttattatgtaagtaagctaaacttttgatattattaatttgtcttaaacgtcatactcaaacacgacgattacacttaaatcccccattaatctttgatattaatatatatatatatatatatatatatatatatatatataattacatattgttatttacgttattatttgttttacgattatatttattttgggtttttatgcaaataaaagggtactacccatatttaagttccaaaattgaaaaatattatcaattaattgaaatttgccactattttgcaaatcacaattatacaatatgtcaagctctattaataattttttttttttcagtcgaatacggataaagaatttagaaaatattttaatatattaacaaaaataatcaatagaattaagattaatagtttaatatattgaaatttccgttataggaaaaggaattctcaccttttttatataattttttttaacttatgcatatatttttttctgatagagttatacagcttttcttatatttatctttaaatatattaataaatttagatttgagacatgatgatatcgtgatcacatgagttagcaacttgtaaaattcaacttataataagatggtcacattaaataaaaacacatgtatgattagaaatttccattttacaacctaaattatatgtctcttttataacaataataataatgcgtctgttaaaaaaaaaagcgtcttttacattttataacccttggtcttctctaacttgctaaattgagtgctaaaacaatattcgagaagcattcttgtactcaccaaaatcttcacatttcttttgtttacaaataaacgtactaacaattcaacctggaaatgttctgaaagaccattagctaaacccaaaaatatatgcacgaacatagatcattactttggtagttacaacttacaacttagtagcataataatttaataaagtactactggttacaactttaaaaaggaaaaggacatcttttactttattaggacagctttttgagttgtaaatttagagcccaacattggattcctcttctttgaccattcctctctacctgaataacccgttaatctctctctgtccctttcttcttcttttttcaagaacaataaaaaaatg

SEQ ID NO: 23376 - DNA, 3000 bp, Unknown; identical to SEQ ID NO: 6104
  misc_feature (1)..( 3000): 2750-1469P.txt file - cDNA_ID_2138885; gDNA_ID_1620845; Annot_ID_170179

SEQ ID NO: 23377 - DNA, 3003 bp, Unknown
  misc_feature (1)..( 3003): 2750-1469P.txt file - cDNA_ID_2138885; gDNA_ID_1620778; Annot_ID_167845
ttacgtattagttataaggatagctcctcaaacatctttcaaattacttgttttcttatcataaatttcgaaaaacttagatatatttaatctgcatattcatttagtttatttcataataaacgtctaatttttaggtaaggaatatgtgtagcatgtttggattttatgatcactttagccactaagtggatctcaaaattaaaaagaatatattgaattaaaaagatatagaaagaatgatggttcaagttctgactaattatactctcatattttagttgttatgttgaattaattactaattatgtattagttattttatgaagtctaggtggcaagctctcatgtgctgatgtgtcaagttgtgggagagagttaaccttctttcatatatatgattaaaacatcaaccactagatttttatatgattgtgatgccccttaaaactttgatatatttagcgccttggatttatagatcacatgtaactggattctgaaagctaaagtcgtgagtttttgtgtagaatttttataaaaaacaactttaagaactttaccccacacacaagctttagaaatcattacaacgcttgattagtgttgttgtagtcaacatatgtcattatatgattaagtataagaactagatatgcaacgagattcagaaagttaagtcgtatatgtatttgtgtagaagctccaaaaaaacttctataacatcacccccatccacaaagctaagtaatcatacaacaattcaatcattaagcatcaattcaatccatatcatatatatttatgcataagtctacacttagctaatatctcatctagaagctaacatttaggcaaccaaatcaatcaaaaactctagatctacaaacgaaagaaaataaacaacaatcaatcttgtttagatgagttccatgaactacatgtaaccacatgaaacacataaccctaattcacattggtctggatgaacgagaaatcgctacccttgaccaacccgatctcgatctgcctaagctttctctgactcgtactaatgatggatataagcttcagaccaaaaaaaaattagaaaaatattctaaaaatattctaaaaataataaaagactaagggcgggtaacacataccgattatccgactaacttgactcttagctatccgactaatgataccgaccaccacagtttctctgacgaagcttaacgacctaattagtttgcttatacgtttaagttataataaaatgatgcatgaaaaacagtattgtttgtataaaaatcaaataatataaaaaatcatataaaagacaaaaaaaaaaatagactaagaatatcaaaaacttacaccttattacaaactgtacacaatcaatcataattttataactaaaaaacaacaaaaagtattatatacaacaaattcatcggtttatacaaaaagaacaaattattaatcttgcagtatatattgaattatacgtcttttaaataaaagtattataaaaaagaaaaataacaaaatgatatttagttttacaggatgggttatatggtaggacagattttgggtcgaaattagtttgagactgtataccatgggtaaattcttaaaattaacaatcaaaatacaatttatacaatcttaaacactagacaaaacaactataatttaaaattttgattataaaagatcgacccccagtgtatccacaatcaaacataagtttataccaattaaattaaaatacaacaatatcataagtttataacaaaaaagatatatatatatcatccggtgtacctttggtcaaatcctgttattatgtaagtaagctaaacttttgatattattaatttgtcttaaacgtcatactcaaacacgacgattacacttaaatcccccattaatctttgatattaatatatatatatatatatatatatatatatatatatatatataattacatattgttatttacgttattatttgttttacgattatatttattttgggtttttatgcaaataaaagggtactacccatatttaagttccaaaattgaaaaatattatcaattaattgaaatttgccactattttgcaaatcacaattatacaatatgtcaagctctattaataatttttttttttttcagtcgaatacggataaagaatttagaaaatattttaatatattaacaaaaataatcaatagaattaagattaatagtttaatatattgaaatttccgttataggaaaaggaattctcaccttttttatataattttttttaacttatgcatatatttttttctgatagagttatacagcttttcttatatttatctttaaatatattaataaatttagatttgagacatgatgatatcgtgatcacatgagttagcaacttgtaaaattcaacttataataagatggtcacattaaataaaaacacatgtatgattagaaatttccattttacaacctaaattatatgtctcttttataacaataataataatgcgtctgttaaaaaaaaaagcgtcttttacattttataacccttggtcttctctaacttgctaaattgagtgctaaaacaatattcgagaagcattcttgtactcaccaaaatcttcacatttcttttgtttacaaataaacgtactaacaattcaacctggaaatgttctgaaagaccattagctaaacccaaaaatatatgcacgaacatagatcattactttggtagttacaacttacaacttagtagcataataatttaataaagtactactggttacaactttaaaaaggaaaaggacatcttttactttattaggacagctttttgagttgtaaatttagagcccaacattggattcctcttctttgaccattcctctctacctgaataacccgttaatctctctctgtccctttcttcttcttttttcaagaacaataaaaaaatg

SEQ ID NO: 23378 - DNA, 3000 bp, Unknown; identical to SEQ ID NO: 6109
  misc_feature (1)..( 3000): 2750-1469P.txt file - cDNA_ID_2138897; gDNA_ID_1620845; Annot_ID_170182

SEQ ID NO: 23379 - DNA, 3000 bp, Unknown
  misc_feature (1)..( 3000): 2750-1469P.txt file - cDNA_ID_2138909; gDNA_ID_2926146; Annot_ID_139096
ggagatgagatggcagtgaagaccatcaacaaacagaacatcttgaagatctaaagaagagcctaactgaacactgccttgttttgtagcggttgtaaaacgtccatcaggaagtttaatcaaaacaggaggcatatcacaaacattacggagaaatgcaagagaaccagtcatatgatttgtggctccagaatcaattatccaagattcaagaaaatacttaccagactgatgatcatttaaggtagatttccgttcctcaagaatcgtttgtaaaattttccattgtgaatcattcagcccactaagtcctatgcgatcatctgatgtcaatggagaagtgagcgatgaattcgtaacaacattggcagccattccagaagaagcgacatgattaatagaagatccacgaccatgactctgttttcctttgaacgaacttaaaccaccacgtgaagaagatgcagtgtttttaagacgcaatttttcttcgagccaaggaggatacccgattaatttgaaacattgttcggcgagatgaccaacacggccacaattactacagactctgttttctgaagaatctcgaggtcgtgaagtagtttggaccgcgaagctaacaccgtcaaccctctcgttatgtaagcgactcaaggatttggattcttcgtcttgtgtcaaagcattgtaagcttcctcgagagaaggtagtggcactcgagagagaagagccgacttgacagctccgtacacagattcatcaagtcccataagaaactgatgcaatttgtcttcttcacgttcttttctgacgtcgtccatggttttagcttgttggtaatccgccaagctacaccacagttgagagagacagccgtagtaagtttcaatggccactcctttttgacgacaggttgctaactctgttttgagtcgctgaacatgttgtccattcttgacaccaaagcgtttctgaatgtgtgtccagagctcatgagaatcgtcgagatgagacatagatgtggaaacagtttcatcgatggtgagcttcatccatgaaaccacaagagcattgttggcagtccaatcttcgaaatcgggatctgtctcaactggttgtggaatagatccatcagcaaacccaaatttctttctagcttttaacgccaaacgaagatttgtggcccattcgtcgtagttgggtccacgaagcaacggtttggagatgagagttccgggattatcaccggatgtgagatcatatggcgagattgtacgccttgtttcagtcctagctggtgtggtggagctagcgagagccaattcagtactcatgatgaacggagagtttgatgcaagtattaagtagagaagttagaaggaataagaaagcgatctcttatagcggaaggagagatcacagaatcgatcacaaaaaccttttagtagttaggtattgtgctctgataccatgtcaagaatcaatcgaggttgtgaaaagaagattcttattgattacggcaagaggcaatgcctttatatacacgataagtttagacctagttaatctatacaatataaatgggctaaggccacacagcccaacatatattgctcataaacaaacttttcaattgaggcaagtctcaacatgttttgatcaaatcgacgcttttctaaaccactttgttttctctttttgcatcgtgaaccttccttgatttggaccaaacttggaatataagagataacatattgtttacagtttccgtctacaagattcagtttttctaagtatccatcctctccgacgatgctaataaatgttttgagacaattagagtcggggtcaaggtttctaccgaaacccatgaagactttcttctcttcgtctacgaagaaactatgtgatatctttatcttaggtctcgtatcaattctaaataacttgctccacgacaccgtttcggcatcaatcttagtcgtaatccatatctccaactcagataacgctgaaataaagctgcaagcttctcttctttaacacaagataaagtcacatctacagcgctgcacggtagagggagaagcggcccgaatctctctcttgtaaaatcaaaacagataatgtgatctttgtgaccctgtgacctcctttctttagcacaccagtaagtgtttcccttaatagaaacgccactggaagaacaatgtacaccccagtgtggagtgacatcaagagttgtctataaacccgagtcaaaatcatagatttcataccaaaaagattgtgtttcgggtgtattgtagaaataatctagaaacctcaggaacttaaaggtacgacaagattccttatcttcgtatccaagagcataactaaacctatcaaatccattcggaggttgagaatatcggaggttgatccaccttgtatgcccccaatacggattccaaaccaaaaccctagtaacgtcgtctttcaagatgcataacaacaaaccctcaaagtggaaaatattagatatactcacttgattgtgaatgaaaagttgacctttaacctctatagatggatcaaagtcgacgacaccgctcattaaacaaagtttgtgaggcatcatcatgatcatcatagtctctccatctcttgttggtgttgtcactttaccaatgtgcatcttcgtaaaaccctcacttttggataaattgttccaagttttgcaagttaatctcaccgctttcatagatttcaaaggaaccctagaaatgatctcctcgatcaaatcccttggaagattgtagatcatcgtcgtcattgtttcaactttcacaacgaatgatttcttgcagcttagggaaaggaaaaaggtatacacgacgacaaattataaccctaaataaatttgggccactagtgggctttcagaatctaattgggcttaagcagacccaatttgtatctggcgcgaggttttagtttctgcggaggaggagatg

SEQ ID NO: 23380 - DNA, 3003 bp, Unknown; identical to SEQ ID NO: 19525
  misc_feature (1)..( 3003): 2750-1469P.txt file - cDNA_ID_2138953; gDNA_ID_1620671; Annot_ID_164104

SEQ ID NO: 23381 - DNA, 3000 bp, Unknown; identical to SEQ ID NO: 19526
  misc_feature (1)..( 3000): 2750-1469P.txt file - cDNA_ID_2138953; gDNA_ID_2926200; Annot_ID_201802

SEQ ID NO: 23382 - DNA, 3000 bp, Unknown; identical to SEQ ID NO: 19521
  misc_feature (1)..( 3000): 2750-1469P.txt file - cDNA_ID_2138981; gDNA_ID_1620671; Annot_ID_164117

SEQ ID NO: 23383 - DNA, 3000 bp, Unknown; identical to SEQ ID NO: 3884
  misc_feature (1)..( 3000): 2750-1469P.txt file - cDNA_ID_2138993; gDNA_ID_1620671; Annot_ID_164121

SEQ ID NO: 23384 - DNA, 3003 bp, Unknown; identical to SEQ ID NO: 19520
  misc_feature (1)..( 3003): 2750-1469P.txt file - cDNA_ID_2138993; gDNA_ID_2926200; Annot_ID_201785

SEQ ID NO: 23385 - DNA, 1470 bp, Unknown; identical to SEQ ID NO: 7509
  misc_feature (1)..( 1470): 2750-1469P.txt file - cDNA_ID_2139018; gDNA_ID_1621149; Annot_ID_173157

SEQ ID NO: 23386 - DNA, 3003 bp, Unknown
  misc_feature (1)..( 3003): 2750-1469P.txt file - cDNA_ID_2139018; gDNA_ID_1620785; Annot_ID_168122
taaaatatgataaaatggtttcattaatcaagtgatactggttaagtggttcttacttaaggaagaattgcttcttatgtcgccaaagaggcaaagatcaattcttcttaaacgtgtgatttacaaaatcattttatttgatcaatcgaaatggtgttatatttttacgctcattaaaaaaccatgtgagtggactattcaatagctaaatttactatatacagagatttttcgggtggtagaaacccccgattacacctgatttcattggcttatatggccttgtgccgatatagtagtggacatactctaaagtcttgaaaaatgcaccaaaaagctaatactttgttaacatgggctaaacattttgcctagcatatatgatccggcccatttattaatatgtatctacatctttaagaagtaacgaatttgtagtagcaaagaatgaatggaatcgatattgttcagtgaccatgaaattctcatatattgccataagcccataccttttttttattatttatactttttacggtcgaagaaaaagagaatagtagcaggattcctactgcaggcaatgataataaacttatagaaattttgaacagcgaaaagaaaacgacttgagattcaatatcaatcgttggtgctgtccaattggcaatgaagtaaaatttatgaacattgaatttttttaatttacctattaagcttcgatcgtattcaacctaagaatattacattttataaaatttaacagtaaaaatatctaatttaagagataattattaaaaattatataaaaaagtgactgactttttaatctaattttaatttattaggagaaaatctactttgaaaattattatatatatatatatatatattgtgaggtagaattttttatttcttaaaaaggtttactattttaactgaacattgtgtaaacgatgaacatcataactcgattgtgtccaattcatatctaatagttaaatgaatcaacgactcatatatcacggagcaaaacgcgcatgcagaaaaatccaccaagcgaacaatttggaaagcgatatttctgatgaatcgttgatttccccaatattacgaactttcctgaaatctttcctagccgtcgaatatgaaccaaatttattacctgacctataaacacacacatatgcaggcaaatggacacatgtgttctatgaatcagtgttggtgaagagagagcttgtcgtgtaatgagagttgcatgtgttcaacaactttgtgtatgttttgtaattttcctcttgtgatattttctacggtgagaattccatttgcaaggttacatcaatgggtgaagcctgtacgtccaacatgtgaccagaccttcttttatatcaacggtccaaattaacattacattaacatacacaaatatattatatatttaatactattgttcctgttcttctttttattgtcgttacctcgttagcatcaatgacgaatgaaaatgacaaacgatacattgtgttgttcgaattcgtgttattgttgccaaaacgatgtgataataatggaactatgttcattgtattggcgttgcccgctggtttacaacgatctatttcatcgatgaattttggtaattaacgatataaaattttcaatactaaaagacacacctttttcaacatttctttttataacttatgatgttcccattccattatattatagctcaacttacaaactaacttgtcacatgtaaattactcattgactcgtgacaactattgacggcaatattatcaaactcgtggttggaaatattttaagtccacaaaggaggagaaaataaaattcttgaatattgaaaattcttatacctctatgatataaaagaaaataaaatcaaagagaagtaccacaaaaacaaatttttagtatttaaaaatgccattactttggaaaaggtcccaaaatatcacaaaatctaggcttaggaagggtctctaaacgtttattaagaattactaagcccaaaacttgaaaactcctaaaactctttcttcaaatttagactaatcatttttaattctctccaaaatattagtaacccttgtaaagcctaaacattttagtaaattttatgatttttggtggtaattttggaaaataaagcataaaatgtggtattccgaggactgaccaaatttcaaaaattcaaataaatgattaatatcctaaatcaatcattattttttataattgtttttgagaaacttatattaatactattttcaggcattttcttataaattaccctatggttttagtaggcaacaaaaagatgaacgtctcagatttttttgaattcaatttaatcttaacaaaagcgataaatatcaagaagataattgggtacgtgtattgtgtactatttcaaaattgatatttgcttccataacgtaacgtaacgtaagacccaaagattaacacttggtttcttcatggtcgtagattattaaaagtttataactaatgacgacaaagtttaaacgaaaaacaatattttctcaattttcactagttttttttttttattccagaaaattattagtatacaaccaactatttttacgattataaacttttatttgatgatattcataatttagaaaaaccttaaacggatcttaatgtcaatatcatcagctcatgcaccgcctctcggatatgttgacaaaattaccccatacaatataaaccaccaaaccataaccacaaagggtatattcgtatattataaaaatatctgaatagtcgaacttgtcgttacactcaaaaacgaaatctttccctcctctgttctcaatctttctataaattctcttcttcttcttcttccattttcccaacaacacaaagtctctctctctctgataaaatcttaaaacccacctcgagatcatagtcttcatcaattagccataaaaaagcacaatg

SEQ ID NO: 23387 - DNA, 3003 bp, Unknown
  misc_feature (1)..( 3003): 2750-1469P.txt file - cDNA_ID_2139022; gDNA_ID_1621149; Annot_ID_173159
cctcgccatacgggaactgtagccaggggaattcagaaaccgaacctttcatagccgcacataacatgatccttgcacacgcaaaagcggttaacatatacaagaccaaatatcaggtaataaaactcatacatcaaattaagacctggtttcgtgagttatcgatataaatataatgtttttgcagaaagaacaaaagggaagcattggcattgtggtacaaacatcatggtttgaacccattagtgattccaatgcggataaagaagctgctgagagagctcaatcattttactctaattggtatgttatattactatatatgttgagatcatatttgtagatatgaagtatagtacttcacccacatatggaatatatattgttttatctatttgtattctaacatgtactaggattctagatcccgttatatatgggaaatatccaaaagaaatggtagatattcttggaccagccttgccacaattttcgagcaatgaagtgaagaacttagagaagtcgagggcagatttcgttggtattaatcactatacaagttacttcattcaagattgtttgacctctgcttgtaatactggacatggagcttttaaggccgaaggatatgctctcaagttagaccggaaaggcaatgttactataggagaacttgtaagtacattcattcagtttcttatattcaatattttacgactatattcaaatgttttagtaaattttattgtttattgaccatgtttctattgttagaccgatgtaaattggcagcatattgatcccacaggattccacaagatgctgaattatttaaaagataggtacccaaacatgccaatgttcataactgaaaacggtacaagacctcaaatttgatcaatgatcgagtcatcaaccatatttgaaattatcatgaaaaattattattaatggcttgaaggttttggagacttgcaaaaacctgaaacaacggataaagaacttctaaatgatacaaaaaggatccaatacatgagtggatacttagaagctttacaagcagcaatgaggtaaataatttatgtaaatttatgcagaaatccaattcttaaaatcatgcattcaaatagtctttaaaccaatttttatctaatgaaaatttactaattctatataagttgtgaattgttttggtagggatggagcaaatgtgaagggttattttgtgtggtcactattagacaattttgagtggttgttcggatacaaggttcggtttggtctattccatgtggatctaacaactcttaaaaggtcaccgaaacaatcagcttcatggtacaaaaattatatcgaagaacacgtgaatcgaagagatatcgtagataattattaaacacatttatttttaattcgtattcactgccaaagaaagtcaaaaattacaaaagcatttaaaattgatacttatcattgttgttgattgttgaatgattaaatttgtcttttcctcctaaaagtgaatgtttaatgtgttacatgattatttgtctaatcttgcacaataattctattagcttaagatgttgaagaacacgtgagaagagaatttaggttttttttttggtcaaaggaagaatagtaattcgtattcctaagtaaagaaagtcaaactaggaaagaatttatgtaacttcgttaaatgaatgattaatggttttctttaccttaaagtgaatgtttaatcagtgttacgcgccatacggaagtaattgtctaatcttgcacaatcattcaacacgttttcaaagaaaactttttttgttctctatgatgataatagtgttaaatcaaaagtagtacaaaagtaaactaaacttattttagattaaaaatcaccgaaaaaactaaacacgcgttagaaagcatttgacatcacctccaaatttaatttcacgcaagcaagcgtttctaagatatggattctaaacgctatatcactgttttttgtaagataaattcttcttaattttttcaataaaaaaatttaaaattaaaaataaaatcataaactaactgataatgaccaaaggaaccataaacacctagaaaattatatttctgtgttttctatctgcggtttaacgtcagtaacatctaggaaagttattttacgaaagtgaacttggtttttgtttgattgaaatatgtttcagactttcagaagaaaaaaaaagatacttatttaaaatatgttaagattttagttcacttcaaattatgtaaacatgctgatttttttttttttttttttttttttttttgcaatcatccttcaatattgtctgcgaaacagtcaagtttcaagtacgattcacaacatttttcaaaaaatttattcattcatttcactcccaaaactttttaatttacaaaactacccgtacacgtatattggttgaatagaaattttttgaatatttattatattttgagttacatatagactatgatttaatcaaatacacaatgagtcgttaaacaatctaaagaaaaagacacacgaacaaactgataacatagataacatataagcaaaataggtcggaatcaacaattacatatataaatggttgcgtggttaatgatttcatttggtattttcacgacaagatcgtttctaggtacatagaagtcaacttcgttgccatataaactgtataacacttagtcatacaatctggtttatttatcaagttcaaaaatttaatttaatcaaaatatttgtttgcgaaattttcaatcgagaattaaaaaattaaaaaaagttgcgtggttgagttaatcgtttggtctccatcgctgatatcttcaatttctctgaattaatcttcacatagctgtataaagacctagaaaagaaaacagatatactagtaaccaaacttagaatcaagaaagaaaaaaacagctatagagttgaataagaagaagaagaagatg

SEQ ID NO: 23388 - DNA, 3003 bp, Unknown
  misc_feature (1)..( 3003): 2750-1469P.txt file - cDNA_ID_2139034; gDNA_ID_1621149; Annot_ID_173163
tcattttatctacttaacatttttgaagtgcataattgctctttttttaatttataaaatttttgacccgggtctttctttatacttcatacatattagtctaatttaataaaatcaaatcctttactaatttagatttttgagatctttgggttttctttttctaattaatgtaaaattaacaaaccatttaccaagaaacatttgttggttcaaaagttttaggaaacaatgagatgattatgtcaaatcatcattatttataaacttaaatatatttgtttcctaaataataagaaaaaatattaattctatatttaatcccacaaaatgaattaggaatatgtattaactaaaagattttttatccttattttctatagcatctacataacatatctttaaattataaaaaaatcacataaatattttcgggattcagatttcaataattaggatgtgaacaggttttctaaaaatatcgttcgaatatattgaagataaaaaaaatacaaataggaaatataataatttaaaagatacaaaatatttataaagaaattttgttttaaaaaaaacaaatttcaatgaattcaatataaaatcttcaatacgaatccgatattgattcttaaataaaaatattaatataatatacaatttttcttattagactgaaattttaaattgactcgaagtatcttaaataataatattattaaaaatagaaaataaataatttgatttttagttatcacgggacggattatacggtggaacgggtttagatgagacatgacaaaatattatcccgtggtgtggtctatcaccagtcaaattctataagataaaataatatatattaaacttactaatatcataattacgactcactaaaaaccgtacacaaccttatcgagaattattaatcaacacaaacaacaacaaattctttatcttataaaaaaaaaaatatatatatttaacccgcggtataccgcgggtcatatcttagtacgttataaactttatactacgggtgaaatcctagattgatattaatacaaattatatactatgggagaaattaacaatcaaatacaattataaaatcttaaacactaaataaaataaacaatattatttaaacaaatataaaattaaaatttcaaatttttagtttaaaaaatatagttttgtgatgtaccatacatttaaattaaacaaaataaaaacatatatttattgatcaacttaaaaataaatatttaattttttaataaaattataggcatgcagtataccgcggattaatatctagtttaaaaacttaaaaatattataaattaaaatttaataatcatattgaaacgaatgacgacgttttgtaactcccataagattatcgagttaccaaaactcaggcgagagagagagatcagaaacggaagagaagaataattcagtgaagaatgagactactctctcctctgatcatcactcattgatcagatttgcatttttgagtctccatttctgaatcatccaatccgatcgacgttctccggtattgatttcgttgatcgggtttttgttaagtttttaatatcgatagctccgattccttaaccaaaccagtacgtaccatacacgagagagactagcacatcactagctcagctcacattacaccatacgagagagactagcacatcactagctcagctctcaagtctctcatgcgagactcgcacaattcaacaacaacaacataaagcataatccctctaaattgatctctttccttatttatactagaacggagtttgttagagatatttttatatcttcttcaagcaagcttccttctcacgtgcctcttcacttgcacatgtcttcttttgctttgtctcccattcacatgatacaccaatcgtatcagttttcagtcatacaatcctttgtcagcaaacacactttgttagccgatccaaaataaccaattcggtttgaagttcaccgattttcgttccacctctacacggttttttgtagtgaaaaatcgtcgagaaaattatgaaaattgagagcatcgtctcgtgggagagttcaactagatctttatatttacttatgctctttttattgtaaaaaataattgattatatacttcttcattatatacatattttgatttacactgtttcactaattgtagtttccatggtatgaaatcacttttagaaatttgaattatttctatgttttttttttttggggtaggagatgggatcgaacccccacttttattaataactaaaaaaacaatcacacccgaacattcagagagcccgcatacccatttacatactcaagaacaatcgacataacactatccaaagtagaattaaacaaatgaaaatctaagggtaaagtgtaaatatatagctaactcattcgcaagacgattagcctttctatacgcatatgaaatccgtactacccattcctttgaaaaaaagttatttatctatgtccaaagaaaaccaaccaccatctctaagccaatctccagctcgaagtgtatgataccgcgatccagctatatgtgagccataatatgctccccatagttccatggtatcacttttagaaatttcatttatttctgtcatacatattttcccagatgtaatgcatatttttttttttctttttggatattcgaattattcacctttcaagcgaacgacgacgtttggtagcgtcacattgattattatcaagtattcaagttactccaaaacttccaggcgagagagatcagaaaacggaagaaaaggtgatgagagagttagtctcttctgatcatcacttcttcatcttcaaccattgatcggatcacattttgtttatcgaattcaatcgaagattaccgattttgattcgaaattctcctgttttgatttcaccctccagcggtgatcggagaatttcgccatg

SEQ ID NO: 23389 - DNA, 3003 bp, Unknown; identical to SEQ ID NO: 18505
  misc_feature (1)..( 3003): 2750-1469P.txt file - cDNA_ID_2139072; gDNA_ID_1621149; Annot_ID_173185

SEQ ID NO: 23390 - DNA, 3003 bp, Unknown; identical to SEQ ID NO: 17573
  misc_feature (1)..( 3003): 2750-1469P.txt file - cDNA_ID_2139126; gDNA_ID_2926130; Annot_ID_196859

SEQ ID NO: 23391 - DNA, 3003 bp, Unknown
  misc_feature (1)..( 3003): 2750-1469P.txt file - cDNA_ID_2139232; gDNA_ID_1620682; Annot_ID_164518
tgaggtttacaaggtatactataatatcttcaagtacaccctaggttaagtacttcgtattgattctttgattggataacgagatgatgctgattaaaaagttaaacggatagggtacattttcaaatgggaaagaagttgcggtgaagagattgtcgaaaaattcaagacaaggcgaagcggagttcaagaccgaggttgttgtagttgccaagcttcaacacagaaatttggttaggcttcttggattttcattacaaggagaggaaagaattttggtctacgagtatatgcctaacaaaagccttgattgcttactatttggtctgttgcatttcaatgattctttgaccattaatcttgaaacttggggttgctaatctcaagatttaactgtaatccatggatttgcacagaccctacaaagcaaattcagctggactggatgcagcgatacaatatcattggaggaattgctcgggggattctatatcttcatcaagattcacggctcacaatcatacaccgtgaccttaaagcaagtaacattctcctagatgcggatataaatccgaaaattgcagattttggaatggctaggatctttggattggaccaaacccaagataacacaagcagaatagttggtacctagtaagtcttccacttaacatctcataacttataatatgttgaacattttacattgccaacatatacactaaagttttgttgtggattccagcggttacatggctcctgaatatgcgatgcatggccaattctcaatgaaatctgatgtctatagcttcggagtgttagttcttgagattataagtggtaggaagaatagcagcttcggcgagtcagacggtgcacaagacttgctcacacatgtaagttttaagacaatcaatatatacctctcttacattacattaagtaatgttagctagaactgattgcttgattggtattcaaggcttggaggctttggactaacaaaaaagcattagacctcgtggatccacttatagcagagaattgccagaatagtgaagtggttcgatgcatccatatcggtcttttatgtgttcaagaagatcctgcaaagcgtccggcaatatcaaccgttttcatgatgctcactagtaatactgtgaccttaccagtgcctcggcaaccagggtttttcattcaatgtagagccgtaaaggacccgcttgattcagatcagtctaccacgaccaagtcttttccagcgtctattgatgatgaatcgatcacagatttatatccgcgctaaatatgaccttaaacttcatgcttgtaatcaagcttacgcaaatgtttacatatttgtagaattgtggatgtgatcaaccctaataattttttagttttgatttggtttgttaaaaccatatgtattttgttttgattttttaataatgaataattagtctagtctcaacatcaccaccgattgaaaaaaatgagagagggagagaacacttggaatgttggcattacagtttggttcattttaaaaatttgggcaatccaaaagctataactttggagttcatttcagcgtctaagagccaagaggatatatacctgctttgaagtcacaatgtatggttatgatcttgaatcattctagaatcgctttagcaatacctccaatgatcttgtaccatttgatttggaaacagagactaaacagagtacagtgggaaggtgatttacatgatttgtaatgtggtgaagtaaatgaaatgtgaactatctatcacgtcaaaagtttttttttttttttttcttgttgtaaagtaaactaataactaatacaatattttgaaagacaaagtcatctacacgaggaatttaaatgttagactaataaaacatgtggaagagataaccagagaaaatagaattacaaaattccaggttttgacgtctatcaatctatttccgagaaaaataaaaaatattgggtttgaatattatttaataagttgatgactattctgcttggcgccgaaactttgggtcaataagacagcaccgttagacttccttaccatacaagtaacaaacggaacagttattaagttaaaacagtcatttcgcaaccctagttgattcagtttgtagccttatttagaatcagcaccaatcaacgcgctcagtggaaggttcgcctacaaagaaataggctttgatttttagagtctttttttttggaaacaaggaactttacaaatatgcctagacttatatcactcacatctcttttcataccttctgcactttttcctataaattatttttcaattttttttatataaaatattttcatacatctagatggatccttcacaacttttgagattattttgttattgttttatggattttgatattcttcataaaatttaagttttattaattttcatgatttttaaactccattaaaaattgtgttattcaaaggcttaagtttcattaaaatatatattgtttgtaaaattttattcataaaacaaaaaaaaaaaactgtggatatcctttacaatattaaaattattctataactacaatactctctacaatcttaaaaatctctcatttcttgaaagttgaaaccaaactcccatattatttaagaggtggagaaacaatgattaagtttttgggttttgctcaacaaatgtttttttggatcaatgatccaaagattccaaacactaaactcaacgtcttcttccaataacttttacttttgttgttaataaaaatgacataaaaaagattaatcgtatacagtacattgagtttgattgacgactgactttaaagtcgtaacaaaccaccgtatatttcacgttaatcaaataatcagcactagtcagagagagaatataatttgtcagtttataaatggaagctgcataatgtgaaactcaaatcaaggaactcaaagaaaaaaccatg

SEQ ID NO: 23392 - DNA, 3003 bp, Unknown
  misc_feature (1)..( 3003): 2750-1469P.txt file - cDNA_ID_2139439; gDNA_ID_2926183; Annot_ID_140644
tagatgattagaacaaatccaataaacccatacatttaccaagaaaatattaaaacataagatacatgacaaagtcatatatgcaacatgaaatataagataaagaaaacaaactcttagatcattttgcagacaacgttatacgacgaataatcaaacaaacgaaaaatgattctccaagaacatgttaaatttcatgttcatcagaagatcataattagtagtaagtaggttcagacgtgtagaagaaaggaccagcccagtaaagcttgaagctcttgtcttgaagaatacggtacgtgctcaatggctgtcctctaacacctttgttcacatcggtcggaaaatcgcaatcagcgagtggagatttgtaaaggtaagttttgcatttggtcactgtccttcctgcacgaagctgcgaagggaatatcgtggcgatgaagtaacctttagcatcagttttgctgctcaatatcgatattggaactaactcattcccatatgcatcgaccttcacacacgcaattcttgccgttgcacctgtcgcaaacaaacaacaatacgatattcgtttggttagaccttactatgctctaattttctcctaccattagaccaattcgtcttggtatatataattaaagaagttatgttaccttgaattgggtaagttttgccaccggacttgcacttgatgatcccttcaacggcgatgggaatcaattttccggtctccgggtcagcttcattgccgtaataagcaactgaagatatgattagagatgagaagacgatgagagaagctgcaaatgagaggcgtgagaaagccattttttttttttgcttgctttgtttatatgttgcttaagcaagtgaagttttttgaaaactaactattgggttttatagattaattgcgttgaaaaagaaggttaattttctaattaaattatttggtttagtgtacattaactaataagaaaacgagcaacttgtaatagtaaaaccaaacaaaacttgaaataagaacaacgtgtatgcacggtagacaatagtgttattgtcccgacgtgagtcgcattatagtgtgtggattaccaattccaaagacggttctaacattatggatggacaagcatatcagttttaacttttaaaagttcggatgtctctaacaaataagggcctgactggtttaaacgcagcggatgcggttgcggttgcgggagtttgcggaaacaggcggttgcggtttcaagcgttatcaagtgttttgaacgactggttgagcgtttgataatgagtgcgtttgcgggagttttatgattggtaaaccagcgggtgcgatagtaattaaataaaaaataaccaaaataaatataatatattactagtaaaagaaaaaaatacaatatattattatgataaattgataatattagaaaaattaaacatgcttaataattaaaaccataaataaaacattaaattcaaaaataaataaattttgtaagaaaaagcttagtactttatgcatttggtacatcaccaaaaattgcatcaagtagtgtaataaactgtaaataacgttgaactcgtgggttttccggattgcctctatacatatgataaagttctaacaagaaacgggtcatctcgtctgaccaaataattttctaatcgagaaaacaaatcaaaacatgtattcaatcaaaaaactcaaaaaaatacaaaataaataaaatgacgatgccataaaatactcagagaattacactagctaatgaatggatgaaaggatagatcatacttacgtttgattcttgattttgattttgattttcgttagtttgggtagatgccataattgagagaatagggtttcaatatattgattaggattttctgataagaataagatatatagggtttgggtggaagacataattattttagttaattaaaaaaaaaaattaacctaaccgctaccgcccgcaaccgcaaacgcttgcgggaaggaacttttaaaatatggcgatttcgagcggtccaaagcggtatctaacggtttttatgattggtgtcaaacgctaacaactgctaccacccgcaaacgcagcgtttgcgggtgacagagggagaaccaatcaagctctaagactaatcggaccaatttagcaacttgtgtgcttcgatgtgttggactgggctagattgggcccaaatagcctgttttaacattcccaaagatccaaacaattccttcttctttcttccgaacaattcaatgtagatccgagcgaatctcctaaattactaaaatgcacaattgtgctcagcttaccaaaaaggcccaaaagaccaaaacatattctgattttttctctttagatacaataaaagtaatttatatagattagaggcccaataaggttcacgtaggcccaaacatattaaaagtaactcagaagagatccatcaaaattttgattcacacatctgtttaggaattaaaaatattatttgatcggttattcattccttttcatgaaatcatgcaaaaaatcaaaaatcatttttttctctagaaactacgtggcgagaaagcagagcaccagttgtcttcttgctctgattatctcgttgaaaccgctttcaaagcagagcaaaagagacgacaccggagcctccactgctttacttttcctttaaactgtgactgctttcatttatataataaaatacatacactctcagagtcacatgtactctcctctaacataaacacgtcacttgtagcgaaaacagtatcaagaaaaagagaagatcaaacacgtcttcttttctctctctctctttgtcgcctaaaattccagaatcactctgctttttacccttttaatcaatgatttttccttttagtagcaatcgttggtgattcgaaaaaccaaacttttctcggactaggattctagggttttagtgatcatctgaatattcatg

SEQ ID NO: 23393 - DNA, 3003 bp, Unknown; identical to SEQ ID NO: 23392
  misc_feature (1)..( 3003): 2750-1469P.txt file - cDNA_ID_2139439; gDNA_ID_2926183; Annot_ID_200399

SEQ ID NO: 23394 - DNA, 3000 bp, Unknown; identical to SEQ ID NO: 21185
  misc_feature (1)..( 3000): 2750-1469P.txt file - cDNA_ID_2139458; gDNA_ID_1621182; Annot_ID_174320

SEQ ID NO: 23395 - DNA, 3003 bp, Unknown; identical to SEQ ID NO: 17583
  misc_feature (1)..( 3003): 2750-1469P.txt file - cDNA_ID_2139462; gDNA_ID_1621182; Annot_ID_174321

SEQ ID NO: 23396 - DNA, 3000 bp, Unknown; identical to SEQ ID NO: 6258
  misc_feature (1)..( 3000): 2750-1469P.txt file - cDNA_ID_2139462; gDNA_ID_1621085; Annot_ID_170512

SEQ ID NO: 23397 - DNA, 3003 bp, Unknown
  misc_feature (1)..( 3003): 2750-1469P.txt file - cDNA_ID_2139509; gDNA_ID_2926131; Annot_ID_196950
ggtggggttagtcggcctagctgttatttccggtgggatctttatccgtactacagagcttttgacaatgttgtaagagttcctgctcctcctcctcaagcttcttctactattatcgattacgggagagacgagaaaagttttcaaggaagcaacatagcaattattgtggtcccttcagtcatcaatctcatcatatttgtggttctaatattctcttggaagagaaagcagtcacacaccataatcaatggtaaagtcttttaaaataagcaacatatatattccttatcttactaagagtttggttttaaacttgacatgttttatttgatgacgtgcagatgtttttgattcaaataatggtcaatctatgttacgttttgatcttcgaatgattgtaactgcaaccaataacttctctcttgaaaataagcttggccaaggtggatttggatctgtctacaaggtaaagaaactagtaagaagagtcctaacaaaatcttaagatgggtcagtgatctttaattatagcatgagaattcgttttcagggaatattaccaagcgggcaagagatagcggtaaagagattaagaaaaggttcaggacaaggaggtatggagttcaagaacgaggtcttactcttgacaagactccaacataggaatctggttaagcttcttgggttttgtaatgaaaaagatgaagagattcttgtctacgagtttgtccccaattcaagccttgaccacttcatattcggtgagccttcgcgagacgagactttgcatctttgcatgttacactacttttagaaaacaagaaaaaaaaactgtttctttgagatgtgcagatgaagaaaaacgccgagttctgacatgggatgtgaggtatacaatcatagaaggagttgcaagagggcttctttatctccatgaagattctcagttgaggattatacacagagatttgaaggcaagcaatatccttttagacgcggagatgaaccctaaggttgcagattttgggatggcaaggctgttcgatatggacgagactcgaggacagacaagcagagtagttggaacatagtaagtaagctctgtttttatttttaaagattctttgatcagcatcactattaatatgatttggttaatgcagtggatatatggctccagaatacgcgacatacggacaattctcgacaaaatctgatgtttatagctttggtgtcatgcttctagagatgataagtggtaaaagcaacaaaaagttggaaaaagaagaagaggaagaagaagaagagcttccagcttttgtaagcttatcacttatgtcgatcatctttactcttcttcttcatcttcttatcgaaattttaaaaattatttgcaggtgtggaagaggtggattgaaggaagatttgcagagatcattgatcctttggctgctccgagtaacaatatctcaataaacgaagtaatgaagctcattcacataggtttgttgtgtgttcaagaggatatttccaaaagacctagcattaattcaatcctcttttggcttgagagacacgctactatcacaatgcctgtgcccacgcctgttgcttatcttacgcgaccatcgttatcacttggtcattaatgaaccgtcaatcatgtatgttttatacctatttgtctctctctgtacaatgaatgacaaatgttgagaaaagagatgccgtgtaatgtaagcaaacttatgtttgatttgtgctaaacttatttatattaaatgaatatttgatatagccagcgttttggataatgttggaaattggactgaaacggaggaacgcatagatgaaattaaagtccaatttctatgaaagttcacacgagcagaaacaaaaactttgatctaatgtaagaggaaatgcgtgcggtaggggttgcgtagtcataaagaaaggacattgaacaaaggcacatttttaaacttatatgtaagagcatcatgggctcttaaccatatttagaatttaaatattgcacaatcaaaatacccctcatgagtttttatttttgacaactccaatggtagaagttctaatgaggctcttaaaatttaaatttttgaaatttatatgtgtttgtgtaacaccccgatttcaggaatatggtggtgcatacggtgaaatttaaaataattgatttgaccatttatattaccaaaatgcatttatcttttcgatcaaagatgttgaaaatgctcaagtaaataacatttgacattatattttacttttttcatgtttacaataaagcttcgttttgtatgatctgaaatataaaattttctctatatttataaccaatttactatagactaaatatttttaaattacaaataccgaatgactaatccataaaactgtgatggacaccatatataaagctatattggacgattgtgggtgttgttcattaaattgatgatttccactatgtcaaacctttcctccaaatttaagaatgacaaactatccaaaattattttcaaagatttttgaaagactcactacgagtttctcagaaattaacaattgttacaattttcacttcttttttcttcctgaattgtcacattctttatacagtatatgagtatgactcgtagaccaagcaaaggaagacttttttggtcatgcatgcgaccaaaaacaagtacttacataaccatattgaaaggacaatattttcaatacttctagagaagaaaaaaacccttagttcatacgaagtgattaagaaatgtttaccctttctctacggctatttgaatttgaatggccatctttgaagtcaaccattactcaaattttttcatgtgtactcaaccaaaacccattctctctcatgtcacctaattatacacatatataaacatttattacctcattaacaaaaaaaaaaacaatgaacaaaaccctaaactccattgcttaacaatg

SEQ ID NO: 23398 - DNA, 2463 bp, Unknown; identical to SEQ ID NO: 6122
  misc_feature (1)..( 2463): 2750-1469P.txt file - cDNA_ID_2139509; gDNA_ID_1620846; Annot_ID_170196

SEQ ID NO: 23399 - DNA, 3003 bp, Unknown; identical to SEQ ID NO: 23397
  misc_feature (1)..( 3003): 2750-1469P.txt file - cDNA_ID_2139509; gDNA_ID_1620847; Annot_ID_170247

SEQ ID NO: 23400 - DNA, 3003 bp, Unknown
  misc_feature (1)..( 3003): 2750-1469P.txt file - cDNA_ID_2139551; gDNA_ID_1620846; Annot_ID_170213
tcatctcccgcatcatttttatttctgtcaaaggattggaggtgcataattatgaataaacggatataaacttcactatgcattatgttgaaaatctaaatattccttatgcaaagttacacgacaaacatatttattaaaatttaatttaaaatgtaagatagttattttacctttactagattcttctttctttttgttcctatacatctattgaaagtaaaaaaataaaaaataattcagtacttgccatcttagatagtatatgttttgtagataagttttatacactatataattataaagacctggagatgacttttgacatgtgatattgtgaggtctctcacacccataagactcaaaattctcttaggagttgcacctgcaaatttaaggagaacaataatatcgactatagtgaattaatctaaaaaaggatataaagagaacattaatcatggaaaggtcttaaaaggaaaaaaaagattgttgatttcaatgacaatttttttttctttgaatttatttcagaagaatcgtcttgttatagttttgcgatatggaaagaaaaccgcttactctcttcgccaccgagtttttcaataacttgaataaaacggatatcaagatcgtcggtccagtgcattcgcggattgtctgacctaatgtaagatctaaccatcggatcttgcattttttttatctctcgtaaaatttttagtttgataatattgagagtgtgcaccaattatttatagaaaaattatatggaaaagaatattaatatttatttcccaaaaataacctaagaaacaaatatttagagctagtaaatgttattgttgtcacgtgtaatttatcatttaaatatttctgtaaaaaggatatataaaatcgcattttaagaaatatttattttcttgacagctccatgtgttcttttctctaataataatatttataataaattttaaaataaaaagttaatactactagatttgtttcaattttattctaagaataattctatctatgcttgatatttatataaataaacaaagaacaatccaaaactaatttatggcataaagccttaatgcttattattatcattttgaaccaaatgatataaataacttaaaaacatcccaaacaaatatgaattatatatgtcattatattaatataaattagttgtagacgatagaaataatatattcttattagattaaaaaattctgaaatttagtttttataaatgattatgctatataagtagttttcatttattttttttctgatttctcaagtaattactcgatacaagttagtataaacgcagtcgatccagaaggaccaaagatactctaaggatttccaagactcatttttagctagcgcgaaaaggttgtttgtttggattttcagattgtaaataaaaattgcaaataatttaaagatcaacttatgaattaaagacattgtgctatagggtatttcagatatcaatgaataatgaaaacattagacaaggaattcaaccatgaagcatcgggcttgaacatgaacacaaatttagactaagtctctcttaagacattaatcattatatttaactatgcaactactaaactcttgtttttaattttctagtcaaatccgtattagaattaggttcattcggttcacaatgcattctaacataaactctcattggttagaaatacattgctcaatttacatttgttcagacagtctatcaaacatttttgatgcatagaaaaatctagaatctaaaacagagtgttcgatctttttctagcattaagaacaagtgaatcaaagaacttaaggattaaaaactcaagaaaacaatcaaaccatcaattcattgaatctcctacttagaaccctaaaacccaactaaaggactatttactcatagcaaaaggaataacacaaagagatgaagaagacataatagattactaaacaataaaagaaaagggattagaaatattttccaaagtatcaaagaggatgaatctctagaatcccaataggggaataaaaaattaggtctcaaaaaccctgctctataaaatgaaaaataaaactgcttaaggaagaccgaaactgggcatcaggtagttgcctgatgagatttgcgtgatgtcattccccaaaagatttttaggcaagaaaacgaaactgggcacaagtagttgcatgataaaatttgcatgatgtcattttccaacagagttgtcttgaatcaccaatttttcatttcttctccgaactcttggttttgatacaaaaacgcctccaactccatcattgcttcctaaaacctgtaaagactcaatcaaggactggaagactctaaaaacatactttgactctataaaataatgatttaagaaagaaaacaaagactcaaaaccgataaaaataaaacatatcattttcatcgaaattataagtagttttcatatacagggaaatctttaaaaattaatacttcaatttatagtgattattgatttaaaaaataatacttcaattaatttatagagacggaggttattttaattacttcataaattaataatcactatacaataatacttcataatttataggattttcaaaaatattattatcttatcttctcattgaattatgttaaacattgcaatcttttgctaacatttatgcatcccatgaagggtggcatacattttagcaaaagattgcaatgtgaaggtagttggcatacattttagcaagagattgtaatgtgaaggtagtttgagctcaagtatatatatgtcatgtcattcatgtcttcactagattggactttaatggactcgtttcttaacagaaaaagtagacatacgatgtgtctgcgttacaaacatgtccatgaagacagttttctgatgatgtagacccacaagagcaacattccttataagcccgtgatcgggcatg

SEQ ID NO: 23401 - DNA, 3000 bp, Unknown; identical to SEQ ID NO: 7553
  misc_feature (1)..( 3000): 2750-1469P.txt file - cDNA_ID_2139660; gDNA_ID_1621152; Annot_ID_173288

SEQ ID NO: 23402 - DNA, 3000 bp, Unknown; identical to SEQ ID NO: 5421
  misc_feature (1)..( 3000): 2750-1469P.txt file - cDNA_ID_2139660; gDNA_ID_1620787; Annot_ID_168171

SEQ ID NO: 23403 - DNA, 3003 bp, Unknown; identical to SEQ ID NO: 18535
  misc_feature (1)..( 3003): 2750-1469P.txt file - cDNA_ID_2139674; gDNA_ID_1621152; Annot_ID_173293

SEQ ID NO: 23404 - DNA, 3003 bp, Unknown
  misc_feature (1)..( 3003): 2750-1469P.txt file - cDNA_ID_2139674; gDNA_ID_1620787; Annot_ID_168175
gagccttttaggcagagatgggtactaaggtgcagatgagcacggcttatcatccacagagagatgggcaatctgagaggactattcagacgcttgaggatatgttgcggatgtgtgtcttggattggggaggtcgttgggcggatcactttagtctggtagagtttgcttataacaatagctatcagatgagtattgggatgactccttttgagacgttgtacgggaggccatgcaggacaccgttatgctggacccaagtgggggagaggagcatatatggtgcagattatgttcaagagaccttagagaggatccgggttcttaagctgaacatgaaggaagctcaggatcgaaagcggagttatgctgacaagaggaggagagagcttgagtttgaggttggggacagagtgtatcttaagatggccatgttgcgaggtccgaacagatctatctcagagactaagttgagtcctaggtacatgggtccgttcaggattgttgagagggtgggaccagtggcatacaggttagagttgcttgatgttatgcgtgcgtttcacaaggtctttcatttgtcgatgctgaggaagtgtcttcacaaggatgatgaggtgttggctaagattccagaggatcttcagcccaacatgactttggagacgagaccagtgagggttctcgagaggaggatcaaggaacttcggcggaagaagattcctttgatcaaagtcctgtgggactgcgatggtgtgacagaggagacttgggagccagaggcgaggatgaaggcaaggttcaagacgtggttcgagaagcaggttgctgcatgagtttgcctttccttggtttccagtttcagtgttgttgagtttttgagcttttgagttgttgttcttatttctcttttatttgtattttcgtttggagttgtaacgatcataacagttgatgattaataagatgagtattttttcttggatttgacttgagttgtcttatttaagattgtgttgtgcggtttccaaaaatgaaaagtttcctagaaaggacttgtctatttttggaaagtttgagtaaacaacctaagagatccgtgtgtttacgagatggccgggagttggtcataaggatattctcgagggatatgatggatggtgagacatagaggtgtcttacgcgaatccatgagagagtctggagatatgctcggaagcgtttaatattgttgctcgagggacatgaaggtcccaacgactcgtgaggagcggggtatgctcctgaggtaccggtaactcgagggacatggtgtatttagagaacgaggggtacggtggcttcgggtgacgatccgagagcacgctttagggtgacgacccgagagcgagttttgtggtattattttcgccaagtgtcgtaactcgatgactttgtggctgagagtgagccgacacaactcagggtttgactttgagtggggaagataatatgtgtgatacccgagataccgtagccgaggcctgagagtgacggtttatgctcgaagattgcagtctgagagtggagagtgagttgtgagcaacaatgactagtaaatcgtgagtatattgactggatagagagacctagagggggtctggttgaagggagtgcagactgtagtgatggttgcacggagttcctcggagtggaagggtgaagctagattcgaggacgaatctatgttagtgggggagaattgtaacgcccgtgaactggaaaatcggttagggtttgtttttaaatcatccggtttaattggttatgttaattggaaaccctagagtgtgcctataaaagaaggaaactcgaaattagggctttagttagccacttttcgttttataaaggagaaaaagagagttatttccaagtcctttatagttattctccagtttacagaattggatttggattaaaattggttgagttattcgcagtttcgtgagacacgttttctcagacgcgaattaggaccagcggagattgaaactgagatcgtggtctcgtcttttttccgatcggcacgagattttgtgggcatctttgtgacgtctgcagataggattttaccggagcgattgaatagttaacggttagcttatattttagggtttcgtttttgagactgcttgtttctggtttttcctgtccagtttgcttcaaggttgcttttggttgtggacttgttgtaggacgtttctgaactgtttcagacgcaaggagagtctctcctgggtttaattggtattagaatcaatttgttaaggtgagtgcgtgaccatgaatttatctgagcgattgagttgtgtgatgatatataggtgtggtgaatatgttttgggtgaattgttcaatgactggtttgtttgtattgtattcgtgattatatttttttatttgcttttgtgtatagctcgtagatgggagaatcgcctcactaagtatttatgataatacttaagcatcttattgtgttgttgatgcagtaaaaataaagtgtgattgtggaatcatggcaaggaagagaggatgatgtaggaactcgtttgttttatgttttgtgtttttggttattggaacccggttaggattgtctgttatttttggttttgttgatcgaattatttatttatttataaaatagtatttctgatttgcggtttaattattatgttattggttgatttaattaaatatttaattatatatatatatatatatttttttttttaaatgggtctggttgtttcacaaagatatctgagtcatatttggggaatgctgacattaatactttcgataacaaaaagaaaatacactcattaaacagaacaaacctcagaaacagaatttaattaaaaacccacaaaatgaatctaagatagtttgctttacaattcaaaaacccgtctctgtgattcaaaatccctaaatccagagatcgaactctcgatcatg

SEQ ID NO: 23405 - DNA, 3003 bp, Unknown; identical to SEQ ID NO: 18533
  misc_feature (1)..( 3003): 2750-1469P.txt file - cDNA_ID_2139702; gDNA_ID_1621152; Annot_ID_173302

SEQ ID NO: 23406 - DNA, 3000 bp, Unknown; identical to SEQ ID NO: 7562
  misc_feature (1)..( 3000): 2750-1469P.txt file - cDNA_ID_2139712; gDNA_ID_1621152; Annot_ID_173307

SEQ ID NO: 23407 - DNA, 3000 bp, Unknown; identical to SEQ ID NO: 7564
  misc_feature (1)..( 3000): 2750-1469P.txt file - cDNA_ID_2139718; gDNA_ID_1621152; Annot_ID_173310

SEQ ID NO: 23408 - DNA, 3003 bp, Unknown
  misc_feature (1)..( 3003): 2750-1469P.txt file - cDNA_ID_2139824; gDNA_ID_1621178; Annot_ID_174210
gtctttgaatttttttccaataaacaaagaatcagcatcacttagaccagttgaaaacgcagaactagaatactgttgatcaaaaatactagatgtttcagatacacacgcctgaataatcctagaggttaacctcggctgccaaaataaaaagcttaccttaaacatcaatctatctttaataatgattttacaaggatttttaaaaggggtttaaaaacgttaataatgattttacaagattttttaaaaggattagtacctgagtagtagatgtagaatgagaagcaaaatgatttgaagtcgtctaagcctgtaataaacacaatcactgacttaataatgattttacaaggatttttaaaaggggtttaaaaacgttaataatgaatttacaaggatttttaaaaggggtttaaaaacgttaataatgattttacaaggatttttaaaacgattagtacatgagcagtagggagagaatgagaaacaaaaggatttgaagtagtctcagcctgtaataagcacaatcactgacttaataatgattttacaaggatttttaaaattataacacaagaaggttattgaaaaatctgctcaactgtcacagaaatttgctctacagtcaaacataactgaagcaatcctccactctgtgagaatttgtgcataaaagttgcaagctgtctatcgtttctaatataaagaggatgagattgtatggttgtagatgtggagactaacttgtaactaagcttcaaagaattggttgaactatctatttgaaaatcctctacaagaatatccaccaacgcgtgataggtaatgtgctcatcaatgaccattaaagaagctcccaattcaatgtctaattcaaattcccaagtcatattgtttgtcaacttccacaagccacaaacaggatacaattctagcattataacctgataagataaataacaacaatatcaacacccataaaaacactgtcactacagagagaagcatggtttacaaatcgttttaaagcgtaagtaagtagcatagaataatttacaagggattttaaaagctttgaaaagtggttaacatggtttacaaatcgttttaaagcgtaagtaagtagcatagaatcatttacaagggattttaaaagctttgaaaagtggttaacatggtttacaaatcgttttaaagcgtaagtaagtagcataaaataatttacaagggatttaaaaagctttgaaaagtggttaacatggtttacaaatcgttttaaagcgtaagtggcatagatctatcacgaaagcatatgtaaaagaggtaaacactaaatcagaaccaaaatctattacgaaatagtataacgaattcacataagcaaatctatcacgaaacagtataacgaattcaaaaggtattaacgaatttacaaggattttataaacaaattcaatcatcaaatctcaaacaaaattcaaattcgaagctgaagcaaatgtcaaactgtcgattgaatcaggattcaaataacgaattcacataatcaacaacaaaaatcgaataaatcaattcgaaatcgaagatttaagctaacattataaaatcaaaccggggaaacgcaagagattcgacggcgacacacagctctacttccgacggcgaagatgggttttcacggcgagtaaactcactatttccgacggcatgggattcaacggcattcacaatttccgatggaggaagaagagagagagtgaagaaatgaattaggtctgtgggtagctcattaaaggtaatttggagagaaaagtattagaaagggtagaaatgaaaatgggaaaaagggtagagttgcaaaagggcattgagaaaagggcattacagtgaattattcttaaaaataagtatataactgtttgtttagcaagctaacatatataataacgtggtaaatttacatattatatgttaaataaatgtttatctacttaaaattatgaataaatatttttatttatatatatatcaacaaaataaaatacatcatgttacataattaacatgataacgattataacaacattttacatagaataataacatgctaacatactaaatatcgaaataatatttgtctcaacacggtaagataatcgatatatgaataataacatggtaacatactaaaaatcaaaataatatttgtcttaacacggtaagataatcgatatatggataatatttatttgaacgtactaatgttttagttaaggtactaatgtttcatccaactttttatttttagtttaattaatttaggggtataagtgtcataaaattaaaacagtagaagacaacaatgttttttttttgtcagttaattatcagttcttctgggtatagataatcatattacccaaaactataacattagttacttttattccaaatatatatgaattactaaataagtctagtatatttggatttataattttaagggtttgttacactatgaggcactttcggagaaacttaattcactttagacactttaaaaactagaggcactttgccttgcttttggagtgaaataagacatatatacccccactaattcgtttgagatatttctacaaaccggtttatggtttcgtttggtattggtctaaaatatacggttattatggtcggtttagaaaaaacagtttgggcgtgacgacgatcgtcggatttcagtaaattaaacggccgagattaatcattgtaacttcccttgcttttcgactttattcaaactgaaacacgagatccattgaaacacataagattctgggtttcaatcatcgatctttggccaactgtcgtgtccaaggaggtacgattgtagaaaactgatatcatgatattaaaacgaaatttcgtgcattctatttgttacgggaatcagaatataaccaaatttatttttttcgtttatctgtacagggatcgatg

SEQ ID NO: 23409 - DNA, 3003 bp, Unknown
  misc_feature (1)..( 3003): 2750-1469P.txt file - cDNA_ID_2139877; gDNA_ID_2926129; Annot_ID_196829
cagtgaaacaatttgatgggagagaaaaaagaagaacaaaaaatcaaataattatattttagcactaatttctcatgccggtaaaccttaaagtaatcaaagtaatcaatcttggtatataaatgtttgtgccatacataatcaaagttatcaatcttgtaccccaatttatggttgtaaaaactcttataacatgctaaaatcttatcatacagaactaaaagctcctaacattaggagattgaagcaaatgaataattgaagagagaatcagaaaatgtaaagtgtggaaagacgagagagattctacgagcaccacatattcgtattattattctaccatcgtttcaagacatgaaagaaagcaaaaaaacaaaagagaaaaaaacaaaaaaaatcagacaatatattggaggaccctagaaaacaatataccaccaaaacaacgactcttgaaataaggtttatataaaataagttactaactcaaactcaggagatcatgatatttatataaaataaagttttgaaagttacttaagatacggttttgaaaattactcactaacaagatcataatatgtgacaagtctaacaataagatgtttatatgtgtcattaaagacttaatatttttattctcttaaaaaaatagaaaacctaaaaaactaaacaaatttacatatactaatttttatgtctatatacatatatataattatttttattaatcaaaaagaaaattaacgaatttgattttacatgtgttattggtcaattaaataaatctaacatctactctattatttgagacgtacgttaagtgattctcggttaaaaaaatttttacctttaaatcatatgtttaaaatgttaatgtcatgaaaaagtttaccttttactaagaatcacttaagttacgttataatcttggccattcgattgaattgtttgtgaccgtccgatctctcgccttcacttaaaaaacacgtggatccttatgacccgggtttacaattattgggtcatacgttataatcttggccattcgattgaattaattgtagccattaatgttttttgaataaattctatagcaagatttttggagagagaatttttatttatttccaattaatatattcccttattcaatactattcataattacgtgggtttaaaattggaaaactaattatactcatatatcaacaatatttattatattctaagagatcattaatccaatcaatatttataaaacatttcataatcaaagctgctttatttatagatataacattataaatatcgaattaatatgtttgaattcgaaattgggttaaatattctaaatttatttaaataactggaaaaataattttaactaaacttttttttatgtttgataattaaaatagaaaaaatatttttaaacatttaaaaataaaattaattacatttttggtttatattaatttttgttaattaaattaatcgaattcctttttcagcaactgaatcatattaatttaaaatatccaatgcgtatattcctttcttaaatttgaatatatcacttctccataattataggtaatcaaatatttagttggatattcatttttgaattaacataaagtttccgaacaatttccataattaaataactacttataagataattgctaaacattctcctataattatgggattcatcataatcattaaacttgacttccacgatttaatattttatgcatattttaaacctaaaaatttatatcttataaatattgtacgtcccatttcaagaacttactcagcagttcctatcttcttttactctctcgtttcttttttattctagcagaagaaaacgagaccatgaagaaattaaaactgaggttgtggatcgacgagaccatggagaaaacaatatatcgaggtatcctctcacactctctgtttttctctatttttttcatgtttttctcacatctgttttttaaaatatttatgcaggtaatgtgggagattaaaatgtagacgcacacatgattttgttaaagtatgtcttgctttctaattatttatcttttatgcaaagtaatatgttaagctttttttacctctctatatatttataagatgagtaattctgattgaattttttttattgggattacggtctttttcctgttaatttgcagaaacatgatgatgatttataatttgactactatcttccaatgaacaacaaaattataaggtatgcaataattttcttaaatctgatcgatagattctctttcactaatatattgagattgtgtaaatatttttgactgtagtttagattttaatatattggtattgttaattaaattaattgaattttaatataagtttaattttgataaaatttatttttgtcttattaatttgtcaaatttgataattaatatatgtattaataaaatacactaaaccccaacacaccatgtatataagtacatatactaaatatacaattatatattcaaagggatacatcaattttgtaatacattcaatagtatccatgtttaaatatgagaatatttaatgaaaacaccaaaaattaggagaataggagaatagggcttagagagattaggagaatagggcttagagagattgattatttgatgaaatgttaatataaaatttgaatgttttatttttaaattttaagtcatttaatgtgaatttggtattatgtaaaactaatttatgagctgactatagtaaaaaaaaaaaaatgtgttcgccctaattattctctcccaagcacggaaaccaaggagccgcttcccttagaaatatgagcttctttctccgacgttcctcttctggtatcttccttgtctgatcggtgctagctgctaaggcgagatctctcaggcggacctcttttttggcggcgttgctgtttttcggtgagactttccacatgagatg

SEQ ID NO: 23410 - DNA, 3000 bp, Unknown; identical to SEQ ID NO: 7977
  misc_feature (1)..( 3000): 2750-1469P.txt file - cDNA_ID_2139877; gDNA_ID_1621178; Annot_ID_174225

SEQ ID NO: 23411 - DNA, 3003 bp, Unknown; identical to SEQ ID NO: 17627
  misc_feature (1)..( 3003): 2750-1469P.txt file - cDNA_ID_2140070; gDNA_ID_1621193; Annot_ID_174625

SEQ ID NO: 23412 - DNA, 3003 bp, Unknown; identical to SEQ ID NO: 17625
  misc_feature (1)..( 3003): 2750-1469P.txt file - cDNA_ID_2140103; gDNA_ID_1621193; Annot_ID_174642

SEQ ID NO: 23413 - DNA, 3000 bp, Unknown; identical to SEQ ID NO: 8098
  misc_feature (1)..( 3000): 2750-1469P.txt file - cDNA_ID_2140111; gDNA_ID_1621193; Annot_ID_174645

SEQ ID NO: 23414 - DNA, 2393 bp, Unknown; identical to SEQ ID NO: 8091
  misc_feature (1)..( 2393): 2750-1469P.txt file - cDNA_ID_2140236; gDNA_ID_1621193; Annot_ID_57503

SEQ ID NO: 23415 - DNA, 2393 bp, Unknown; identical to SEQ ID NO: 8091
  misc_feature (1)..( 2393): 2750-1469P.txt file - cDNA_ID_2140236; gDNA_ID_1621193; Annot_ID_174622

SEQ ID NO: 23416 - DNA, 3003 bp, Unknown
  misc_feature (1)..( 3003): 2750-1469P.txt file - cDNA_ID_2140446; gDNA_ID_1620778; Annot_ID_167829
actttgcatcatcatcatcatcatcatcaaaaaaaacttttcatcatcaattactaaacaaactatatggaaacaacttaatctcaatagcagcataaaaagggtaacaagttgttccaaattcaagtcaaacgaatgaaatgcgtaaagtattacgcatcattaggttcaatttgctaaatgtgagttcaagttcttagctttctctacttcttagatttcatatatcaaaattcaaacaacattgcgtcatcatcatcaacaaacaacttttaatcatcaattactaaacaagtatacataggaaacaacttaaatgaccaaaatagagttcaagtccttagctttttctacttgttagattccacatatcaaaattcaaacaacattgcatcaagaaacaactttttttcaatcattgattactaaataagtgttgatgaaaacagattggattgaaaaatgaaacctttacgagtgtggaaaccaggaggtttacagttttttcccttgtaaaagtctctgggagctcgtttgggagagagaatatcaagcgaagaagctctctttcttcggaatgttcttccaatcccgaataacaaccctaatgtcatcttccaaaatctatcaaatctggtaaacaaaatatgttgtagaatcgataaaaatggaaactttcgaatgtatcaaatgttgaagaagaaatgtcagagatttgtagaagaaaggtcagagaaagggtttaggggttcttttaggtgaaaaggcccaaaactaaataaagcccattttcatacattcacttatttgtttataattctccaaattacctttaaggggatgtattcaaattagaatttaaagtgatttgagttttcttgagttttaaatgatttaattgatcttagggaagtttatatgatttttgtaaaatccattcaaatctcactttaaaccatgggatttggatttctgtatttttaactaaagaaatcctctcaaattctccaaaataattaaaattcaaatccacaaattgttttcaataacagtaaattttcaggtggattttgaaatcattagttcaataacactgaatttcatgagttttttaaaattcatgtttgaataacatatgatttataaattctacaaaagtctcttaaaatttcacttgcaatacacctcagattttacgatcacttgtgatttcagatatgctttagaaatgtgaattctagtatgcttagacttgctcaaatatgcttagatctgcttaggttttacttgttgtgaacttgtaaattatactttagtttcatcggaattgttgtgtactcgtaaatttaattttaaattatgttttaaaaatgtgaactctaatattttctcatgttgattttatatatgcttagatctgcttagactcgagtagtatataccaaattgtgatttgcttagacttgcttaatttataaattgtgatttcactcctacaatattttttttttgtcggtacaaagaaggtagttgaacaaacttgttctcaaaacaaaagtagtttccagaaaggctagtatagtttcagaaagacttatgctcaaaacataagtcaagtactattacaaacgtctagtttccgatacgaactaactctgtgagaatctctgcagttgatggcataagaagagggtctacagaggtcatcaaaattcctttgacagcgtacaccttttgatccattttgaacacacattggaccactttgccataccctccacgacctaggctaccttcctctataaaatcgtcatgataccttgaaggcggtggacgaatagactttgttgaagcgagtccaaccatccaagataaaagggattaggctttgccgactcgaacctgaacacaaaaatactcgaatattttaatcgaaaatctaaattttacccgaaccccaaaattttacgcgaaaattcgggtatcgcttctaaaatagggcctaaaaatctatatccgaaccgacctaaacctgattagacccgaaccgaaatcgaaccgatattttaaatttatccttttagatcctaaacttttttacccaaaggacctgtacccgatcgagttttatctgaacccgacccgcttactcgaatgtccacctctacgagtgagacatgaaaccctctcttccactccgagtctttcctctcaattgaatccgagataaaccggtttaatctccaaaccaatcccatattcttgtaccaaatgttggtttgcttcttcgtacaagaagatattttccgggaaaatgacaaacagagaaaatctccagaaaacaatgaaagctatacacaaaaactcgcgcttccgttcacgtggcaatcacttccaatgaacgattctccttcgtttctcccaaagtcccatcacaatcaaaaaccttctctccgagaatctcactcactacaaagagtaagattcgattcaaaaacaaactccgatcgttgaagcaacgaagatatgcttacttcaccttcttcttcttctacatatgatccattctcttccaatttctctccgtcgctcactaatgccttctctagtagcttcaccattcccatggggttagtcaatttcactctatcttcctcttcgaaatttgagttctgattctgaatttgtttggtattcgtagattgaaattgagtaggagagtcaccagagctcggatcttctctcgtaaggcacgtcttcttcgtaatccctaatctcgttcatgttcttaagtttacattccaaaaaccgaattagacgatcttcattgtttcatcgtaggtagattaaggatcgttcaacacttaaggtcacttgtcgtcgcgcacacgaacgtgtggttgaggtaaatctcttggtttagttttttgctctttagcggattttgaattgtgtgataagtgcttcttctgtgtaattttctaggaagaagcatctacaatg

SEQ ID NO: 23417 - DNA, 3003 bp, Unknown
  misc_feature (1)..( 3003): 2750-1469P.txt file - cDNA_ID_2140457; gDNA_ID_2926146; Annot_ID_197731
gttgtaaatgggtgtttcgtctaaaatacaaatctgacggcacacttgaacgacacaaagcacgtttggttgttcttggtaacaatcaaaccgaaggtcttgattacacagaaacttttgctccggttgcgaaaatggtcacagtccgcgcttttcttcagcaagttgtttcacttgactgggaggttcatcaaatggatgttcacaacgcgtttctccatggtgatcttgacgaagaggtatacatgcaatttcctccgagatttcgtactggtgacaagacaaaagtatgtcgtttacgcaaatctttgtatggtctcaaacaagctcctcgttgttggttcgcaaagctcacatcggcattgaagaactacggttttattcaagatatttcagattactctttgtttatctttcacaaaaacggagttcgacttcatgttttagtatacgtggacgatttgatcatcacgggtactactattgctgtgattacagagtttaaacattacttaagctcttgtttctatatgaaggatcttggaattttgcggtacttcttgggaattgaggttgctcggagtcctgaaggtatctacttatgccaacgaaagtacgcacttgacattatcacagaaacgggtctccttggtgttaaaccggcttcttttccattggaacaaaatcataagcttgcttttgccactggtgaaacaatagacgacccacttcgataccgtcgtctagttgggcgcattatttatcttgcgactacgaggcctgaattatcatatgttattcatattctctcacagttcatgcataatcctaaaccggctcattgggaagctgctcttcgcgtcgtcagatatctaaagtctagtcctggtcaaggtattctcctacgtgctaatacacctttggttctctctgcctggtgcgattcagactttggagcatgtcctcattcagatcgatctctcaccggttggtttattcagttgggtggctctcctttatcttggaagacacagaaacaaaatgttatttcccgctcttctgccaaagctgaatacagggctatggcagaaacagtgagtgaaatcatatggatccgtgaattacttcccgctctcggtattccgtgtactgctcctaccacactccattcagatagtttatcagccataagtcttgctgctaatcctgtctatcatgctcgcactaaacatgtgcgtcgagacgtccatttcattcgcgatgagctcgtcaatggcactatcgctactaagcacgtctcaaccacttctcagctagcggacattctcactaaagccttaggacgaaaagagtttgcagactttcttgccaagcttggtatctgcaatctccatataccagcttgaggaggggtgttgggctgtgtggccttagcccatttatattgtataaattaactaggtctaaacttatcgtgtatataaaggcattgcctcttgccgtaatcaataagaatcttcttttcacaacctcgattgattcttgacaatatatataactaggaggaggcgtaaaaggagaaaacaggtaattttttgctcttgtacctttgatatttttactgaaagtgaagcttatggtgattacacttgtggtctacaggagcagaacattgagagtgggtcgagtattggaaacgcttcaagatgttcttggaaccatatgggacttcttgcattgtgatgcctaataaagaaccatatgatgatgttgttcgtattgttgggtttctcttttactttctgttgtctcttttgtagaataaataatgttttgggtaatgaatgatttaacttgcttgtgaccaaaaaaataaaataaaaatgttgttttgttacgagtcatttcgattgcagatacaatgtaacagtcttcacacattgaacaaaacaaaacctaagttaaacaaataactgtttctttaagtctttaaccatgaatctggcctttattagtaaatagtaatagtggttattgtaacatgagcaacatacgtcatactagccaaccaatgtctctcttcttaaactcatcgaactaaagagaggtcaaatcctcatacttactcggcctcgatgtgaattcacgttataataagaaacaaggaaaacacaaactaatcattttcttagtcctaggtgttcggttttaaaatttagtatcattcaagtattttgaaatcttcattttggtttggatccggttcttttgtttttaaaatttagtatcaatttggttatttttccttggatattttgattatttttgattattttcggatatttttttgttatttttgagtattttactttttctatttttattttaaaatttttgattttttgatcaataaataattaatattttgggtatttttggttaccaaaaatatttcagttcggtaccaattataatttttttttgttatataataatatagtatacatccaattatttttaaatttttgattttgttcgattctttttgcttcggttccaattcagtagcttcgattcagtttaattgcctagacctacattttctattagaactgacacaaaaacaaaattggcgtcgcttataaggtctacaatatatggttggcctctggcccaatagtaagcccatatattaaccgacgtcggtttatagccccgataaacacaaacaatatagataagatagtttcttctacttcaaaaaatggatgctttcagaaatttccagaaattacgggtccaattgagaaaaacgcgtatcgtcgtcttcttcatcaaaagcgaacaatttcgaaaacaaacctaacgaacaaaaatcaaatcttctctctgttaaaatctcaccgactagagaaaagctttgttttttccaattaaagttacattttttgtttgaacaaatcactttctgtgatctacatttgtgtggtcgtgaaatcaatg

SEQ ID NO: 23418 - DNA, 3003 bp, Unknown; identical to SEQ ID NO: 23417
  misc_feature (1)..( 3003): 2750-1469P.txt file - cDNA_ID_2140457; gDNA_ID_2926146; Annot_ID_139097

SEQ ID NO: 23419 - DNA, 3003 bp, Unknown; identical to SEQ ID NO: 23417
  misc_feature (1)..( 3003): 2750-1469P.txt file - cDNA_ID_2140457; gDNA_ID_1620778; Annot_ID_167843

SEQ ID NO: 23420 - DNA, 3003 bp, Unknown
  misc_feature (1)..( 3003): 2750-1469P.txt file - cDNA_ID_2140539; gDNA_ID_1620687; Annot_ID_164664
tagactcgaggacaatagtccgtgacagtctctctggtctcaccgagctttacagatgtttaagtgaagatctcttcaagtcttcttctgaaactcaacaagcccttcttaatggtgatggtttgatggaagagcttcttgaagtatcactgaaatacttagaggtttgtggaggagctaaggacgcagcttcgaggatcaagaagattgttgtcgagcttcagtctgctttgagaaggagcaagaaaggaggtgagtttagcctcgagagtgacgtggatgcttatgtggcgtctaggaaagagatcaagcaggagatcaagaagtatatggtaatgtcgaaagagacagatgcgtctttggagagtgtttggtgtgatggcgatgatcaagagatgagtgctttagttagagtgatgcaagagacgagtgtaatgacttgtttcgtcttacgctcggtcttctcgttcttgtcgtcgcctaaagggttaaagactaagaatcatcatcaccacaaaggttgggggattgttatgaagcttgtgaagaaaggaatagaacatcatcaccaggagaaaagagattacgagacgggattttcttgtctcgtgcttgaagctatggaatctgagcttgggaagctcgttgtgatgatgacaagggaagatcaagaagaagagaaaaagattagtgaagaagtatctgagagggttcaatgtgcattggttagatccgaaggtgtagaggcagccatggaagagcttgaagagggacttgaaggattgttcaaggtaatgatacaagctagagtctctcttcttaacatcctctccacttaaaatggatcagattcgaatttcttggtctggattggaaataagttagttgctacttgaccagtcgattggttttaaaatcttggtttggtttttgtttgtttgttcttgtatgttgtgagagagagtttaaacatgcgtccatgttttagaggatgtgtgtttgttgtaagtgtgtaacccgttcaggtgtgaaaaactcttgtaaagttttatgtacgtaagcatctttattgcacaaataaaagaggtgtcttttaacaatattttaaaaaatttaaacaacaaaatattaatagttaaatatgaaaggtctttaattttaagacatctttttcaaaaatgtttccacaaagacacttaagacacagtgtctaaaatttaaggacacacaaacattataatgttatatacttttatatatattaattttattcgtgggaagaccctctctaatgatgtgggatggagatgacctaaatatctattattttaccacgtagaacgataaatttaaggagagaaagacgaaatgcaaaagcactaactttaatgtttagaataggataaattactgaatagtattattttttcgtaagaaaagcaatttagctatatagcatagcgttgaagtaaataattaatcaaatgtcacaattttctcaaaatgaaaaaccaaaaagaaatgggctaaaattaaagaggcaaaagtaatcatattaaaatgtcatccaaaaattacataaacaaacaaaatcatccattgatatcgagaatgtcatgaattttgctggtagacttttgacaaacctttcttagaattgataatgacaggaacttttgttaaatgacccaacttaacattttattttcttattttccttagaaaattagtcgataaatctttcactttcttttgaaataatgaaccattaaaaatagaattcagtggctaaaaatgggattgagagtgagcgccacatacggtggcagtacttcgaaagaatttatttgtcttagtttgattcacacaattctcacttaagtaggaaaccatattaaacactagtacttttacaatttagttggaggcgttaggacaaacgcaataacagcctgtaccaaaacataattctttgcattttggcgtacaaaaactaagctcattttgcttaatcgatagtggagcttcatgatgcacagatgcttcactagtggttagagattgaagattaggacaaacgcaataacaacttgtagcaaaacataactctttgcattctggcgtacaaaaaccaactccattttgtttaaccaatattgaagctttaagattcagagaagttttttcagataagagacgtttcgcctcagcaatctgaactgtcacggataccatcactacaagatataaatgtagtaaacattagtaacacaatacaattctttataaccatatcattatactacaaaaacattaattttaccagtaaaagctaaaaggatgatgaaagcagacttggatgaaaattttcccatcgtcgtagaaagattatgtttcttcttgataacttttttagacttactagaaagagttggtgaagaaaacgatgtgatatagacaatgttgtataacgttttttataggacagagaaagtgtactaatttaggaagattaatatcaaattgttgctttgtggtgaaaattaaaatgatatcgataatgagataagataagatcaaatctcctaatatggtcgacaatccaattgacaattgttacctaataagatttctactattaatgagaagatcttcaaattattcgctgtattgataaaagtttttaaaaagttagtttgactcaaaagaagcccattaccaaagcccatctaagcccattatgtaatcaatcaacaagccacggtgttgcttaggatgctgctcgttgggtttttggcaacgtgtgtaagatacaacggctatattttgacatggtccaagtccagctatcataagtcggtgtgttcttgtgggacctctaaaagagcgttactttcctaatttcagcggaccgttacatacacactcgcacacactagccttcgtcttcttctacatctctttcttcttctgtgtcagagacgctgtggtgaaaagaaaatg

SEQ ID NO: 23421 - DNA, 3003 bp, Unknown; identical to SEQ ID NO: 23420
  misc_feature (1)..( 3003): 2750-1469P.txt file - cDNA_ID_2140539; gDNA_ID_2926209; Annot_ID_202504

SEQ ID NO: 23422 - DNA, 2872 bp, Unknown
  misc_feature (1)..( 2872): 2750-1469P.txt file - cDNA_ID_2140539; gDNA_ID_2926210; Annot_ID_202531
gagcttcttgaagtatcactgaaatacttagaggtttgtggaggagctaaggacgcagcttcgaggatcaagaagattgttgtcgagcttcagtctgctttgagaaggagcaagaaaggaggtgagtttagcctcgagagtgacgtggatgcttatgtggcgtctaggaaagagatcaagcaggagatcaagaagtatatggtaatgtcgaaagagacagatgcgtctttggagagtgtttggtgtgatggcgatgatcaagagatgagtgctttagttagagtgatgcaagagacgagtgtaatgacttgtttcgtcttacgctcggtcttctcgttcttgtcgtcgcctaaagggttaaagactaagaatcatcatcaccacaaaggttgggggattgttatgaagcttgtgaagaaaggaatagaacatcatcaccaggagaaaagagattacgagacgggattttcttgtctcgtgcttgaagctatggaatctgagcttgggaagctcgttgtgatgatgacaagggaagatcaagaagaagagaaaaagattagtgaagaagtatctgagagggttcaatgtgcattggttagatccgaaggtgtagaggcagccatggaagagcttgaagagggacttgaaggattgttcaaggtaatgatacaagctagagtctctcttcttaacatcctctccacttaaaatggatcagattcgaatttcttggtctggattggaaataagttagttgctacttgaccagtcgattggttttaaaatcttggtttggtttttgtttgtttgttcttgtatgttgtgagagagagtttaaacatgcgtccatgttttagaggatgtgtgtttgttgtaagtgtgtaacccgttcaggtgtgaaaaactcttgtaaagttttatgtacgtaagcatctttattgcacaaataaaagaggtgtcttttaacaatattttaaaaaatttaaacaacaaaatattaatagttaaatatgaaaggtctttaattttaagacatctttttcaaaaatgtttccacaaagacacttaagacacagtgtctaaaatttaaggacacacaaacattataatgttatatacttttatatatattaattttattcgtgggaagaccctctctaatgatgtgggatggagatgacctaaatatctattattttaccacgtagaacgataaatttaaggagagaaagacgaaatgcaaaagcactaactttaatgtttagaataggataaattactgaatagtattattttttcgtaagaaaagcaatttagctatatagcatagcgttgaagtaaataattaatcaaatgtcacaattttctcaaaatgaaaaaccaaaaagaaatgggctaaaattaaagaggcaaaagtaatcatattaaaatgtcatccaaaaattacataaacaaacaaaatcatccattgatatcgagaatgtcatgaattttgctggtagacttttgacaaacctttcttagaattgataatgacaggaacttttgttaaatgacccaacttaacattttattttcttattttccttagaaaattagtcgataaatctttcactttcttttgaaataatgaaccattaaaaatagaattcagtggctaaaaatgggattgagagtgagcgccacatacggtggcagtacttcgaaagaatttatttgtcttagtttgattcacacaattctcacttaagtaggaaaccatattaaacactagtacttttacaatttagttggaggcgttaggacaaacgcaataacagcctgtaccaaaacataattctttgcattttggcgtacaaaaactaagctcattttgcttaatcgatagtggagcttcatgatgcacagatgcttcactagtggttagagattgaagattaggacaaacgcaataacaacttgtagcaaaacataactctttgcattctggcgtacaaaaaccaactccattttgtttaaccaatattgaagctttaagattcagagaagttttttcagataagagacgtttcgcctcagcaatctgaactgtcacggataccatcactacaagatataaatgtagtaaacattagtaacacaatacaattctttataaccatatcattatactacaaaaacattaattttaccagtaaaagctaaaaggatgatgaaagcagacttggatgaaaattttcccatcgtcgtagaaagattatgtttcttcttgataacttttttagacttactagaaagagttggtgaagaaaacgatgtgatatagacaatgttgtataacgttttttataggacagagaaagtgtactaatttaggaagattaatatcaaattgttgctttgtggtgaaaattaaaatgatatcgataatgagataagataagatcaaatctcctaatatggtcgacaatccaattgacaattgttacctaataagatttctactattaatgagaagatcttcaaattattcgctgtattgataaaagtttttaaaaagttagtttgactcaaaagaagcccattaccaaagcccatctaagcccattatgtaatcaatcaacaagccacggtgttgcttaggatgctgctcgttgggtttttggcaacgtgtgtaagatacaacggctatattttgacatggtccaagtccagctatcataagtcggtgtgttcttgtgggacctctaaaagagcgttactttcctaatttcagcggaccgttacatacacactcgcacacactagccttcgtcttcttctacatctctttcttcttctgtgtcagagacgctgtggtgaaaagaaaatg

SEQ ID NO: 23423 - DNA, 52 bp, Unknown; identical to SEQ ID NO: 4163
  misc_feature (1)..( 52): 2750-1469P.txt file - cDNA_ID_2140554; gDNA_ID_1620687; Annot_ID_164669

SEQ ID NO: 23424 - DNA, 3000 bp, Unknown; identical to SEQ ID NO: 3913
  misc_feature (1)..( 3000): 2750-1469P.txt file - cDNA_ID_2140554; gDNA_ID_1620674; Annot_ID_164187

SEQ ID NO: 23425 - DNA, 3000 bp, Unknown; identical to SEQ ID NO: 19740
  misc_feature (1)..( 3000): 2750-1469P.txt file - cDNA_ID_2140554; gDNA_ID_2926210; Annot_ID_202536

SEQ ID NO: 23426 - DNA, 1265 bp, Unknown; identical to SEQ ID NO: 4783
  misc_feature (1)..( 1265): 2750-1469P.txt file - cDNA_ID_2140779; gDNA_ID_1620732; Annot_ID_166134

SEQ ID NO: 23427 - DNA, 3000 bp, Unknown; identical to SEQ ID NO: 3326
  misc_feature (1)..( 3000): 2750-1469P.txt file - cDNA_ID_2140779; gDNA_ID_1620640; Annot_ID_163015

SEQ ID NO: 23428 - DNA, 3003 bp, Unknown; identical to SEQ ID NO: 20388
  misc_feature (1)..( 3003): 2750-1469P.txt file - cDNA_ID_2140787; gDNA_ID_1620732; Annot_ID_166112

SEQ ID NO: 23429 - DNA, 3003 bp, Unknown; identical to SEQ ID NO: 20388
  misc_feature (1)..( 3003): 2750-1469P.txt file - cDNA_ID_2140787; gDNA_ID_2926177; Annot_ID_199959

SEQ ID NO: 23430 - DNA, 3000 bp, Unknown; identical to SEQ ID NO: 5315
  misc_feature (1)..( 3000): 2750-1469P.txt file - cDNA_ID_2140923; gDNA_ID_1620779; Annot_ID_167853

SEQ ID NO: 23431 - DNA, 3000 bp, Unknown; identical to SEQ ID NO: 5320
  misc_feature (1)..( 3000): 2750-1469P.txt file - cDNA_ID_2140933; gDNA_ID_1620779; Annot_ID_167856

SEQ ID NO: 23432 - DNA, 3000 bp, Unknown; identical to SEQ ID NO: 5321
  misc_feature (1)..( 3000): 2750-1469P.txt file - cDNA_ID_2140937; gDNA_ID_1620779; Annot_ID_167859

SEQ ID NO: 23433 - DNA, 3000 bp, Unknown; identical to SEQ ID NO: 5323
  misc_feature (1)..( 3000): 2750-1469P.txt file - cDNA_ID_2140943; gDNA_ID_1620779; Annot_ID_167861

SEQ ID NO: 23434 - DNA, 2465 bp, Unknown; identical to SEQ ID NO: 1580
  misc_feature (1)..( 2465): 2750-1469P.txt file - cDNA_ID_2141151; gDNA_ID_1620420; Annot_ID_156561

SEQ ID NO: 23435 - DNA, 3003 bp, Unknown
  misc_feature (1)..( 3003): 2750-1469P.txt file - cDNA_ID_2141155; gDNA_ID_1620420; Annot_ID_156562
acagaacacaaatagacaaaaaaaagcactaactgtatatcttgatttagtttttgtgaatctaaagagaaccataccattctacaacacagacagaaaatttcacttaacctaatcactttgaaccatcatctaagttggttaagcttgtttgttattatagttgaaaaatccattcacagtagctagagttgtttttgttagtgatgactataatggtaaactttttctccctcaatctatacgaagagtgagaattctcttattccctccatacacatatatacacaacctttctgtaaactaagtttgggtttgcctttacttattttggcagaggatcggagagatccccgagactgtggagatggagcgtggtgatctctacgttacaagattgtataaagagcaatcgaatctggccaaattgacttttgtgtagtgaatttttatattgtacgagcttcctaatgtcttgatagaaacttttactctgtagatcgtgcattatcgaattttgttgttgttgtcatctgtgtttctattaataatgccattaaaagatataagaaggaactaaataagtttgcgaaaaaaaaaaaatccccacaaactatgctcaaaattgaaagataaataagtatattaatttgaggttttcaatgtatataaatctgattaactcatatgattattcatttaatagatttactagatcataacccgtgctatacagcacgagcattaatattttgtataaattaaattgtatactttgtttgaattacataaaaaatagtatagtataaaagtgatgccataatatttttcaatgttttactatttacatataatgctgcattagattgactttgtttaaaaatgttattgttataataaatacaacatatgtagttttaagtaaatgtgtaaaatttgtatagaagttattttggtaagaaacatgtttcctttgtattagaggatctaatttttggcctaatttagaattagtttttgtatagtattttggttatatttgtggacctaattggggcctatattagattatctttaatagggctgacgaaaaaacggacccgataaccaacccaatactcgaaccaaaaaatcgggttagggcgggttaaaattttaggaaatttccttattgggtagagttttagtaaacccgtggatatccgattggaccggaaattacccgttatctaaaaagagtattcaaaaacccaaacattaatttaatatccaaaatattaattatatgatattattttatttgattttaaatatatagtaaactgcgagttgtatatgttttcttgatattatttatattgtttagtgtttaaaattatacacttgtattttgattgttaattttagagtttcacctgtagtataccatcttatattaatatcgatttaaacccgtcaattctaggattttccagcttgtattaaaaattgaatcacatcatacacataaaaaaatctaatatgttattaattattgttgtatataagattataaattcttaaaataatatgcatgaaattgaatataaatatttaaattatgacccagtacttagtaataaatttttttaaatctatttttgacccgttataatatttttttatgtattgaacagtttatattcgtttttaaaagtttaaattatggcatatgcgaaaaaactctaattatttttttataacgatgatattattttttcgcaaaaatagaatcatataaagatgagaggtgaactataataattaataaaaaattaatatgataatttagatattaaatctaatttgttgattttaattggttaattttttggaaattaataatgtatttcattttttaatgaaatttaattaattaaattagtatttgactttttaatttttaaagagatgaattactttactctttaaattttatttctaatggcatacatatgtaattacttacaaaaagtaaggttacatttaaaatgtacttcccaaataatatagtaggatcatggtaaaatgttagttctcgaaagaaaaaatattgttataaatcataaacctaacgagctaactaaaatagcggcatcctaccaatttgagatttttcgtatatatattaaaattatccatttgataaacacttcatgataaagtattagttttgaaaataaaaatattgttcttgttataagaaaaaacacacacataaaagtattattggaggatctcattgttaagttgttaaccctcaacatttcgtctaaaaatcagacttttttctatcaaaaaaatatctatactttgtagtcaaataaaaatcttaatcaaaataatactcgtatactttgactgttgactgatggaaagatattagaatataaacattagagatagaaacaaatctgtaaaaatcttaaaattaggattatttatacggaatattccccaaaagataaaatcattgaatcataaaaagccatttatggtagccctaaatattcaggcgcggctttttttcttatttcgttttcattttaaaaaagtttttagcgccgtttattgccgcgcgtcgttttcgctcctcgtctcgtctccttttattattaccccctctctctctctcccactcttcctctcaaatcacacatcactgctttcttcaacctctctatctctcagaccaattagggtttcgcaatcttccagtagatttcgcttctcaacgtaagtttttctctataatctgtgtcgatttcagtctaactacagtgattgttaaaccctagactcggaaattttcctgggctttgttattatttgcgtcggtttagtcaatgcgatgtagtgaacgcttcgattacatagatttgtgtgaaaattttatagtccaattgcgttatagtgatgattttgttggtaattttgattttgaaactagggattttgaaaatg

SEQ ID NO: 23436 - DNA, 3000 bp, Unknown
  misc_feature (1)..( 3000): 2750-1469P.txt file - cDNA_ID_2141163; gDNA_ID_1620420; Annot_ID_156564
ttgtgattttgtctccgcatggttactttggccaagccaatgtcttgggtctgcctgatactggtggacaggtatacagtatttagttggaaacttccatatcttagaacttggtgatcctctgttgattcaacttacaatctactgttctgacttgcaggttgtctacattcttgatcaagtacgtgcattggaaaatgagatgctccttaggatacagaagcaaggactggaagttattccaaagattctcattgtatatttgcttgctcactatcatctacttcgttcttcatgtttgaaagtatttgttattcgagttccaataaaattttatgcttctatgctggcttatataggtaacaagactgctacccgaagcaaagggaacaacgtgcaaccagaggttagaaagagttagtggtacagaacacgcacacattctgcgaataccatttaggactgaaaagggaattcttcgcaagtggatctcaaggtttgatgtctggccatacctggagacttttgcagaggttagcattaattagtagctagagttctatgtaacttctgcagattattcttgcttcttcacttagatgtggttagcttaaagttacggtgaattaaagaatatacttgttcgtatcacataggacaatctgcttcagctgtgtatgcatgccctatgtattggctaacactttacttctatcaatgtgactaggatgcatcaaatgaaatttctgcggagttgcagggtgtaccaaatctcatcattggcaactacagtgatggaaatctcgttgcttctttgttagctagtaagctaggtgtgatacaggttgacgggttttatgctctctgtaatattaaattcttttttgttgtcttttgttctgatctctcctttaccatttcggatgcagtgtaatattgctcatgctttagagaaaaccaagtaccccgagtctgacatttactggagaaaccatgaagataagtatcacttttcaagtcagttcactgcagatctaattgccatgaataatgccgatttcatcatcaccagcacataccaagagattgcgggaaggtaaaaattcatccgctattcaaaggcatgttattgcctctggaattgtggtttgatgccaacagaaactattttgcttttgtcacagcaagaacaatgttgggcaatacgagagccacacagctttcactatgcctggtctttaccgagttgttcatggaattgatgtctttgatcctaagtttaatatagtctctccaggagctgatatgaccatatactttccatattctgacaaggaaagaagactcactgcccttcatgagtcaattgaagaactcctctttagtgccgaacagaatgatgagcatgtgtaagtcctcttacaacaattctgatttagcaattaaaaaaacaatctcagacaaccacataatattaagattggtttgcatgtctcaatcttcttgtgttgatgcagtggtttactgagcgaccaatcgaagccaatcatcttctctatggcaagacttgacagggtgaaaaacttgactgggctagttgaatgctatgccaagaatagcaagcttagagagcttgcaaatcttgttatagtcggtggctacatcgatgagaatcagtccagggatagagaggaaatggctgagatacaaaagatgcacagcctgattgagcagtatgatttacacggtgagtttaggtggatagctgctcaaatgaaccgtgctcgaaatggtgagctttaccgttatatcgcagacacaaaaggtgtttttgttcaggtaacatgagataaattcccttgtatttggattttttttttgttgagtcagcagaccatctaatctctctttttccaccacagcctgctttctatgaagcatttgggcttacggttgtggaatcaatgacttgtgcactcccaacgtttgctacctgtcatggtggacccgcagagattatcgaaaacggagtttctgggttccacattgacccatatcatccagaccaggttgcagctaccttggtcagcttctttgagacctgtaacaccaatccaaatcattgggttaaaatctctgaaggagggctcaagcgaatctatgaaaggttggcccattctccttgacaggcttaacaatacaacttgtatcgcttcaacaagatgatggcttaataaggatttttgcatgtataggtacacatggaagaagtactcagagagactgcttaccctggctggagtctatgcattctggaaacatgtgtctaagctcgaaaggagagaaacacgacgttacctagagatgttttactcattgaaatttcgtgatttggttagtgtaacccactgttattcttttgatgtctacatctactttacttacattattcttttcttcggtttgcaggccaattcaatcccgctggcaacagatgagaactgatcatgacagggtaggattttatttcctgcactttctttagatcttttgtttgtgttatcttgaataaaaattgttgggttttgtttccttcagtggtttgattttggacttatttgtgttaatgttgttttggctgttctcttaatatcaataacaaataaatttactggttggtatctaagatctaacaatagttactatttttagaggtaaagacaccaaccttgttatattggtcagagagctaaaaccttgacttgttgggaaaacaaaactctaatgacagaaaatctgacatgatgccttataattcacagcctcatgttctacataaatcctaacaatagcactttgtttcttcattatattttgttaagtccactcttctctctcatatcttctaaccaaaacagagtcacaaggggctcttaagcccttccaactaaattcttttcttttgttctcttgaaactgaatccaccagacaaaaaaatg

SEQ ID NO: 23437 - DNA, 3003 bp, Unknown
  misc_feature (1)..( 3003): 2750-1469P.txt file - cDNA_ID_2141175; gDNA_ID_1620420; Annot_ID_156567
tacacaaaaactttgctcgcaggatttacttactggccattaacgagctcttccttaaaccgaagatattcagaaacagttaaatgatctacgctcagctcatacacattcacacggacatattccctaacaccaggtctgggacgtatagccaaagcaacaaatggaggcaaaactatggcttcctgaatgcgaaaacttgagtttattaacaaatcaagatatatgaacacaacgtagccataaaatgatactcggatcctatatgttcacctctgcagactgcagaactttcatgaatggacttttgttaagatcttctaatgttccatcaactttcacagtcttaaggaactcatcaatcagctggtgggactgcaatatcccctttccctgggctacatatctaataaagataacaaccaaaaccattacccatgacttgagaccaatcacaacacacatgcatttataagcaaggctcagggagagagagcgagagggttaagaagaaacctggagaaaagagagaggagctcattgcgttgagcagagatagcgtcataaacccattcacgcatagtctcgaacctaccagtcggcatgattttttctcagaggcaaaaacacaaacacttacaaggcaaacccagaagacccaaaaggagaggaatttgtttaagaaaccaatccagcttatgtatacgagatcaaagaaagacgccatttttaaattcactgtagcttgatgagaagtggcgaagaaagaacgacacttggctgcagagataacaaaaaccatgggcgagtttcttcaacgtcaccaccagagcactttaatcctcacttagagcgtatcgcccgtagtggtgggcctccggtgatagccacgttcaaatcggagatcgcttgctctgaattttacgctatagttcgttaacacatatgaataagagtagaagaagacccgccaaaaatggatcagtttctttgtttgttttttaagcttctccactttcattaaatgatgtgtgaaagagtttgtttatcttaaagtaaaaactctgaaatcgaattaacgagaaaaattacatttggttgatacaaagattgtttattgactgatacacctattacaaaataaaactctcttaacagttaactcaacatataaaccacaaaattaaatcagaattctttagtcgaaaagactaaactttgttgccagcagctaaggtccatacacgcaagttaccactctcgtctccactgaataacaatccttgaggaccaattgtgagtgtggcgatcgtgtgcgtagagaacatccttcctctttcttgaaaagatggtaggtcgaaaatgccaacggttccgttttggtaagagcagaatattatcggtttggcttctgcatcatgcataccagaaagagcatgaacactactctgttcttgtctgcgagtttgaacaactttcaagattccgttttcagaataagcccaaacttttatggtcccatccaaggaagacgatatcaaacatttatcccaacataagagtgaagtgacagtgccggtatgttgcttcagggtcattatacattgcagggtgttgagatcccacatcttgattgttttatcgacagaaccagagtatagcatttgacctccaacagcaaaacaagtgacttcaccactatgtccctcaagagatgtcaagtatttgaatggatcagactcagagtctgtagtagctttccagactaagatactaccagaacttgttccagcaaaaagcattccgtttgcaatagtcattgcattcacctgaccaaccacccctgctgcttgaagatgcaaatcttgactggtttgaacgttaaaagcctttatagcgtttggcaagccaaggaaaacccaagggccttcactgattagagaccctgcttctgcgtcaaggttgatggaatgtacacactgaccagaattgcagtcccaaactcgcaatgtaccatcaatactgactgaaaagagtttatctgaaccctcagggagagcgatcccctttagttccttattgtgcccttcaagagaagctaccatggccaatccagggaaacaagaccaagagtgtaagaactggcactgctcacccctcttgcactttccatctttccaatacttacatacccattttctgagactagaagatctcattggcccacaagcagcattcttcctcgccaaacctaaaactggtggtttcggtgacacatcattggtccttggcatattattgccctcgggtgatttgtactcttttgacgtccaaaccagactccttgaaaacttatttggacggtcgtaagggacataaggtcttcttctcgtaactatatctgttgcgaaatcttgctgtctcgcaacaactccgtgtgagtagtatctccttggcgctttgtaatccatactgagagagagatcaaacgtatgtagaggaatctagatcttcgattagggttaacgatttctccaactcgttcggagagagccaacaaaaaaaggaaattttgagacggagtaaagaacatgtaaagagtagaatgatctggggctgcagaggaatggtgtatatatagatgagcgtggcggttacgctataataatttctattgggcttaactttaggcccatcattcgtgggtccaattaatgttcaattctatcattaggttaggtcattaattataccctaaaatctctgtactagtagaaaaaaagaggtctttattctgtatactaattactaattagagctaaatcaggatgagtccatcgcaacttgtctaattactgttagccaagaccaccctagagtcaatatcatatgttaacaatgatgtaaaccttttagtattgaaggccaaagtagtaattaatccattgactaacttcttttaaaccttgagacagtgaaatactaactcattcaacaaaaatg

SEQ ID NO: 23438 - DNA, 3003 bp, Unknown
  misc_feature (1)..( 3003): 2750-1469P.txt file - cDNA_ID_2141183; gDNA_ID_1620420; Annot_ID_156569
ttgttctctgacagtttttttttttgtttggttacaaataaagatgccagtaagtgtaagtgtctttttataagtttagttctgaagtctcttgtctttcttttactctcttgtccgaaattgcttgattctcgattttgacgaagcttgaaaaacaaacccagttcgttaatggtttctgggtcttcgtcatttcactggatccgttagaaaaatgattcctttttgttatctattgattcccgatctgaatttgaagctcttagtatgtttttattcaggtggcactagttttgctgttgacattgagcagtgtgattctgattaatgggagaagttacggcgtcggaaacatatgcgatcgtggtcggagaccgagcgagagaccacacagtgtcaaaatcactgattttggtgctgtgggagatgggaaaacgttgaacacacttgcgtttcaaaatgctgtcttttatctaaagtctttcgctgataaaggtggtgctcagctttatgttcctccgggacggtggctcaccggaagtttcaacctcaccagtcatctcactctctttctcgagaaagacgccgtcatacttgcctcacaggtctgtgtgtgtgtctctctctctctctctttgtctaaagtcttgatcattctaaagagtaaagatcagagtttgcagcttaactgtttcatagacttctgattagcttcagagaatcctgtttttgaattgatgtgtagaaacccaaatttggttcagtagttaggcattgtggcttaggatgacctctggctccaattgctagcaagattggggattataaaaggatatatctcattgcgctggttttcagttaaatcaatatatatatctaccaatgttccatggttctgcattgttatcagtcagaacatttgtgtatttgtttctcattttgtcttttatttgttgttcttacctcaaccgtgtgaaggatccatcgcattggcaagtcacggatgccttaccgtcatatgggcggggtattgatctaccagggaagagatacatgagtttgataaacggtgacatgctacatgatgtagtagtaacaggttatatacatattttgttccattcatttcattttgtttgctaatgctaaataaaaactcactgttgtataccatattcattggcttaggtgataacggtaccatagatgggcaaggccttgtttggtgggatcggtttaattctcattctttagagtacagtcgccctcaccttgtcgagtttgtctctgccgaaaatgtcattgtatcaaatcttacattcttgaacgctccggcttatactatccattcagtttattgtcggtaaaaatagtttgaaaattccctcttattattatacctcctttggttttgaaatcatttggtaacctcttgactcgttttgcagcaatttatacattcatagagtaacggctaatacttgtccagaatctccttataccatcggtattgtcccaggttagttgttattatccagatatatgtgtaatttgaaacaatttgttgcagcactaaaatctcaaactgttatttttttcagattcttctgaaaatgtgtgtatccaagaatctagtatcaacatggggtatgatgccatttctcttaaaagtggttgtgatgaatacggtttatcgtatgcaagacctactgctaatgtccagataagaaatgtttaccttagagcagcttctggttcctccatttcctttggtagtgaaatgtctggtggtatatctgatgttgaggtcagtgatgctcacatacacaactcgttatccgggattgcctttagaacaacaaatggaagaggtggttatattaaggagattgatatttccaacatccatatggttaatgttggtactgcatttctagccaacggtagcttcggtactcatccggattctggtttcgatgaaaatgcttacccgcttgtgagtcacatcaggttacatgacattgttggagaaaacataagcactgctggatatttctttggaacgaaagagtctcctttcacttcgattttgttatcgaatatctctctgtcgattaaaaactcggcttcccctgctgattcttggcaatgctcatatgttgacgggtcttcggaattcgtagtccctgaaccgtgccttgagctgaagagttttgatagttactatggtagagctgaggccttatgaaaccaaacttcattaggaatgatgattcatatttgtttaagagagagcaaatggttctgattcttttcttttccccaaaaataaaccacagtgtgtagaattattacctgttccttgttggtgttgttgtccctgttatttgcagcttgtgagattaatatatcttgtacaggttcatttcttcattcatgtgtaaccaaagaaattttgtattagcccagtaaccagatattaatttttttaaatatttgggcctcgttaaaaagcccagcccaataacaaagagctgcttcgtaaaaagagacgtcacgaaaccattcgcttaccaaaccacacagagacacatctcttcattttccaaccatcttcttcttttcgccacacccgtaaatatttactttttctcactatgttcaacttattattattaaattaactaatttagtgtatgccactagaattatttttatataaaatatttttcatcaccttcctgattagataataatataatcaaaaattcacccatttccttcatcttccccaatctctctaaaaccctagaaactcacttcctcagtttctccaactctgtacttcgtatcatcaagcgaaaccctaaaagaagcaatctttagtctcttctcttctttattttttctggggagaaagaaatttcacttttttttatccgatttctgcttcatctgggttttggatttttgcgatcgattttgagaaattagcaaacaatg

SEQ ID NO: 23439 - DNA, 3000 bp, Unknown; identical to SEQ ID NO: 1584
  misc_feature (1)..( 3000): 2750-1469P.txt file - cDNA_ID_2141187; gDNA_ID_1620420; Annot_ID_156570

SEQ ID NO: 23440 - DNA, 3000 bp, Unknown
  misc_feature (1)..( 3000): 2750-1469P.txt file - cDNA_ID_2141341; gDNA_ID_1620423; Annot_ID_156648
gtgggaagaaaatccaaaattttggaattcctagggctagattgagttctaacgaaagttataatcagttctcagaaaaagaagaattggttataaaggatgattcgatgttcaagaacaataaaccgccgaaatacggaaaccttgtaaccatcctcagcctcgacggcggcggagtccgaggaatcattgggggagtcatccttgctaatcttgaaaaacatcttcaggttatacataaaacctttcactagtgcagcgaatatttgttttcagtttttttacatttacatattataattatagatgtttgttttgattgaatccccaacattttgtattttgatcaaaactcttttctagaaagtaagggttatcatctaaatttcatatgcgcatctatatatatgctagcggatctactcgattatttgtaagatatatagtagtaattgaacatatatatcattgtgtaaacgagtttgacgtgtgagattcttgtttcaataggaaattgataatgacgaaagcgtgaggctagccgattattttgacgtgatagccggaaccagcaccggtggcctcatgacggccatgttgactgcgccgaacgattccggccggccactttatgctgccaaagacattgtcccgttttacttagaagaatctcctaaaatattttatgggtaaagaaagtagtagtcatagttgttttttatgaaaattcttaagtatacataatttatagattgatatatatatattagggtctaaaatatagaaacacacaattatgaattcgtatgtttcgtttaacgaaaaggattaaatgatatgtaaaaagaactaattactaaaggttttgtttttaaaaatcaagttgtcattagatgtggagatgattagtgaattacttatgaatatagaattctttgtttcctgaaaaaatgtagatcgaaatggtgggatccgtctgctttatgggcactgtttcgtccaaagtacaacggagagtatctgcatacaagattgggagagattcttggagagacaaaacttgaccagacactcacaaatgttgtcatacctaccttcgacatcaagaaacttcaacccaccatcttctcctcataccatgttcttctccaccccgctgttcttaaaccataattaacgtagcattttaaccactctaacatactaacacgctctgtattcttttgttacgtgttgttgaaggcatcagttgaccctagtttgaacgccaagttatcagacatatgcattggcacatcagctgctccattttacttacctccttataaatttcccgaaaacgataagatgagaacgtttaacctcatagacggtggtgttaccgctaatgacccggtaatacacaatcttcgtaccattttctcattactccttcttgtatgatcatcaactaattgtcttgtatgttttgtgtttggttgttcatagactctggtaggcatgacagctatgtctagaaagtctataatcaaacatcctgatatggatgggttcaagccgttagaatacgaaaagtatatcgtgatatctatagggacaggatcggcgaaaagggaggagtactacagtgcagtagaggctgcaaaatggggattcgaaaattgggcgtacaactggaagcataaaacaactccgatattagacattatctttgaatcaagccgagacatggttcagtaccacacctcggttctgtttcaagccctagagtccgaggataactatctaagaatcgacgtaagaagctatacttaaaacattttaatgtgttatctatcattaactagatgagattattgatatgtgcaagtttatctcaggcagatacattgaaaaaagatgaagtctttatggatgactccgagacgttgaacttagagaatttaaagaatattggagagaaattactggacacaaatgtcatgcgtatgaacctcgacacttatacatatgaacctattcctaaaaccgtcaacaatgatcaagaactcaaaaggtgattcaaattttcaaatctttttgatggtttcttggatatcaatcaatctcatcgtttgaatatcttgtccatgtaggtttgcgaaaattctctcggatgaaaagaaattaaggaacaagacatttaagaccatgattgatgattcgtcaaactcctaaaagatcgataacaaaaatgaatgacagatcgatgataacccgtgtgtttttcttcagttgtgtgaaaaaatctacttgcacttttaacccaacaaaaacaaaatcaagaaaacaagaaaagaaaagaaaaacaaaacatttcgtatatattgtgttgtggggattgctcggcgaactctctttacgccttttttattttttgtcttctggaattgtttttgaaaacgtgaaaaataataaaagatacttccctacgggacaaagccaactatatatcgacgttattcattgcgcaagagtagatctaaattaacgaaaacacatggagaaaacaaataaaaaatgctattaccgcaaattaggaaaaaatgaaaggctagagtttcagacctattagtcattggacttacttgccagttggccagatcatatagatgagaacaccatctcatgaatgtatattatatgccattagttgtgatgaactaaaacatggttgctttataaattagaattcgtttcagtatatacatattatatatagtaagttgtggatgacttgaatacgatacgataagtcttatttacgtttatattattactatattcgggtggcttttatgactttatattctgattaaaataacttgggaagtcaactttgattaatcttcagaatctacgaagtttataaataccatgtttgtcattgtggagaagaacccaatacaaaactcaaatcacaaaaatctacaaatcaatacatttattcaagaaaagatg

SEQ ID NO: 23441 - DNA, 3003 bp, Unknown
  misc_feature (1)..( 3003): 2750-1469P.txt file - cDNA_ID_2141351; gDNA_ID_1620423; Annot_ID_156650
gttcaacgtctcggagtcatccataaagacttcatcttttttcaatgtatctgcctgagataaacttgcacatatcaataatctcatctagttaatgatagataacacattaaaatgttttaagtatagcttcttacgtcgattcttagatagttatcctcggactctagggcttgaaacagaaccgaggtgtggtactgaaccatgtctcggcttgattcaaagataatgtctaatatcggagttgttttatgcttccagttgtacgcccaattttcgaatccccattttgcagcctctactgcactgtagtactcctcccttttcgccgatcctgtccctatagatatcacgatatacttttcgtattctaacggcttgaacccatccatatcaggatgtttgattatagactttctagacatagctgtcatgcctaccagagtctatgaacaaccaaacacaaaacatacaagacaattagttgatgatcatacaagaaggagtaatgagaaaatggtacgaagattgtgtattaccgggtcattagcggtaacaccaccgtctatgaggttaaacgttctcatcttatcgttttcgggaaatttataaggaggtaagtaaaatggagcagctgatgtgccaatgcatatgtctgataacttggcgttcaaactagggtcaactgatgccttcaacaacacgtaacaaaagaatacagagcgtgttagtatgttagagtggttaaaatgctacgttaattatggtttaagaacagcggggtggagaagaacatggtatgaggagaagatggtgggttgaagtttcttgatgtcgaaggtaggtatgacaacatttgtgagtgtctggtcaagttttgtctctccaagaatctctcccaatcttgtatgcagatactctccgttgtactttggacgaaacagtgcccataaagcagacggatcccaccatttcgatctacattttttcaggaaacaaagaattctatattcataagtaattcactaatcatctccacatctaatgacaacttgatttttaaaaacaaaacctttagtaattagttctttttacatatcatttaatccttttcgttaaacgaaacatacgaattcataattgtgtgtttctatattttagaccctaatatatatatatcaatctataaattatgtatacttaagaattttcataaaaaacaactatgactactactttctttacccataaaatattttaggagattcttctaagtaaaacgggacaatgtctttggcagcataaagtggccggccggaatcgttcggcgcagtcaacatggccgtcatgaggccaccggtgctggttccggctatcacgtcaaaataatcggctagcctcacgctttcgtcattatcaatttcctattgaaacaagaatctcacacgtcaaactcgtttacacaatgatatatatgttcaattactactatatatcttacaaataatcgagtagatccgctagcatatatatagatgcgcatatgaaatttagatgataacccttactttctagaaaagagttttgatcaaaatacaaaatgttggggattcaatcaaaacaaacatctataattataatatgtaaatgtaaaaaaactgaaaacaaatattcgctgcactagtgaaaggttttatgtataacctgaagatgtttttcaagattagcaaggatgactcccccaatgattcctcggactccgccgccgtcgaggctgaggatggttacaaggtttccgtatttcggcggtttattgttcttgaacatcgaatcatcctttataaccaattcttctttttctgagaactgattataactttcgttagaactcaatctagccctaggaattccaaaattttggattttcttcccactgaaattgttaatagtggctaattttgaaacacagtgaaaagcatttgatcgatgatatcgaccaacaaagcgagtcatcaaccactggaccatacttagttaatgactcgtttttcttttgagttgtaaaagtttaaatctaaaaattggtttagaaaccaaaaaaaaaagaagaagatcaatgcaataattctatacattttcgtcttatatacacatgtgtgtgtatattataaaaatgcacaactaaatgagtgggagattcgaaacgacaaattttgggatcgataagactctttcttaatacattcgtgctaaccgtgattttagtttggaccttttctttgttattaattattataataaccttggaacaactagttcttgagacgaagtcgagatataaatctatattttaaaataaaagattactttaatgtttatctaaatcttttgaagaatctattgaaaatgacatatcattatagtatgactaatttcaaatggtggatgcaaaattgcaaatacatgtagaaaaatttgcagacgagttatatgacttataaagctagtgtatcatattttttagtttataaaaacagcatatgatacttttatgaaagatatgttttttcttaaaacaatcaggaacaaaatattttgtatgtaggctctatgcaataagtaagatatgattaacaattgatccaacgaattgggcttttcagatgatgaaacgggcctctatgaaataaatgatggatttttttccttctaactctctaatgatacaaaatacaaagattccaaaacatataaactttaattcattttttttataaaaatagtagtattttacatatgagatgagatcagaatcaatagagtacaacaaaacactctgtcagattcccacttagttttgaggattccccaaaaaacaaatttggacaatgataacgctcaaaatttaattaataagtttccccaaagtataattaccaaattatgaatgaatagtattgctctctcagaatcaaaacactgaaggagaaaaaaataaaaatg

SEQ ID NO: 23442 - DNA, 1810 bp, Unknown; identical to SEQ ID NO: 1605
  misc_feature (1)..( 1810): 2750-1469P.txt file - cDNA_ID_2141382; gDNA_ID_1620423; Annot_ID_156658

SEQ ID NO: 23443 - DNA, 3000 bp, Unknown; identical to SEQ ID NO: 1595
  misc_feature (1)..( 3000): 2750-1469P.txt file - cDNA_ID_2141433; gDNA_ID_1620422; Annot_ID_156629

SEQ ID NO: 23444 - DNA, 3003 bp, Unknown; identical to SEQ ID NO: 20979
  misc_feature (1)..( 3003): 2750-1469P.txt file - cDNA_ID_2141433; gDNA_ID_1620863; Annot_ID_170390

SEQ ID NO: 23445 - DNA, 3003 bp, Unknown
  misc_feature (1)..( 3003): 2750-1469P.txt file - cDNA_ID_2141464; gDNA_ID_1620424; Annot_ID_156666
aatggtacattgtttcgattcgcttcttaggaatggaaacggttgcacaagaagaaattcatagagactttcaagaaaatcatggaatgtaagaagaaacctcagggacagggaaatgatgatattagccatgtcctacgcgaagatcaataggataagactccatcgtcttggatggacttgtgtttgagtatgttctatatataaccacctttgttaaattatcaacaacaaaaaaccttcgtttttaaaaatctaaaataaataaaacgtagagagtgttgtattgatgtaagatttttgtttttgtataaatttaaaatttatttaacaaaaaaacggttttacaataaatacatcgttactgaaacaagtataaactgaataaaagagctaacgacaacaagtgctaaaccaatatcgtagtccgccttcgtagataggtgaacttgaagtaactaaaataaactaaaatacttaaccgattccgcatattcttatcgaccattttggcaagagagagggctggaatggatgactcgccatgccttcttccatttctctctttctaaagagctgaaacacatatctgaaaacaaacatatgaatttgcgtcaaggccgaatttgtagatagatcaaaatatcatgtggattatattattatatatatgttatacttgcaagtatttagagatttttgcatcttacttagcttgtgtgtgtttggtctatttgaagtatttgcagaaattctatcccacaattttgtttgtccgcctctatccaaaactgatatgcgttcaattattctgataaaaatttagatacatacgcaattaatcatgagtatttaaatccttaaaggttccaccatctaaatgactaaaaccaattagtaatcaataccaattgggttagtgggttttgggaaaatttaaagttttgtactcaagttggtgtgtctaattatttattatttactttatgaattagcataattaagcaaagaacaaagaatattttggtcaaatatataaaaagattaacatccatctgaaaaatcttttacctatagtttttgcaacttgaatatttacctcaatagataaaaactagagttatttttttttttttttgtcggcaaaaaactagagttatttatcaaagccaagttagcaaaataatctactatgatgacaaaaatttgtaactaaagaacataattccacgtcgttcaccgtttcgtgttcctacgtgttattcttttttttggtcacgttataaaacctcaaaaagctctagaggatcagagaaaataacataaccaatcccaagaagaaaaaaaaaacagagtagagattgataaaaaaaaaatgagtagctccgattctcctcagcttcacaatatcttcgtctatggtagctttcaagagcctgacatcatccatgtcatgcttaatcgtattcctgagattgtctctgcaacacttcctggcttgtacgttacctctctctctcgatcttgatcttgatctcgaatgataattctctctgttttttagatctaaggtttaatgccgattttgggttgttttcagtaagagatttaggcttaaaggacgtttgtatccatgtattatcccctctgagaatggagaagttcatggaaaggtttgatttcttgagatcattctttgtgtgttgatcttgattcttgaataattttagattttgagaatttttttggtgaattgtttggtggtccaggtactaatgggattgactaatgatgaacttgagaatgtagattgggttgaaggaaacgaatatgaaagagtgtttgttgaagttgtaagaaaagtaagtttcaagatttattgattgcatcttcaaaaacactttttagtggtcttgatgaggttatgagaatatatatgcaggacaattctgagaagatgagagtggaaacatatccatggatcaacaagaatgatcctgatattggtggagaatgggatttcgaggttcgatgatttaaccatttttgttttgttttgttagctctttatgaatgatgaagtggtgcattggtttgattcgcgtgtttttgttaggaatggaaacgattacacatgaagacattcatagaggcgttcacggagatcatggaaaggaagaggaatccacaaggaaagggtagagatgatttcagcaatgtactcaaagaagaagatcccgcgaatgctccatcgtcttgaatggatttgtgtcgagtatgttctatatatcacctttgtgtctaaactccatattaaataaaaaaagctggagagtctagctaggttattgtggagactaatgacaagaatgtttttgtcatgttgtattgtaagatttgagttatatatcatgtggattgtattattgtgttatacaagagtctttaagagattttggcatcttacttgtggcgtctattgaattaagcgtgtatggattaagtgactgaaaagagaatttgtagtaccgaccatgggataagggttttgaaatatcctcaatggttaaagaagcatactataaacattggaaaggtatgtaacatcttttggttacacaagaaagataaggttcttgaagacttggtatgtaataagaagttaagaaccaagtaagaagtgaaggagagacgaaaatggagaaattcacagagtacttgcaaattttataccttttacataatttacaaatattacactctcccaaagagtaaagaaaaattaagtgagagaggacttaaaggcccaaatataaagcccattaggcctatatttaatataaccaatctggaccgttgaatatttattaagcccacataaatcgtgtccgttgattagaagagcccaagagaactctagggttttgtcttataagcttgatctcgcattaggtctttgcgcctcttgccatcttttgtcactcatcttcacaggaaacaatg

SEQ ID NO: 23446 - DNA, 3003 bp, Unknown
  misc_feature (1)..( 3003): 2750-1469P.txt file - cDNA_ID_2141474; gDNA_ID_1620424; Annot_ID_156671
gatatattatttatcaaaattttaaaaatttaactataacaaaaaaatgaagctatattgcatattatttttgatttcatacaattattttgcatttttttagagatagatgataaatttgtaaaaattgacgtctttgaaagttatttttgcacaaaattccttttataaagaaaaagaaaaaaatttgttttgagacaactcttaagattaccttacaatacattgatatttaaaaacaaatttatatgaatctctagtagctatcaccctagttacattggctaatggatttctcataatagttttggatcctctaataatctctagttttggatcctctaataatctctagtatatgaaggacggaatttcgatcattgctctcaacttgttcatcaaaatctagcaaaattgacattttccgtcgaatatcacccatataaacttaaccatagtggaaacctaaaaattcacccccaacttttacaagaaagtgatctttctcattccttcatttgaaaggtttgaccttaacgtttttgttgtagtcgaaggagtatctttcacaacattgctgatcttagaacaaatgtaacccattattaccataagacttattttttctttttcagttttgacttgtgcctttatgtttaagacactagtagccacatttattacgctttttcaccgcaaaatttaacacgcactctctttgtcgatcccacaaactccatctacctaaccatggttaaaaatcatcaaaccttggttcccttgattaaaatatccctaaatccaagtctctttattatttcatttaaaatcataaatttagtttaatacaattgtcctttttcaaaatattatttctttatttgcttcagcaacagtcgtcatagtcatcatatcattttcttcttttcctcctctaaacgaatattaccaataaaaaatcaagtggaaaatatgtaatattaaaaaatctccaacagcttaagaagttagaacctttttacttatctttatttcttcttcttcttcatttttctattcacattctctgaaactcataccatattttcaaagctcttaacccaaaaaccctaagtcttttttttcttcaaattattggttatattaatgttttaagctatgatggatatgactcctacaataacaacaacaacaacaccaactcctaaatcacccgaacccgaatccgaaactccgacccggatccaaccggcgaaacccatttcctttagcaacggcatcatcaaacgccaccaccaccaccaccatcctctcctctttacttacaaagaatgtctcaaaaaccacgcggcggctttaggtggtcacgctctcgacggttgcggcgaattcatgccgtctccgtcgtcaatctcctccgatccaacttctctcaaatgtgctgcttgtggctgccaccgtaatttccaccgccgtgatccagataacaacaacgactcttcccaaatccctcctcctccttccaccgccgtagagtatcaacctcaccaccgtcatcatccaccaccaccaccacctcctccaccaccacgtagtcctaactcagcttctcctccaccaatctcttcctcttacatgctcttatctctctccggtactaataacaacaacaacaacttagcttctttctccgatcttaacttctccgccggaaacaaccaccaccaccaccaccaacatactcttcacggatctcgtaaaagattccgaacaaaattcagccagtttcagaaagagaagatgcatgaattcgccgaacgtgttggttggaagatgcaaaaacgtgacgaagacgatgttcgtgatttttgccggcagatcggagttgataaaagtgttctcaaagtttggatgcataacaacaaaaacacctttaaccgccgtgatatcgccggaaacgagatccggcaaatcgataacggcggaggaaaccacactccgattctcgccggcgagattaataaccataacaatggacaccacggtgtcggaggaggaggagagcttcaccagagtgttagtagcggcggtggtggcggaggatttgatagtgatagcggcggagctaacggtggtaacgttaacggatcatcgtcgtcgtgaagttaaagatgagagtgtcaggttaataagaagcttagagtaagcttattcgtattatcatcgttaataactttctattaaatattaattaagatctttagctttgtttgtttttgcattattattagttttgatttaatgttctttaccacgtcggtgtctcgctcgatgaggaataataccataacaatgttcgaattatatcatttgttgtaaacatttctattaatgaaccctgaaatgtgactaagtactccaataaatggtacacttttgatgtggtaatcttgtttcggatgaagaaacaaaaagattaataaacgagtgaaacatgattagttactataaatattcatttggtttcttatcttttaaagtactcttcttaattttatttgcaaccaaactagatgtagtaggtgtactttttttctttcttagatcctcttaattttattttatttttttattctatatcaaatgattagccatcattagtatattagtagcattgttgttaacacccagtgttttcacgtccgacccggaccgtccggtccgaccggttgaaccgtgacccgaacacttttccggtttgggtttagtattaaaatccaacaagttcaaaaccgaaaaaacccacaaaaactcatcattaacccgtgacccgatgaaccagttgaactggccggatgtgggttttaaaaaattctcttgattttggaataaaatatgagattttagactttattcaatcaatttttagatatttttcagttcttaaacccatttgatgtttaagattttgatgaagacttcacaatgccgccttaaaaaatg

SEQ ID NO: 23447 - DNA, 542 bp, Unknown; identical to SEQ ID NO: 1609
  misc_feature (1)..( 542): 2750-1469P.txt file - cDNA_ID_2141504; gDNA_ID_1620424; Annot_ID_156681

SEQ ID NO: 23448 - DNA, 3003 bp, Unknown
  misc_feature (1)..( 3003): 2750-1469P.txt file - cDNA_ID_2141543; gDNA_ID_1620419; Annot_ID_156534
ttgttttggaatcgtttattaaaccgaaattgtggagttggataaaggtcacgtgattgaagtttttgagtttctaaactgagagatttaattaatctaattaatcagttcttaatcaaggtttagaatttggtttggatattagattaaatcatagattataattgcatttaatcttgatcgtttagtctaaaccaatgcagcccgagattgttcctgaagccgtttttgttgttcctagttcaaaaccgaggaatcaacccattttgttaaggtgaggacgcgaccttgttttatttgttatatgaatatatttagttgattatttagtttagagttaagccgaatatatctatgagttacatattgtttgatgtgtgtctatgactgcttgtcttaggtttagactttgtgattctagatatatttatatatggaaaatttgtgagctctaaggtttaccttcaatgaaaaattttagattgctcacccctctcttttttgcaggttggttaagttgagagttcgttttccattattaattggtagttttgcgatgaaagttggttttgaaccgggctaagaagtgaatacgttgaccagctccttgtaccagattcgggtcctttcatttttaatctccataattaaaccagccgcgagtcttgaagaagaagtatgcagtcgatagtttctttcttccagagaatatacatcgaagcttgataggtaatcctaagaaagtaaggatcgtagtcatatttttgtcttagaacggattcttaaggcatctaacaccatcgccaaatttatctctcatgacagttattaggtttcaaaactctccaagattatattgaattgcacaagaagcatgtcggaagttgaaacaaaagtaatgttgctgatctaagaataaattttgggcttgacttaattgtagcccattatataacattcaggtcagtgtataaatcattttaatttattttctttccaaaatcatatataccacaacgaaagcataaaaaccacaaaaaaatattaaatgaaaaatacacattccaagaagaaggtaaacaaatcgtgaagtgttttgtgggtttaaatctctaccaatctcactttctttttttctgagagaacctgaattttttttctgataatggacatagcgagtaccaaccggtttaagaagaaggtttgtgatggttgcagtgaagctatgccaactgggaaaaagcggaagaatgaaaggacgttaatgaacaaagatgtgaatgccaaaagattgaagaaagatgtgaaaaggtgagttctcaaaggttagagtggagtgaggaagacgagatccgtgtgctacaaggtatgatggatttcaaagctgtaacagtacaaaatctttctaatgatatgaacgtaacttacgaaatcctttaggaatatataagcgttgatgtttgtagctatgcatttgtagagaagatgaagagtatgaaaaagaaattaatggagaaaatgaggattaacgctaaagatttgtcttcttcggttccgagttgttgaaacttatttggggatgtgatgtgaaattggcttgttctatcttaagtaagttatactcaacaacagatttcacatcatatctccaaatcagttttaacaactcagaaccgatcgaagaagacagatctttagcgttaatccccattttctctattaatttcttcttcaaactcttcatcttctctacgaactcatagctataaacgtcaacgcttatatattcatggaggaagttgtaagctccggtcatatcatcagaaggattatgccttgttagagctttgaaatccatcataccttgtagcacacgatctcgtctttttcacttcactctaacctttgagaacttacttttcttggcattcacgtttttgttcgttaacgttctttcgttcttccgtttctttccagttggcttagcttcaccagaaccaccacaaacctccttcttggaccggttggtattcgctttgtccattatcaaaaaatgttttaggttctctgagaggaaaagagagcgagaattggtagaaatttaaaccaacaaagcacttgactatttatttacctttttcttagaaatgtgtattttttatttaatattcttttatagattttatgcttttttgtgatatatataattttgaaaagaaaataaattaaaagaatttatatagtgacatgaatgttatataatgagccataattaagtcaaacccaagattggttcgacaattcgtttttggttaaattgatagcaagtgtgggcgtgagtggagattctgtgaaaagaagatggagtttgttgcacacaaacaagataaagatgattgaagacaaatggagagtcttgatgaccaaagaagataaatttgtgttgcaaaagatagagcttttgcatgaagtggtttctctgatcatttacgttgaagcatttactcactagatgcaaaatgtttcttgatttgctttttttgttggatttttctgtccaagtttttgctttatattatgtcattgttgcttctatgtttagaatctgacctctattaaatgtgaaacttcattagtatttttggttactatgttgctctttcgttgataacaactttgaaatgttagtcgcaccaaatttagtaaaaccgttttcttatacatgttacaaagcttgcttgaaggctataacaaaagatttcaaagggtttaacaaattaaacagatactaaatttgtgtttattacggcccattaagaacccaattaagagcgatattgggctaagactgatattttaatattaaacctattacggcccattaatagcccaatcaatatgtaaacatatgcgtcttcgttccatgtctccaatcttatttcttcttacccttttttccaaaatccagaaaccccagagaaagcaaaaccgcgagctctcatg

SEQ ID NO: 23449 - DNA, 3003 bp, Unknown
  misc_feature (1)..( 3003): 2750-1469P.txt file - cDNA_ID_2141551; gDNA_ID_1620419; Annot_ID_156536
agtctctgaaacccaattcaagaaaatcaaggaaatggtggaacaagggcttgctggaccagagatggcgataaagaagctggaagaaagcggggaattagggaaccgagtaacgagattagctaaagagatcgattcagcgagaaagtgggtgaaggagaaggacaacaatatgaagcatgaggtggaaactctagaagcgaagctagaatgtagagaagcgcaagaatctctgctaaaggagaagctatcgaagctagaggctaagctagcggaggaaggaacagaaaagctgagtctatcaaaggctatgaggaaaattaaaaagcttgagattaatgtgaaggagaaagagtttgagttgttgagtttaggagaagggaagagagaagccataagacaactatgtgttttggttgattatcaacgttgtcgatatgatgatctcaaaacttccatttgtcacgtagctcttcaagcatagagttcacttcttcttctccttttgggtgtaaaatgtaaatattatatgttgcaagatttgggtattttttcattaatggttgtaaactaaactaattttttttgtaaataacacattttaactttattttttttgtaaataacatattttaactttatttttcaaatattcttaatattgaacatcctacgcgttttataaaagtctccattagtttgttaacttttttttttttttgtaaaagtctccattagtttggtatgttttggccttcatatatttaatcatccttttgttggaagttaggttagtttgtattaaaatgttttaagttatcatcaattatagctcatctggtcaccactattttatagaaagaaatccagagaagaattatatatgaatgaaaatctggtaacaattaataaataaaaaagcataatgtgaaaaccctattaataagaacaaatcacaaataaactcaaaactaactactaataaataggagaaaatgaaagaaatataattgaaatgaaaattactcctaagaaaaaaagaaataaatcagtctcattttataatgtgaagataatgtagtctaaattaggattacgtaagtaaaatcagtctccttgatagatttcctaattaatagtatagatataagaaaatagagtcatatttcttttgacaaagacccaccaaaaaaaggcgggaaacgcacttagtgattgtgaggcattaatcatgtgttataaagttaagtacggcattagacatgctaaacaaaaaccaaaatccagctaatttgtatatctccgtggcaaatacgtaataatcttgaacattgataactacagtcaaatgatattttgaccggtgttgacgagaatttgaagagaaaataaaagcgtgtgatggcagaagcgtaataatctgataaaagggaggggtgtttgtggtaagacgaatttccaaaaagattcctccagtcttcgtctttctccctcaaaattgaaaacacacacaaaagttgagctttcataactgttctctcctctcaaataactccaaaaaccaaatcacctttttttttctttcttcttcaatctctcttttgcttcgatttcaatttcgtaatcttatcatctctgtagccaaaaacacacacatcagaccagagagaagagcgagagagagtttttctttggtagttttctggactttcttcaaatctcaggagcttccgtaatccgtatccaggtaaaattctaggttacgaaatgattttgttggcttcgattattgacttttgaagtttatttgattcttcgatcagcttttagtttacgctttcgttgcttagtagtgttggatcatgacttcatgagtagaaacatctgatggttttgtttgtttgttgatgtgccttttactggggaaattatgagtttcttgttatccagttcatcttaagtctcgttgaggttttgatgatttgcatcagattacctattggattatcgttgatttggttcgttagaaatagagtaatagggtttatatcaggtgaatcaaggtcatgagctgcaatttccaaatttgtttattattattcaagtttttgcgattgggatttcatgtttaggcacagtaactagatgtccttagattttactatcaagtcatctttagtttctcatgttagtagattttgtaatttaagcttctatcaactgctgtgtaatcatcaaaatgctaagtagaattcttggtttctatacagggaaacacgaaaaaccatagaaatcgattctggaccttaaaggaaattcgagagataaagtgtaagtgaaactagaaactctactcctttccttgtatttacagttttactagtaactttctttttaagaaagcgttggatgatcggatcgagattgttttagttgaaactgtattgttaaagccttaaaggtagtaagtaacatataagaacaaaaagaaacaactcacattttcctgaggtatgaaaattgaataatgatagctgtcttttatcggttctagaggtatgtgctttctggtccatttccaaaattgctgaggtggctccacttgagatcttttgtcttagccaatgccatcagattccaaatttagacccggcactaaaaagtgattagctttaatccaaactcgaaactctaatcaaattggcatttgttcttgtaacttctgttgaagtaaaataataatatatcacttggtaagacagttactcattgctgcaaagattttggatctatgatgatgttctttgcgggtcccacgaattctattattatctgcgtaccttgtcagagtacaattgctggatctacttctattattatattctctttatgttgaatatcaagatgcttaacctatgatctggattctgtaaaagccaaattattagtattagttttctaatttgttagtattatatacgaaacaaaaatgtgaaaaggatg

SEQ ID NO: 23450 - DNA, 3003 bp, Unknown
  misc_feature (1)..( 3003): 2750-1469P.txt file - cDNA_ID_2141559; gDNA_ID_1620419; Annot_ID_156538
aatatcctcaagaacttaatgcctgatgaaggaccgactctggctcctatcgtggtgattggcttagctgtcatctttgtccttcttcagcttttcgccattggccttgtaagtttataactagtgtgatcgttattcgatgttacttggctgtgagacgagtgactaaatgtttcttttttttggtaactggttaggtgtattctcaagttgcgtatgaaataatggagaagaaatcagcggatacaacaaaagggatattctcaaaacgcaaccttgtgccgcgtttgatactaagaacactatatatggcgttttgcgggttcatggcagcgatgctaccgttctttggggatataaacgcggtggtaggagcgtttgggtttatcccactcgatttcgtgctgccaatgcttctatacaacatgacctataagccaaccagacggagcttcacgtattggataaacatgacgataatggttgtgttcacttgtgcaggactcatgggagctttctcctccattaggaaacttgttcttgatgctaataagttcaagttgtttagcagtgaagttgttgattagatggttttgatagtgtgataaaaacataaacaatacttgttttgtggttacacttgtacatgaatttctcgagttgattcattatcacacaaaatgcaaaaccaaactagttacaaaatgcaaaaccagacaaggattatcacacttacgtcaattgttcttgagatgaatatgttttttttgttaaatgattttctatttaaatacaaagttcctttgggtataaacactaaacagattactgggttcagtaaactctctcagagtgtgttaattttcagtattcgtagctgattggttcggtttcggaccgattggatatccaccaatccgaaataatacattacatattattaattttatgctcaattcggatcgtgtaattcagaatttcatatttgatatagtaaatttcaaataattttgataattctgatcggataattcggatattttggatttcatcggataattcaaatccaaataagaattaaaaccatacatattttggtttcgaatacacttgggattctaaaatatcaataaaaaccgatttaagtctaaaaaaattagaatcataaaattgtttggattctaatcggattctatcagacctaatctaatctgatccgatccaaaattcgaatgcccagactatcacatactatggtcatggatttcggagcggatactccaatctcatttgcattttgtcttcttcttctttttttttttaattattaaaaattaccttaagaatctaaatggaaatgcaaaacaatgtggacgtaaagaacttaggatcaaggtaatctagcaacaacaaaataaatggatatatagtaaatttaaaaataaaatatagacacaataacaaggtactattttttaatagcatttcaatataacaactaaaaacaaatcatgaggaacaaaaaaataccgaaaaaagctcgcgcatagtgcagatactcacctaattatatataaaggtttgtattcatatagtatcttttggccattttctgtaaatatatattatattgagagtatgatttgaggatcttcatcataaatgaaaaaaataaatatatgtggggacaagatcaaattaatgatttatcatgtgatgtatcagcgatagtatttgttaaatactatttctaaggtttacgtgttaggattaggaatttaggaacgagcacgaatagtcaacatacagaacctaactcgttttgtgttaattgttttagacacatgtgtgtaagtcagtaaaagtttttttcctaatggcaaaagtaattcatccattcaagatagaaatggccattttctttaagagaaaaccaatctgatgaaatagagtttacttagaaaaagataataccacatgatcgtgcttttttgcaagacactcatgtggaaaaagagtgtttgaaagagctaaaatcttctaattctgacagtaaaagtttaagctcgtttatttattacatttttcgtcattgtcaactaactatacatgagtacttcataaaatccatgtgatttagcttacaaaaaaaaaaaatgtaattacgtacgtgtatagaacttaaaattcgctaatggtttggtaaacgctagagttggggcttaataatggttaaccaaattttaccacaagtcactaaaatatgatagtttagtatgattattgtagtactataatatatagtcagttgcattacattcacgtgaaaattccaccaagctcgggacacgcgtagaggtaggatatcacttctcactttccagacatttaatgatttttaatcgagcttatgggtcaatcatatctatcaatttttattttcttaaacatatctatcaattactctaaattataattaaaaaaatgtattaagctttgtgatatacaaaattatggtcagttcaattagttgagaaactttcagcattaatagatctaaatttggccacatgagataattatgtattttactagaaaaatgttaaattagagccaaaaattccaaaatttcaaccaaaaacttagaatttttatttgtctttcactaagaacgtcgttatcgtgggattaaatatttaattaataaacattagctgcaatactttcatgttcatacatatataaatgttaaatgatcagaccgtgaagcccataagaccattcataattaaccaccaagtacccacttctctctctctctccatacatatactatattatagataaatatcccatcaatacgtaacaaccaccgagatattacaattcacaggtttctagctattttatatagttattgtaaaccaaaagaaaaagatttttggggatagatcaatctcttgcgttcatttttcttctctttggtacgaaaatacaaagatg

SEQ ID NO: 23451 - DNA, 3000 bp, Unknown; identical to SEQ ID NO: 1572
  misc_feature (1)..( 3000): 2750-1469P.txt file - cDNA_ID_2141585; gDNA_ID_1620419; Annot_ID_156546

SEQ ID NO: 23452 - DNA, 3003 bp, Unknown
  misc_feature (1)..( 3003): 2750-1469P.txt file - cDNA_ID_2141597; gDNA_ID_1620419; Annot_ID_156549
gctttaagaagagtcagcttatcaattagttgacttcaagtgtgtacaagggttttgttctgttagatactttagagaattaaattcatattattgtaactaaccgttaaatcaagcacatttatttctaattacgtagtactcgctttcactatttctgaatgaataaactaaggcagggcaatatatatataacaaatactaattattgttattattttttgtaaaaacatatgcaatgttttaaatctattacttgtgattgttttttttgaatattgtatcagatatatatatggtcgaatatctaacaagctctaaagtgaatataaacaaaaaaaaaaaaaaaataagatctatgttctatgtcgcctctaaaataaacatattacatacccacaatatcggaaatggttcgaccattagtgaatcttcccgtgggttggccgttggaaggtgcaaaatcgatgccataaggcgaagaatcagcttttgacaatgtgaagatatagttgttgtttccaacatctaccaatgagtctccaaatatgaagtttgtgaacgattgagcagcctgaaaatgtgatagccaaaggagaagaaaagtgcaattgaaaggcttgagagaacatctataagtgaaatccatttttaactttctcaaaatatttgccaatgtggtaggaagaaacgaaagagacttgtttggttaaataaacttgattacgttaatactttttgaaccattccttttgcttacgtatgttacagcatgacttgttcaaaagatagcacatggttcttctacgtacactattattactttgttggtcgtgtaacacaaaaattgtttcgtcttgtgtgcacatatactcgacttatatgacattaacatgatctcaaaaataatcctaagttacttataaagaatatctcgatttttgacttccaagtttgtaatcaatgttataaataggacaacaagctaggctaggctgtcttttagatggttaatagtcaaagagagtgatggcaaagagcttaattaatggcacatgtgactcatcgaacacgcttcttcatatcttcttcttctcaaacaacactacagaaatttgtctccaaaaaaaaaaaaataataataacgctaaagaaattttcttttaatatacctctattgttcaatatatatatttggcagcctctatgttcaatatatataatatatatgtgggttagtttcaactaaatacaatacctgactatgtcgggattcaaacaaaacccaaacatttaaactttacaattataaatttaaaaaacctttaaaatgcaactaaaaatgttttcttggtaagaaaacacacaattaatgtttataaaaaataaactaaggatggtatttatttgaatgcttttgttaaatgttatataaatagttttaaagctattgttttaccaaaataaactaaatgtatattataaatactaaatttattggatttaatttattttagtaaattatcattatatatatatatatatatatacataatgttaaaacttaaaagatgtttaaaaataaaatttggttattcatgtaatgactatattcaagttgtgacacatgtatatatcgaccccaaaatagacctcttataaattgtcattccacgtcacttttatccgggattccaggttatatgtaaaaaaacaaaaactgatgttctacatcatttaatagaaaactgaaatgtgatggcacatacataatgcatctcccaagatggtacaaaagtaatcattgtccttattcttcagattcaaccttgagactacccaatctccgtggaggggtttgagcaggagattcaaatatccccaaataacttggaaaagtaattaaaatttcatataagagaacaagtgtgtaagcatgcaattcaatcgagctctcacgatatccccaataggacgaaggaggaactcagtcggaggcggaaagaaaattgacatgatgcagctattcctcgatccgacagatcgtttggaaagaacaatgccttaaaaaccaaacacgttattttttaaagaagaaaaacacattactttaaatatatcataccaaagcaatatatgaaaatcataataacagaagtaacaatatgaaatactgtaacgttcaaaccaaattaggtttgtgtcgagaagttaatttaaaaaaaaaaaaattatcaaagcttttatcaaacaaacgtttcacttgatgtaaaaactatattgtttttttgaatttaatttaatattagattcaaaaacaaaaaaaaaagaacgttccaatactcaaaaagaattgcattggaattatctctctgtttatctgatcaatactcaagcattaggttgtattctaatttaactgttaaaggtccaccggtgtcttcagtgacgtatacgaccttggtacatgtttttttacttcacatgagccaatataccacaatctccaaaagataaacgcaagatgataaaccacaaaattttacatgaatagtaaatcatattaaagagtactttttatttcaaggtaaacagtacttgttattcagactttagtatatgtaaaacagtattttcataggaacaaatatataaactagtaagtcatagtagttacctaattggtacttttagacctcaaaagtctctcaaaccataaattaatatagtacattccaaattataaacatattatgaaaaagtttaattaaaaataaatatttaatttaggtttgcaaaaaaaggttcaacctccacccaatttcatgagtttggacagcaaattattttaaatgaaacaataaattcatatatctgtcttctactataaattaccctctctctctcttatcatcatcatcaatttatataaccctctcaaaacacacatttttaagattcaaataaaatcccttcttcaacattcaccaccacaacatcatg

SEQ ID NO: 23453 - DNA, 781 bp, Unknown; identical to SEQ ID NO: 11
  misc_feature (1)..( 781): 2750-1469P.txt file - cDNA_ID_2141597; gDNA_ID_604; Annot_ID_144143

SEQ ID NO: 23454 - DNA, 3000 bp, Unknown
  misc_feature (1)..( 3000): 2750-1469P.txt file - cDNA_ID_2141624; gDNA_ID_1620425; Annot_ID_156691
ttgttgaatggattaatgcaaaatttttatgctcatgtttgtctagattataacaatctacataactttaagtgagatgttttttttttttttactctttcttaacctagttaagactccatggattgagaatctaacatggtgtaaaagggtttctatcaatataggattctgcaaaaatgcatcagattttagatgcattgagacataatatttttgggctttcactcttgacacataaatgatatattcggaatatctttctcttctgctcgatggttcttaaatagttgcttcaaacctaaatcaagttttgtctcttggtaaagtttggagtattttcttttgttttgtactggaacaagatttgttgcaacttttctttttttatatattcaagtgttttggactaaaggattgatgaattggagattagacgagtgattattgattgtctataacatttgggcgtaatctgttgtaatttacattaccgttctgtttttggtaaagagaagatccacatgttatagtactacaagaagtaggaaatagccgctgacgaagtacgcgactttctctctggcacatctttcgagactttctcttcgccattgtttttcgacgccggtggaggaaggagattctcgccggcgtcgggacttcgaatttcttctctgcttcctcggccatccttgttgcttcacacttttctttgttccgatctatcttgctaaacactcgcgaaatctatttctcctaccaattttagaagaagaaaatctaatggaatcgtcaacgacacacggcggctctatctcttggatggtgattctttggctctccgttgcggcctcgttgtcaaagttagtgagttctctcactcataactgcggaaactccagatctgctcccaaacctgcaaaccccttgatccctaaccactggtctcctacgacggctcgcttccctgtccaagcaaccctagcggtgctccgtcggaattccctctctaggcggctgcttggggtgacggaggagagttttgcaagaggcaaaaccctaattggccaattggactcttcttttgggatgggcttctcacatagcccgctaagactcccttctcagcccatgtctgaaatatttgggctatcccaattagtaatttggccaaggtctgtaagcttggaatttccctgctgctctctgggtttaggccctttcctcacatctccaaggcccatctccaaaaggtgttttccactgtgttctctgcaaaagcccaggttctatctaacacttcctctgttcttgtctagcaaattattgtgtcgactcatggaaccgattgtttatggacgtcgattggaacctagtcatacaatcttgctatgctggtacaaaacttatctaagaacctggctattagaatcacctaaggatattattctctatttgcgaagcttgaagaagaccttgcttgttagcttctttaattgtggccagatgtttagggtgaggaaatacggcattatgaccctgtctctaaggagcggtggttaccgtagcctcctcatccccatagccgtgtatcccttgttatccaagcttatatttgcacaaattaacatcttcagggatcgtcttattatgctcttacccgataagcccaggtctgatatattttgttatgtgttaagccgactacaaactttgtgtggatttcttaatctccatggtagactccatgtgagagagaacccacctgttatgttacggcattatactctacttgtccaaaccctggttttagcttcatttgatatgttgtggaatgttttgctttgcttgaaagactctggtctaatgctattgaaccttctttgcgagactttttatggtggcttgggaagcttgtcaaaggaccacccgtcaccttgctcggttaacgtttttaacgtcttcaaggcttccacctccactaccttttcctgctgctatggtttgcctatgctcatcttctccactacaacatttgtagcaaataaatccaagcaacagagcaccttccccactccccgaacctcgaccaaagctctactttatgtagccttcctcgtgtcggcgaggattgtgtctttgacctcttcttcaacgccatctcgtctattgactctggcaatttgctcttcctttgattcgctcttggaagaatcgtcgataaactttgatctcacaagtaccaccaagcttctttgcttttggctccaagctctcaagaaatctttgtcgattagctctatctatcttagtaaccttgttatgttaatcttggattatggcccttattgttatgttttaaactttgggattgcttccctctatctctgtagttaccttctacactaatggaatgaaactaatccgttgtccaaaaaaaaaaaaaaaaaaaaaaaaaaaaatgatatattcggatttgtaattgtaattgtggctaattaaattatatcaagtgtaatataattaatatattttatatatcatattttcggtacttcagatttttatttggttatcaattttgttcgggtccagtttttttttttttttctaagtatagaaatttaggattcgttcatgtatttcgttgatttctgattggttcgatttctttttttctttaaatatttgtttttttgttcgtatatcttcggtctaagtccagtggcaatttaatcatcgaaatttaactgttgattgttacgttttgatttttgcataatattgtaatgatgcctattgtaatagtggaattaaatcttacataacggccggttcggtttcaaaaaagtgcattgatgcattctattaaaattggtagaccaaaacattcgggctgattttggccttctttctgatatttatttatctccgaaacttttgcttcttaagtctgtctctctcttctatcagattccacactaatcggaaaaaatg

SEQ ID NO: 23455 - DNA, 3003 bp, Unknown
  misc_feature (1)..( 3003): 2750-1469P.txt file - cDNA_ID_2141688; gDNA_ID_1620425; Annot_ID_156709
ggatctgctactgtcttctttgcctacatcgggtttgatacagttgcaagtatggcagaggaggtcagtgtcatttattgttgcagtatcatattttcaagcactggtatatatacttatattgctgtttcatatgcaggtgaaaaatccccggcgggatttaccgctcggtattgggatttcgctcctgctttgttgtttgctgtacatgatggtgtctgttgttattgttggtttagtgccgtattatgctatggaccctgacactccaatatcatccgcattttctagtcatggaattcaatgggctgcgtaagtccgttaatcggttaagatgcaaactattcattggcaggacttgttttgagtttgatttgtttttcccctgccattctgtcttatagatatttgataaatttaggtgctgtcatggctctctgttctgcattaatgggctccattctccctcaggtaaactagaaacataattcaagtgtttagatctgtaaaattaaggatttaacaatgagaattttgaagaacatatacacgctatgtggatttcttttgtaccaacttattcaccaaagagcttattcgtttttcagccgcggattctgatggcaatggctagggatggtctcttgccttcatatttctcatatgtgaatcaacgcacgcaggttccaattaatggcaccataaccactggtgtttgtgcagcaatcttagctttctttatggatgtttcgcaactggcgggaatggtaattaagatgtattatgattcattaatgttacctggtccagtacttgaagcaccacttagcctgtaactagaatttgacaagctttagttggtgtaggtgagtgtcgggacacttgttgcatttacaatggttgcaatatcattgttgatagtcagatatgttgttcctccagatgaggtactgataagattggaactggtaaactctatctttattcgatttcaccttagactacaatatagaagattcttgattaaggagagaagtctctaactctcttccaatggccaaaccagaatccccaactcctttataatgctacgcactagtgactagactaacaaggcttttatcaggtacctcttccctcatcacttcaagaaaactcatccagtcacgtcggaacttccatccgtagtaaacaacctttacttggcaaagtggatgattcagttgtcgataaggaaaatgctccaggaagttgtaagttacaattcatttttgcaaacaaggttataggcttatagctatttattcgcattggtgcatgaactttatatgttagctgatctctggtcttggtataagcaaaatttcatatctgttgttgattctgtaggggttctcaacaaaaaaaacagacggaaatttgctggttggagcattatgttcacttgtattggaaacttccttttaagctatgcagcgtcaagcttcctcttgccagggttagttcatcaacagtttatttacttgaggctctatctttcactgggtttcaaaacttgggcctttttctataatactcagctccattttatgcaaactatgataacagactcctccgatattctctatgtggtgttggtggattgttccttcttgtcggtttgattgttctgatttgcatagatcaggatgatgctagacacagttttgggcattctggaggtacttatgtcctttctttttcccaatgttttgtagtaagcatttcatttggcaacaaaccaaaaagttcagagttgtaacttagaactctttttgttctacaggcttcatttgcccgtttgttccgcttttgcctatagtttgcattcttatcaacatgtatctcttggtaaaccttgggtgagttatggatcatgacaccagatttgtgaatactactaaccgatgacttcactgttgatatacatttgttttgctaatgttttagagctgcgacgtgggttcgtgtatcggtttggctgttcctcggagtggttgtttacattttctatgggagaagaaacagctctcttgtgaatgctgtttatgtctccactgctcatctccaggagattcgtcgcacttctggacattctttggcttaagtctacatgaaaccatcaatggaagctcaaggaagtgggagtttcctttgtaaaatatgttcaacaaaatctgtataataatatatttttgagattggattatcctgtgtaaatacaaagttcaatgccactgctcataggcattgtatattttttttaaaacctaaatggtctaaatgttatctggtggactattgtatattttttgaactgctgaatttggtggactatgttgaatctggcgactaaaatagcaaatggaaggctatctgtgaaaacttgctgattggtggaccggatcctaaatcgactcgaatccgacatggaatagttataaaattcaaacggataataaactatcctacccgaattccgaaccaaaatccgaatatctagcttagataacggtatgtctttctaggatggtcaacgcattcttatatttagctcatatatgaaatgaccacatgtaaagttgatatatatatatatatatatatataaagggccacaatttaaagttgttatcagtcggttaacgtcatataacgtcgtgtaaattttggcatggtcaatgattaaatttgtatgaaatagtccatcaacgatttttacatgtattaaatagtcacatgcgaagttcacatattaaatgatattttttgaaaattcgcgtattaaaagaaaagtttccccaattaattgcatttaaactttattgtgtacagaattgcatcaaaacttaacccaaaataaaccggccggtacaaatcggttaacaaactctgttaaaaaagaataacctagccccttaaaacctcatttggaactcaaaaaagcagtaccggaaaataatg

SEQ ID NO: 23456 - DNA, 3000 bp, Unknown; identical to SEQ ID NO: 1622
  misc_feature (1)..( 3000): 2750-1469P.txt file - cDNA_ID_2141842; gDNA_ID_1620427; Annot_ID_156750

SEQ ID NO: 23457 - DNA, 3003 bp, Unknown
  misc_feature (1)..( 3003): 2750-1469P.txt file - cDNA_ID_2141872; gDNA_ID_1620427; Annot_ID_156758
tttatattcatatttatgcttcattctatcctcttctatgatcgaactgtgttgtgcttcgtctcgtgttattacctttagaagattaaaaacttcaaattatattttgaaggaataatcagaaactgtcatttacaaaaccaaagtattaagtgtaatagttttttaagaggaagaggattttgcttacatggttaactcggaaatacttaaaacgtcatcgttttgttgtttgtgatttaattgattggaccggtatgtaatgagattgatcgggttctgagaaattcagatccggttttagtgttgttgatttttggtcgactttaaaatctttcagtatatatgcttcgagttttgttttgctacgatttcattttgtgaaccaaaattttttaggcaccaccaatctagatgatcattttcaaaaacccaatgggtccgtagccattagccaatcaataactcacaattttcgtttagatgcaactacttaacattaaaagtgatgattataacaaatgggaataagtcattgggccacagcattgagttctcacaatttcacgtggagctgtctagaatctctacgaacatttttgtatactacaacatgtggaccgaacaaaaacaaaaagaaatatcatcccaaatactaatggcttacataaatttatgcactaaatgttataaagacaaaaaaggaaacaaaacatacaaagagataccgttcatacaataacattccttcgctgtccaattacgtttggtgagacaattccctctttctcatgcaaccagatttgtatttcacaactcatcatattactccaaaatcataacggtacccatttttggagtgttcttagcttataatggtaatagtgataggttttgttgttttgattgtgatctataatccttagacgcaatgaaaagttagttgtaattacaaatgtcgaccgcaacgtgtacaaatgtttcttgtttccaagtttgtggagtgggcacaagtcaaacttaactgcataaactaatcaaatggtaatgtttctaatcggataacgtttctgattaagttcttttcgatggacgattcttgttatttctcattcgattcgatcgtgtgggttaggtttatagattcaaatcaatcaatcttccatcaatatattttatgatgacccatgacacctagcaagtagcaacataacaaactgattaatatcattactaatatataaactataaactataaagtcgtggtattaatgagaaaatgagggcatgaatatttttattgttttaaattagtaaaaacaaaatttaacaagatgactcagtggcggacctacgttacaactaggtggagcacgtgccccatattaaatctactaaatattatataagttgttatttttcattatattacagttagctcaaatggtttttcggcaagcaatgccttatactaacccaagttcgaatctccaaaccgtcacttttgtaagaatattttataatctacatacaatttaggtaattaaattataattaatactatttatataaatgatgccccacataaaattaccttctagatccgctcctgagatgactcatcgtcgtttttgttgcgccgcatgagtgattactttcaaatgtgaaagcattttagatgagtcgttctctacggttgaattatggttttaaaatgaagctgtttaattacacgtttcatgaattaagtttggaccgtttcattttttatatcgttaggagatatgagcctgatctgatctatatttaatatagttcttatctacatgagtttctattatagttcttcctacattcatttattataaggttttctcattgccacgtataatataagcacatgcagatataagtaacatcatatcattttacgtacttagaaaataaaaacaatatggaagttagtcccaaaaggaaaaaatgatagtgatattgattttagatagtaatattataactatgtctatatagttcactcaatatccgattcattaagattgataagccaccatgtaacaaaaggataaattgggttatttgtctatacgctaaaccgatccaaaccaaattagagagaatagacagataacccaatttttcttttccaaatccaaatctgaagaaaaataaagatttaatttttttattatacatgtatttgaccatctaatgatgtaaagcagatgaatcaaagtgaaaaacatgaacgaccatcataatttcataggtgacaaaacttattcatttatgagccacacaaaaaaaaagaagaagtagaaatatatgtcgtcgacaaatattaataagtggtccaagaaaatagggttatcaataaaaacattttgtatacgaagaatacaagttccagttacggaaacaaaagtgattcacgtcgacataatgtcatatgattctgcgtcaaaaacgatcgtttaattgtctctttatctgtttatcgcaactttttaatcatttcattatgaatccttttgcatttcgttgcttgctcccgtataaccaatcggattctttatatgatttattaaaaataattgcatttggaaactaatataatcaccaaaacaatcaataaccaatccttgtctggtcctattttaaaccggagttggttattgactgtttctaggtaaactaactccggtttaaaataagaccaaccaaaggaggtttcgtaataatgtaacaaatcatgtccacgtaaacaagtgagtcacaacgtcaagattctcgatgtccttctataaattgcctctgttccataaagagaatcaccactcaaatctcttcaccttggcaccatctataaatatcctcaaacattagcctctttaagaaatcaattccaaccttttaaagattaatcttgaaaagtttctaataaaaggaagagaagtgatcaggtgtggtgacgagtaggatatg

SEQ ID NO: 23458 - DNA, 3000 bp, Unknown; identical to SEQ ID NO: 1627
  misc_feature (1)..( 3000): 2750-1469P.txt file - cDNA_ID_2141889; gDNA_ID_1620427; Annot_ID_156764

SEQ ID NO: 23459 - DNA, 3003 bp, Unknown
  misc_feature (1)..( 3003): 2750-1469P.txt file - cDNA_ID_2141901; gDNA_ID_1620427; Annot_ID_156768
cttatagagaacatgaatcaaaaacaaaaaatgtgatcttagtctctaaagacctaagctttcagcaagaaacaagctatgactcgcaattctgtctggataaaatctactacggagctacttgatcttctagttttatcacacacagaccataggaatgccttacaaacgaaaacatatcacgatagcgacaagcgtgaactgaaagctttagcagcaacaaattgttctctgaatatgactccattgattaaaacgtaagtcaagactattacatgaataacacataattcaaaacctatcgactttatatagcaggatacaagctaatgatcataattctctttctcagacacctagattcttacagggtacatgatacaaacccaaaaatgcaatctcagtctctaaaacatagctttcagcaagaaacaaaaagcaatgtctcgcaactttcccatcaaaagtacactagagagctacaaaataatcaaacaagcttgaaaagcaaaaaaactatctttaccatatgttcattgacctgccctgttgatggggccatgaattgactaagaaaaatctcatctttttctggattctcttccaaagttattaccaataacccagaaaacagaatcaaccagaaaactaaacgactccaattctgatcacccattcctcctcgaatcattccaaccatatcttttgcttctcatttcatcagatactcaatagaaccaaattgccgattctacagctttttgctgaaattcgataaagatcgaaactttaacacaaaagctcaacaaccctgatcgaaaatttggagctgacttcgatgcaatttccttggaggaccaattaaattaaagcttcttactacaatgccacgagatcaattacacgttttcgagacagcacaaaaggggaagagttggtgctaatgattgttggccagatccaaatgttgacaatgcgatttgtcgtcggtgcgttcaaccaaacccagaattttgaccagagagagaccaaaaaagtttcaaccttttactttttccgagaaaagtcgacgagataaattcacggagatattagctctcaagcttcatacaaatattttctcgaagctttctcgttctttttttgtttccaccaaactcaatcacgcgaaatttacgcagagttattaatatattggattatttgttttttcttggttttatttctcaaagaaaaaaagagaaggtaaactaaaatcgctgttttaattcttttttatatatattatttgtctatttattttagtttatcatgttattaaaattaaatactaaaacttcagttttcatatacatttgatattttttctaattttgtgtattaacttttaagtaatgtttttttatatagaaatgaaaacattgtttataatgatttcttcatttttgttgttacagttaaggaacagctaatcatgtttatctttttttattttcttgtaccactttaaaaccagattataaataggtaaaatagcaatagaaacaaataaattataacctctgaagataaaatcatttgattccatgtttaaagatgcatgcatgatgcatggcccatctctcaatagtcaaattgcttgggaaagccaagtgttaaaattaataaaagactcagaatcttgatctatcacgttacgctattgatcctttcacacctattttcttacttctcttaagaaagttcacaccaaaagatcaaactatcctaattccatttatcattggaaccggaaaactcaaatgcgtataaacttaagtttggtattaattaattgggttaaatttgtttatgaggagccacccctattatagaagtaacttttgattatgaacttcttaaattaaagaacatctcaataatgaatatcattgattaatcaccatagtgttctttatggagattctttataactacatccattaggcatcggacctttagccagtgaatcgaatgatgtattacagtgtcttggaatccaataaaactgcacctcacaaaagtagtgtaggttttaataaaaattatcaatagagtaacttaaacctaaaaaatgctacaaactataatacttttttggtaattaaggaaatttttccaagacaaacacacaaactaatctttggcctctatacaaaatccgactaatctcgttatttatagtgttcacgttgcatatataattgcctcaacgagaaatagatcacagtgatttaaacatcttttgatagtaataaatactttatacaaaaccaattaaaaataaacaaatacttctttattatacatcgaaataaagatattttttatataaattcttttgtattagttgtcgttttacaagttgaattttgttttaaattagttgttattgtcagtttttaatgtagatgtttaacagattttccaattttatccctattctgtaaacttatttattgatgatatggagggggtatcagttatcaaaatagtacaagatgaagaatcgaaatggtatggctcaaagcaaataagacacatttctttgtgacccttcgagcaatttctacgtcaaaagaacatattcctctctttacttaaagcatgctaaagtatagtcacaaagaaataagaatctctcccaactttttctcttatcatcaaataattttcagcacccactatttttccataatcttcgtttaatttttcttctttaatctactttgcacctatcatgtcaatctataagtatatatattttacatatgctgcaaatatacctccacaaaaaaacaaaagaataaacattctttttatatccccattaaaatcaaaatatttgtatcattttttttattagctatctcaaaattatactataagaacaaaccttgattccaaaactcacacacacaatcaaccactttccttttttcattcgtctcaatttctctcatg

SEQ ID NO: 23460 - DNA, 3003 bp, Unknown
  misc_feature (1)..( 3003): 2750-1469P.txt file - cDNA_ID_2141915; gDNA_ID_1620429; Annot_ID_156809
ttagttggaatatgctctatggatgctgatcagtgaccactatctaattgactaaaaaaataatcatcattcatccaaaatatcctaaatagattttaaaacacccaattacatcagcaactatatatgttacgtgagcaacagcgctatacatgtagaaaataatttccagtttttataacattacaagatcaccataaaaagtacggatgttaaaatgggctaaacatttagagtcggcccaggtccgctaaaataaataaaagcccggtcccgattaaatcaaaggagaaacgtttgggcttaaatatggttttgcagaaaaggtttcgggcttttatagggctggccctattatactacggttctgttcgtttctccatttgacagatccatccaattgatccattcaacatgtccatctagatgattcattcgactcttgttcgttttatttttagtcggttcatttgactggaccatccgaatgagatgttgttcgtttacttatctctatctccatccaaatgatttgcaataatacaaatacctaaaatacccatgctttcatctaattcttaatctaaaatatatttaaaagtaaataaatttcaaataatagttttttatatttataaatttattttacggttttggcgggaaaacgtgattttatgatttgacgggaaaactcgattttacagttttggcggaaaacaaaattttacgtttttggcgggaaaacgtgattttacggttttggcgggaaaacgtgattttacggttttggcgggaaaacgtgatttttgcggttttggcggaaaaacacgattttacggttttggtggaaaaacgtaattttttggttttggcaggaaatcacggttttacgggtttgccgggaaaccgtgattttgcggttttggcgggaaaatagaattttacgatttttgcgaggaaaaaatgattttgcggttttggcgggaaaacgtaattgtacgggttttgctgaaaaacgaattttacggttttagcaaaaaaaatgattttgcggttttagcagaaaatttaattttttattttttaaaaaataattgtaaaataagatttaaatctatttatttattttatctaaaaatacatctaaataatcaattgaaataattagggtatttttgtcatttgttattttagattgaatcatctccatccaaatgatccaatttagttcagtcaaatgagtttcaaaatttagcctaaattttcaaactcatccagatgattcatttggatggatcatctgaatgaaccgtttttggcaccaaacgaacatcaaaactcatctccatcgaaatgatccatcttactgatgaaacgaacatgcctacaaacttttttttttcttctttaacactaaacgacgacgtctcttttttttttctttttttttttctttcttcttcttcttcaatcttctttcttcgatctcttattttttaaactctcttctttgattgtgagaagccataaaaaaaggttcgatatctctctcttaatctttcatctttctcatttttctattctcatagattgatatattctctatctttggaatctgattcataggattggggtttaatggttttcgaagaaatctgggttaaagtgtgttcgtgtgttctctaaatttgattcactaaacgtgggtttcgaaaaattgaattctgtgtagctatgatcttgtggcataaggcaaactgattcctgaagttggaacatcgttctctggttcagtagagaaccgacgaacacccttccccatctccgacgatgttgtttttctgcttaggacacaagtttgttttgttttttttctcttaaactttcatactttcacacactcataagtttacacacattacacatatatataggagatttcttctactcaccatacccactctcttagaccttaaacttagtcactatttaaccttacttctagacattagacttagggatacaagcaaccttacacaaccttaccttagccactaacaaccccaactactctacctcaagtacttagctagaataagctacttctacgaatgggccacaacaaaacatacttcaccactttgggcctacacaacttcatcagcccaataagataaaacataaaacccacttctcttgtcttcttcttcttcttcttcttcttcttcttctcacgtctctctcttacgtcgtcttcttcttctagtttccaatcttcttgttcttcatcattgttgtttccttctcactgatgttcttcttcttctttgcaggatcaatcggagagttcaatctcaacagacgaccataccctcgatacagtagctgctccgctcatcaacgtccatttcgccgcctttagccgtcaacgttctctggttctgttgccgtacaaaattcttaaaggtcgcgtttttatgtaagcgtagggtttagttgtcgtcccgctctttttaattagactttgttaatttaattaggttaattagataagacctaaaacggcgacgtgtaagctgtcgtcttcttgacctttttggtgaactcctccttcctctctatcggctatcgctcgctgcgtctctgtgtcttgttgcttggagcaagctctccagcgtgagttaatctaatctctgtaatgattaattaccttcttttacggtttctggaattgcatctgtgtgtgagcacttggtttgaaatatgatttaactagtgaattcgataatgctgttcaataagaatgcttagaaaagccttaactgggttttactcaccactcttcttattgaatctagaaattgaaagtgtgaatttttgcgagttctcttattcaaacttcactgcgaaaggtggagtttttcgtctctgttttctccctaattcttatagtttgagctaatggtgttaatcaggctcaagaatagataaaataaaattatg

SEQ ID NO: 23461 - DNA, 3003 bp, Unknown
  misc_feature (1)..( 3003): 2750-1469P.txt file - cDNA_ID_2141951; gDNA_ID_1620428; Annot_ID_156779
cgtgtctcactcgcttgagctgatgaagtgcgataatgacgtggcatgttgggatggagaccaaagaccagcattttattttattttatagtaactaattttaaaaaccaaacaacctgagattaaaattttaatttttactgtactgtagtaaatttgggtcctgattaagattaggcatatttatctcatagtttataacaagtagcagctgaaatttgtattactagcttatagtaattaaactaaaaactacgttccaggttttaaattattgtttaaagaagatataataatatattaagaaaatagttaattaaggtaaggaggaaagtagggtttggtctgtaggttagggttcaaagagggaagagattaggagaaaggaagcatgaaggcatgacccatttcttcaattagtgctccttaatctggtgacacgtgtaggtcccacgtgtaatcacttcacattgttatttttcaaaaaatcaattagtaaaaacaaaactttgtccatcatcaaatagtagtagttttttatgtgtggttacaatattgtaagaagctctcccccttttactatgtaattcaaccccactctaatttttaaaatatttatgtaaagctttacccgaaaacaatctatcatgggttggtaatgacacatttcattaacagtgttagagaatgattcctttaatttttctacagtaaaatgttaggtgatctcattgtactacatcggaaaatactcaaaattatgtcgtgtaatttagataatggacgaatatggttttgaaatatttatggatacccaacaagatttcttaactagaaagacaaaaaaatagagcacattttgctcgttttccatcaaccctatttctccaatttgttcacatcatgatcaaaaatacagtagcaattaaaaaataaaataacaaatataaatggctatatagatcaaccctatctagctattagtattactagaaattgacaataaaggaaacattcacgtgtgtgagcatgtactactctacacacatgtccacagttattatatactgagtactagtatacgttgatgttatcaataataaaaactcgaaattaagtattattttcttataataatctatttaaccatatttgctactgtactatttagtctattttcttttgccaacctttgtattaaatatttgtactattagtttcaattataggtctatcactatgtatatgtccgaataatggtctaaaattgttaatataaaatacagattttatttcagctaaagatagttgaaattacacaagaaaatagaagagataaaaatgatcaatcagctatgtaagacgtcgtatggatagttcaataattgtggtaatacttaaagacatatatcaaaattatcaacaagcctcgaacacaaactttacaaaaagcctgtgtctactttatgagtgtttgattattaaattgcaaggtcgtagtataaaaatttcgtaggctttcaggacacaagattaaattcatttatctaaatggtgatggagtacttttatttttatatatcaaaatggtgatgatatacgaagaccatatatttagattattaaagaaaaaacgagaaaagaagaaagaaaatataaaaaaatggtttttctttttaacggacaaagattcctacaatggttgcttttagaccacacacaaatgctacacagtactcttgggtcccacacctcttagcaagtgcgttaccaacacgtgaatttcctctccccattttctcgtccttttcctctcaatattgtatcgtctcgttttccttgtcatatcgcgtgtgacgtgttattggcttattgctgaacagtcttcttttttattttccatcgttatcctgatttttttttttttccaaatttgattttcatggtttgtaattttgcaatagattttgtgtttcacagagagatagtttacgtgttgttaaaaataatttgtgcaaaatagtgtgcgtgtgttaaatattaaacgatatataataattagaagaaaataaaaagttttgtcgcgattagttatttgatatttaccttgttcttttgtttatcgctgcgacaagcaccgacggtataaaatataaagaaaaaaagaaagagagatgaaggtgagatgaatgaaagagtcgcagcgacagatctgaagagataggagaaagggaatttgagacgctgaaaattccagcgtctacggaatggccgaattacagtcgatgcggcagagatgaaaaaaatgagaaatgaaagtgaaaaagagatgagaactttttttgggtcgcaggtagctgacgcagcaatcaacaaaagaacatggccaacgttttagtagatactactataaaagaaaaaggttgatttaattcattcgtaatttggacttaatttttttttaggaacactaattaatcttatttgccagctgtatgagtggactacaataaactcttgtctataaaccagattttcttcctttttaacgcttccacttacaacaatatatgtaaatatgtaattatgacggggcatacggaaatttaatttttgaagcagattcatcccattagccagctgtattaagtggtaatccaagagttaatttagttgttcagcaaatgattttagataaaatcaactactagtttaaaataactatcgaatgactgttaaggcttcgtattttttgttctgccatcaggatatcataaatatggttgaggttcgtataatattcgacgatcttttatatatctgagttgtaattgaattagagaaaataaaaaacagataatgaaacgtctttgtttttccataaaaagaaaaacagggtaaattaaagtacgagagattcacgagacgaaaattcctagaggcgcacgatagccaaaagaccatagaaaatgacatccgaaatatctttaaaatgctaaaatg

SEQ ID NO: 23462 - DNA, 3003 bp, Unknown
  misc_feature (1)..( 3003): 2750-1469P.txt file - cDNA_ID_2141959; gDNA_ID_1620428; Annot_ID_156781
ccctttaccagcaagcggactttcaagggtcttgcaaggtcaagaatactcgaccttgaggacgaaacatactgagagtgtagagtgtgatgctcctgagaattctgttgtctggcaatcttcagcggatgatgataaggttgacgtggtttcgggttctagaagatatggatctgagaactggatgtcctcagccaggcatgaacctacttacacagatttgctctccggctttgggactaacatagatccatcccatggtcagcggatacctttttatgaccattcatcatcaccttctatgcctgcaaagagaatcttgagtgattcagaaggcaagttcgattatcttgctaaccagtggcagatgatacactctggtctctccctgaagttacatgaatctcctaaggtacctgcagcaactgatgcgtctctccaagggcgatgcaatgttaaatacagcgaatatcctgttcttaatggtctatcgactgagaatgctggtggtaactggccaatacgtccacgtgctttgaattattatgaggaagtggtcaatgctcaagcgcaagctcaggctagggagcaagtaacaaaacaacccttcacgatacaagaggagacagcaaagtcaagagaagggaactgcaggctctttggcattcctctgaccaacaacatgaatgggacagactcaaccatgtctcagagaaacaacttgaatgatgctgcggggcttacacagatagcatcaccaaaggttcaggacctttcagatcagtcaaaagggtcaaaatcaacaaacgatcatcgtgaacagggaagaccattccagactaataatcctcatccgaaggatgctcaaacgaaaaccaactcaagtaggagttgcacaaaggtaaatttttgcaatatgtagcacaaagtgtatgaggttgtgataacccttgaatcacttttcaactaacacatgacacattgatgtaaaggttcacaagcagggaattgcacttggccgttcagtggatctttcaaagttccaaaactatgaggagttagtcgctgagctggacaggctgtttgagttcaatggagagttgatggctcctaagaaagattggttgatagtttacacagatgaagagaatgatatgatgcttgttggtgacgatccttggcagtaagattttgcaaattttccatcttagtttatatcgatgttagtgtttttcttataacactgacacaatgatctctcttgcagggagttttgttgcatggttcgcaaaatcttcatatacacgaaagaggaagtgaggaagatgaacccggggactttaagctgtaggagcgaggaagaagcagttgttggggaaggatcagatgcaaaggacgccaagtctgcatcaaatccttcattgtccagcgctgggaactcttaaacaaacaaaataaccaacaacccttttgctgcaagccgaggtatgtaaaagcttttgagatattagtagactagagacacagccaaaagtttatgtcattacattcgactgatgtttgttctgttaatgacagcaggatgggggtcgattggtggagactggagagcaaaatgggatgatgggtttaagataagatattaaaaatgcaatttttgaagtattttgttggccacttagataattagcatcttccatcacccttattatctatctaataataattaatagatattataaagtaaaacataaaaaggttacaggtattatatagtagaatatgaaaagctcttttataagtagaatatgatggtgtggagttgtagtcggaggctggtatcggttctttttatggatgtatttttttccttcttccaaagatctcttgaagtctttttattgtttatattaatcccaatgtacataagttttcaagctcttgcccttttttaattatcttgtcgattcacattttctcaacttattctcttgctgacttttggttttggtctggtcttgtcggtattttgcagcttttcgtattagacggtgatatagatatattcacgaaactgtaagacctcttaacaaacggattccatttcgaatccttacattaaataaattcggatgtttctagctacaatctgaaaattaagcttgcaatgagcaaaacagtgagccctctttttaaagtactttgaaaaaaaaactggatgctaaaatttgttgtttcccttgtaacaatgaggaaaacaaggtttgggttttcaagtttatttctctagctatgctcatgtccatataaacgaatccgctgaaaaacagaaagatgacaccatggcaaacacatgatcaaagtttcgtgatctatggtttcattctatcatatggctcttcataaccaaacttgtatttaggtagaactctatctaaatcaagactttaaaccatatgaaacacacaacaccggcaactctggcatactaccgccttaagccgacaatctcaatcgtcacagaaacacaacaaacattttatcaaacttgctgagtttatggaaaaactttcaattgtatcagtttatgccattatcttacaacaatacaaaactgcatagttaaataagtggttctctagctccttgtaattctaccatcgacacatatagtgataggtctgatatggatgacacatcaaagcagacaatctaacaaaattattaatttttccaaaattccaaataaacaataggataaagtaaacaaaatgtgggacctcaccacttggggcacactatatgagggaataaacacgcaactccataggaagtttcttgaagcctaaaacattacgctgcttctcgatcttttaacccccattattacatattactccttcctacattattcttcttctgctttcgtgactttcaggggacacttttgtttttataacttacgcttaaaatcctatgaattcgccgccggttgacgcaatg

SEQ ID NO: 23463 - DNA, 3000 bp, Unknown; identical to SEQ ID NO: 1638
  misc_feature (1)..( 3000): 2750-1469P.txt file - cDNA_ID_2141987; gDNA_ID_1620428; Annot_ID_156788

SEQ ID NO: 23464 - DNA, 3000 bp, Unknown; identical to SEQ ID NO: 1637
  misc_feature (1)..( 3000): 2750-1469P.txt file - cDNA_ID_2141999; gDNA_ID_1620428; Annot_ID_156791

SEQ ID NO: 23465 - DNA, 3003 bp, Unknown
  misc_feature (1)..( 3003): 2750-1469P.txt file - cDNA_ID_2142011; gDNA_ID_1620428; Annot_ID_156795
tatgactggtttggtatatgcacgacaggacaaccgatacaatgacagttggttccaaaaaaaaagtttaatcctaaatatatgaataatcgaatcgatcaataacacgttgacaaaaaacgaacaaataatcacactgatgaaccactttataatgaacagagaattttgtaatctgaaaattttgaaagtcaagaggttaatcaagtaattatagaaaggtagttgtaacgttggcttttgtggaactaataacttacgtgtctttaaacggcggctactttggaaggctacgtttcttaatttgaacctcattttctccattttccttcgtttatacgatatctttttcaaaaaagtgacccaataaccacacatataacatatttagtataactttgaatataaacgaatcaatgatatctgaattttattttgattttgatcttgatttttgttgttttttgtcgaggctattgccttgccactttggatgaaggaacccggctaaggtaagaccccctgcctaatattagcctccggcgaattttgcactcagaaattacattatgttatagttttggaattttagtttaaatttgtaaaagtattaaaacaattggtcaactattatattaattagctcaagagtgctttcaaaaacatatcttaaatttaataaagaaatattccaatatcttaaccagtactaaaagagaagatcagaaaatttcttataaaactttaatctaataaaatcatctacgactctaccattcaatatttttttgttattgttttatttacatatttcttttaatatttacatatctcttttcctttttgctaaaaaaaagttggcataaaaattactaaattttaagcgtaaaaaaataaaattaattattgtctattgccatttttggaggatggatatgatttggaggaatagttaaagaaagtgctaaaatctcctttagtgagtcacaaccgttgaccttcaccgcaaggcacaagagaccaagtctctaacccaacacaacacaaaacccataaactgaaaagactaacctaccctatcttgccatataaatccctctcgagcaacgcatgttaaataaacctaatttatacattcattctcaaagtcaaaaggagacagggagagagagagagagagagagaattcaaagcgttttttttttataaattaaaggcatgagaggttcaagaacaggttcttcagacatgagtgcttggtgttctgctgttgtgttattgtctttaatacttttgttatctgttcgtgaaaacaacgcttctaattcgattagaggttctcaattctcaacgaaaccttgtgaggagatttacatcgtcggagaaggagagacacttcacaccatcggcgataaatgcggcgacccgtttatcgtggagcgaaacccgcatatccatgatcccgatgatgtctttccaggtcttgttctcaagatcgcacctttttacttcaacaggaaattgtaagacatataacaaatacgtttcttttttctttctcttttctcttcttttaaaattttgtttgaagcatactttaccttaagtatgtatgtatatattactaaaggattcaaaaataaatacagagatttgaaagaaacagagcaaaaacagagttgtgtaccgtgagttgattattcatgttttgtgggtttacaagttcatttagatttaggtgtatatggtaattatcgatgatttttggtctttggggtggaaaatttgattaaacaaaattagtagctgatgaatgcaataacgaaacgccaagttagaaaaaggtcaacgactttacagtctttactagtggcaaaatatcaataaaggagttatgttattctacaaataaaaagcttcatcgtttaataattcttccacttatagaattctcgtatccaaagaggacagattatttgatgaataggtgtgctatattcaatgatgtgtgaatttatgcttagaaactcgtggatgaaaatatgaattttattgatatatacgaatttcaaagaacaatagccgcatggtttgtgtctcttgctataatccaaataaggattttgttttggcaaaaaccttaagaaatttttacaaatacatggtcaagttgcccattcccaatccatatcagttcttcaactttcgagccctaagccatcgtttcattgacttgtaatgtgggtcggacctgattatgttggaaacccaaacttgaaatttttgcaagtgggcttaaagttttgaagttttttagcgatatgggtaagtagggattttatggatcgcatagtggatatctttaaagttagaattggtcgcatgatgcccaatgagtgaattatgtcattatgttaccttgatttctccctggtcgaagagaacttattcgtaggtttatcgaatttgacataatatcatatgttccgagaatgctttaaaacttcatattctgttgcttgttaatgtaatatgatgtattattatcacaacaataaagtattatctgaacgttgcctcattcgtcccgttacaaataattatgtttgaaatatatatatgcaagtcaaaaatatctcattctcaattaattacataactattcaaaattatcaccaactctagttctagacttccttttttgtatgcaatattccaaaaactaataaactacacacctagactaattatgtcgtcatctcctaacactatagcttctaatttcaaaaacaaaattcccaaagtaaaagtaaaatgaacattattaccgtgcatgtcgacattactcccaaagaattgcacaaaatctccaaaacctctgtaaacaagaatctcttatatataagaaacgtgagttgttcgctgttacaaacccacaatcaaagccacaaaggaagaagaagaaaaaaaacaaaccctaacttttgtcaaaagtaaacgatg

SEQ ID NO: 23466 - DNA, 3000 bp, Unknown; identical to SEQ ID NO: 1635
  misc_feature (1)..( 3000): 2750-1469P.txt file - cDNA_ID_2142022; gDNA_ID_1620428; Annot_ID_156798

SEQ ID NO: 23467 - DNA, 3000 bp, Unknown; identical to SEQ ID NO: 1656
  misc_feature (1)..( 3000): 2750-1469P.txt file - cDNA_ID_2142053; gDNA_ID_1620431; Annot_ID_156862

SEQ ID NO: 23468 - DNA, 700 bp, Unknown; identical to SEQ ID NO: 1657
  misc_feature (1)..( 700): 2750-1469P.txt file - cDNA_ID_2142105; gDNA_ID_1620432; Annot_ID_156880

SEQ ID NO: 23469 - DNA, 3003 bp, Unknown
  misc_feature (1)..( 3003): 2750-1469P.txt file - cDNA_ID_2142132; gDNA_ID_1620432; Annot_ID_156887
caaacagtgaacttcaatgagtgtgaattgattgtcacgtcacagctacactcgccgcacgcaaatatagcgaccataacggaagtgatgacaaaaagagctctgacgtttgctacggagacggtttctcaaatccaagactatcttctcccaaacgctacagatactcaggacaaagccgttttctccgcttgcgagatcgcgtacaaagccgtggtttctcgtcttcagagtgcttatacgtcgatgaagaacagtgattacgtggcgatgaaggcacagcagaatcaagcacttgggtatattgatgtgtgtgttgagaggactaacttctttcgccggactccgatggtagcagccaactattatgtgaggttgacggcgaagattgcttccattgcaggccagatccttgctcctagtacgaccacgtccctgtccccttgaacaaaatattattttgtatttttgttagagaaaaactcgagctttgattcatcaataattatttatttatttattaattttcgttgtcttttctcatagaaacaagacaaaccacaaaatttagcatttcagaaatttgtagaattcagtgaattttggaaattttctcacaagagattcgtagaattcagtccactaagttttctatgaatgatgtggttattaagataagatttgttgtgtgcaagaaagtgagttaccgaacaaacagccgtcacttacaccaaaaaattcaatatatatcatatatggtgtaagaaattacacactcccaaagtccagcttgtgacgagaggtgcctttgaacttataaaccatctgttattcttttttctttccaatggtcttaggcccggtcaaataaacgaaccaaatgtaccgaatcaaaaccaaaacaaaaataatcgaatcgaatcaaatcgaaaattgaaaaataactgaatggttactaaattttataaccaaaagaaccgaaaccgaatgattatgtattgaaatatttcaggtaaccaaaaatatctcaaatataaatatattttcaaaaatattagttatttctagactaaataattaaaaatggttgaaaaaaatatatattatagtaaaaatattcaaaaataaccaaaaatatccaaaatatctgaaaatattcaaaacaaaataaccgaatagatactaaattttaaaatcgaaagaactggaaccgaaccgaatcgaaccgaactttcaaaataaccgaatggatactaaagtaccgaaaaaaccgataaccgaataaatacaaccgaaaccaaatggataaccgaacgtacaagaatatgtgatcttcttttaacatttacacccaaaaaaaatgtgtgatcttatttcctccaaatgaaatattattatttaggcccttatgaatacccgccattttgagctcggacgtccacgtcggtctaatccaattgcctacgttacgcggttctttctgcgtgaattatgtcactctttctcttttttggggtgttcattagagcagcaccaatggtggtctctcttatgagtcctttatcataaaaataaagaaaaataattaaaaagagagggacagaagagagaggagctccaaaaacccttatttaagggacagtctcaaccccaaatatacacgtgtagttcttttagtagtcaaactctattaaaaaactaaaatataataacaacattaaaatattattattattttggtttttagggactcataagagagaccaccattgctgctcttagtacactagacaaacaaatatactctatttcaaagtaatacttatctagaactatgtatacaattattacatattgcaatacgataaaaaagagtatcatatctagaaaagtggaatggtctatacgtttgttgatgcttaaagtaaaattttaatttatgacataatttggtagaattctcatctgaatatataatagtagttgttagaaattaattaacttgaaggtaaagtgtgcaagtcataattttatgttacctcctaacttacacttcccaaaataaattacattcgtaaagtttcgtataatacgtaatccatacgaatcagaccaaaaaaaaaaccaaaactcaactgtgaaaaaaatatttttgataataaatattgttgttgtgtaacagtgtttttttatatatatataacaaatggatggattatggaataattttaacagaatatatgggtcaaacttttaatattatgggaatagaagctgacaacacacacatcaaaaagctgggacacatcaggtagtaactgaagtcaaacatagacaccaaactcaactaaacccactctttttcaaaagtcagtgctctttctctttgtggggtttgttgtttactatcgacactttcaagggactccatttttttcctatttttataattattaccaacaccaacttcacaatatttgttctgtttttgttaatatacaactttaccggatttgtactaccatcttcttattattctttttttcggatcatatattaaaatataaaaaattgcacggttagtgagtttcagaccaacaaccatatatcaacccgctctgtcttttatctgaaaaacgtgtgttttttccacatttggttgaatctgaatcacataatatatgtactctcaattacaatgcaaaccctaatttgtacttctgtgcagtacactttctctctctcttcattcatttctcttcttctataaaaaaaaattcttcaattcaatatcactaatatgcgattctctcttcttcttcttcttcttccatcttacgccaaacctcgagtctgcgaatcattcgattctcagattcgcatattttcttcgaattcgctaggctcaaaacgttgtttccgtgtacaagaagcaacctaacgatttggggccaggtgaaggaagagctgatttaggttattgagattcgttttcttcaaatg

SEQ ID NO: 23470 - DNA, 3000 bp, Unknown; identical to SEQ ID NO: 1661
  misc_feature (1)..( 3000): 2750-1469P.txt file - cDNA_ID_2142142; gDNA_ID_1620432; Annot_ID_156890

SEQ ID NO: 23471 - DNA, 3000 bp, Unknown; identical to SEQ ID NO: 1658
  misc_feature (1)..( 3000): 2750-1469P.txt file - cDNA_ID_2142147; gDNA_ID_1620432; Annot_ID_156892

SEQ ID NO: 23472 - DNA, 3003 bp, Unknown
  misc_feature (1)..( 3003): 2750-1469P.txt file - cDNA_ID_2142209; gDNA_ID_1620433; Annot_ID_156915
aaactcgaagtatctcccgtagtctgtgagttactcgaaaccaacttaggatccgatgatgatgccgacgacgaagaagatgatctctgaggtatagcttttaatccagaaaacttatcttggtttatcataaaaggaagagaagctaactttgaagaattcaaacgataagaaaccgtttgagaaaacttagccctcctaatccacgaagtagcctcttcatccatctctaagctcgaaaacaaactaaacaacctttttatcaaagactaaacaaccaaaactctcaatatctccaaagtacctaagcaaacccgtgaatacgaatgagatgacttgctgcaatctccaacgatctcatttccacgaagatacaaaatcttttcaaatccatcgaagccccatttctcaccttcaaccattaatccacaaaaactacaaatcataaaagaagaaaactttcctacgaatactactaagctcgaaatttctccaaacgttcccaccaaaatcaccggaaaatcctgaattacatacctcttcctacaaaatcaagcaacaatactcagaaaatcgaatccatagaagctattgaaaacgataatgagggttaaaagatcgatctgaatcaacaaatttaggaaactagttttcgatatttgtttacctgaatcacaacaaaaaactatgaagcgtcgtcgtgtgttaaaaggaagagaagaggaaagccaagtgaatcggaaatcaagaagatccggcgacttgaagccggaggaagatggaatcgaaggagaaatttgagagctaaaccataagacgtttttggattctcaaagacctttttgacgaatccagacctcttacgcctttttagatggattttttttttctttttttttcacagataaaatgtggaaaataaataaattcttttggaatatttagaaaaatacgttaaaacgacagcgtattaatctgtctgtcagcatctctgatatgctctaattattctgtctgaaagagaaatttaatttaggttcccttttttagtcaaataaattctaaaggccatagacttcggcccattaataataaaactggcccaaattactttatgatataggccatgatgattgcttgatagtaaccagaaacgaaagaggcctcaacgttgacaagcttcactaatcctatgagaaaaactcttctgttttttttttaaagaacataattcacacaaattaaccattctaaacaagaactttaaactacataaaaccattcctatctcttattctcaacattggggaagtgcttaaacaattgttacaaaacaacttttgaataaatacatgctagttttttttttctttgtcaacaactttattagattgactcaaaacaagcccatgctaggtttttatatcaattaaattcttgtttttttttcaaaaagaaattaaacattgtttttttttttttttgttaattaaaacatgctagttgcatgaagttataagttctgtgatgacactgttttaaattatgtattagatcatatgcatctatatttttttctattttatttgtaaaagagaaaattataaatgctactggccaaaaatacgtgtgtgtgtggagaaaacaaaatggccaaaaaataaatgataggagaggaatagaagagaaagaaagaaagatttaagaggtgagtccaaaagattggtaaaacacaaatgcttaacaacagagttaatttttggggacaccacacacatgacacatcactttgtctccagacctatgtctgtcctacgcctttggacatacccttttctcttttatccgatcatcgtatcctacacacattatctcatgattactaatcttgtcttcctttttttttcggtttaaagcaataagcgatatgtacacatcgcatacattaatattttacaccactagctattttaagtttctttattgaacatgtgtacctagctagctagttcatatgatcatatcagtggaagactggaagatatactaaattatacacaaatatactttctgttcagcaaatgttttttgagtcaactattacatttaattaatggtttaaaatagcgagctaagagtggagttaaaatggatgcgacaaaaggaaaatatttgaaaatttgacaacatttttaagatatatttacaagaagtaccaacctctggtcatcattgtattcttctaaatcgcagaatacaaaggttagtacaaaagaatctatcaaataatgggggtactggatttgtcaactatatcacttggaaagcttatgcatggggtataaccaagtacgaaagtataactttattcttaggtcaaacttgcacaaaatattagggttaagaaagtcacctgaatgatttcacgggaactatatatggttaatgaatacccaccctataaaaaaaaacaagagtgacacagaaaggatacaccatttatagacaaactagaactggcttaattttttcgtagcttgcacaatttcatatatatttttaagaaagtcttatggaagatatgtacattaagaggtcatgcgtttctgatttatttgtgacaacctcagttgaaatcattttgccttgttgagcgtttgtgattctggcttcagttttgattctggatatacttccagtgaagttaatatgatttgtaataacaaactagacaacaaatggctagatgtcgaaacttgaaacaagaaatatcccactcctcaattataatttcataattaaataatcaagtttgatacttgtcacatcaaaactctttttcctcattggcctgtttctctcaaatcttcaataaattctctatatatatatgagaaactttgaacctcatttttcatatatatcactgttcttcttctatattggagttcatctcttttgtttctaaagaaagagagagagagagagagagaagagaagatg

SEQ ID NO: 23473 - DNA, 3000 bp, Unknown; identical to SEQ ID NO: 1685
  misc_feature (1)..( 3000): 2750-1469P.txt file - cDNA_ID_2142244; gDNA_ID_1620435; Annot_ID_156981

SEQ ID NO: 23474 - DNA, 3000 bp, Unknown; identical to SEQ ID NO: 1692
  misc_feature (1)..( 3000): 2750-1469P.txt file - cDNA_ID_2142259; gDNA_ID_1620435; Annot_ID_156985

SEQ ID NO: 23475 - DNA, 3003 bp, Unknown
  misc_feature (1)..( 3003): 2750-1469P.txt file - cDNA_ID_2142267; gDNA_ID_1620435; Annot_ID_156987
aataatgtgaatcaatatcattgttctagcataataaaactgtagatttacaaacgtcaaacgatatgaaatgttttaccgacctctaccaaaaaatgagtgatgtgagaatatacgcgcgttatcggttgtttctcactcacctagtgacattggtcgagcggcaaatggtggtgatgactggcctcttttacgactcgcagttttagattttagtccccttaattgggtattctcagttatggggagacatataaacacattttgtatgttttgacaaattcagaatatcaaaacaagacacgtttattatgaagtgtgttaaataatacaaatagattagatgagacacaaatatacaaaggaataagaatctctcacaaaaataataattgaatgaataaaattttgaggagggaaggaagatgtcccaatcccatatatatcatctcaacgcatcatcaaaacaaactcgtcaaagctgagaactccatcgtcattctgatcaaacccacgaatcataaccttacaagcatcaaccgtacacgactcgccgagtcgactcaacgtcctccgtaaactcgccgccgtaataaactcttccccctccataacatacatcccaaacgcttctttcaactccttcctcctttcttcatcactaccatcttccccttccataagcttcaaaaactcctcaaaatctataaacccgtctccgtcaacgtctgatgtcttcaccacttcctccacctcacgtgacgataacgcgccgcctaagagactaacgcagctttgtagctcttcaccggagattttcccgtctgagtttgcatccatatagtcaaaaacggttcttagctcgttaacgtttaacgagctgcttccgctactattactgctcgttcttgattcgtcttcaaggtttcttgacgattctgatctcttcgaggaaactttcttgtatagtcgtgacaatgatgatttttggttcttagcgagagtcatttcttgatttgaatatgaatctagaagatttgggaaatggatttctgatgcaaattcttttcaagaagtggtagattatatatagatgagtatgtgaatgcgtgtaatggtggagagattcttgattgttcgacggttaaaacacgggtttgaatattttggtgttattatttaaagctagaggcggttgcgcggcggtggccgggaagtttcctccgcaatgagtgtttgtggggaaaggtcaagttgaccacgactaggggtgttttcgtaataatgtgatggtaagtttttctcacgtattgtgtgaaatgtgatgtcatatcgacgactagattaagaaaagtagcaaaccttctctttgactttgattgagtatacgatgtgcggacacgtggttttggtcttttaaattgttaaactgtcatgaagtttcatataaccgtccagatatgctccacgaaagtggtatgacttcctctgttcctagaaacttgaattaaaaataaaatatttcatgtgatgaagtttcatctaactgttacattcccggtcctgaattccctttccataagaaaatatatttctatatggaccaaaagagagttttatttttatctttttgcatctcaaatgccaacttcatgtaaaagcttttactgatgtatagttcggctttctaagctcgacggtttaactcggcccagcatatattgttcaaacaattcagttattctttgaaacttctccccgtaattatcgagctcaaagattatttaacaaaaacatctctgtttccccccataaaatctccttataaatacttaatttgatcctaatatcaacaaaatgttagactttaatctatatcttcaattcttgatgaaatgaatttccatgatgcggtgctggcatatcgtgaccttacttaattcacattaattaaactttctgagcaaatagtttaaattgttggtatcaaatctcacaaataaacttactatgaaaaactcatgatcgccaaagtgaaaatagtatagaaagcctagtttagagtgacaaacacttgaaatcctaaacaatcgatcttgtaaccactattgcacatcaccacaaaacacacattatctgacgaaagctaatcacattcaaatgattaaaccaaaataacagaatctaaacattaattaacttaatattcgagatacaacgagacctatacgagtttgaatgaaagacaattttcttgtctactatatgtacaagaaaaaatagagatcatacaaatagcttttcttctaactatcgaaatcaatattcttataattaggcatgaatcctttaaaaatttaggggtcatgtaacacttaacataagcaaatatatgaatgcataaaattattaacttttcgatcatttttttaaaaaattataattttcgcaacgtatttaaaccaaatttcacaaaattacatcaattttttttttagattgctatctaagcccttaaccgaaatacctaaacctaattgaaccgatcagttcaaagttgccagcagataaacaatgttttcatgtccgactcatactccatagtcgaacgattaacccaagaaacatatttccagtgaaggtttagtcttaaatctaccaatataaccagaaaaatccagaaaaaacttgccattaactaccgcatgatcaaccggttaaaacttctgggtgaaaatctttccaaaatattgagattttgacttcaaaccctttgctacaaatagaaggtttgattttggaattaaaatatatagtttgtattaaaaaagaaagaaacattaatatactcatataaaaagagtttaacaaaataaaaatcaggaaggagaagacaataaacgtagctaacctcatctccctcttcttttttttttgttctttaatagtttccgtctctctttttctcctccacctctcctttgtcctcaatagccgacgatg

SEQ ID NO: 23476 - DNA, 3000 bp, Unknown; identical to SEQ ID NO: 1688
  misc_feature (1)..( 3000): 2750-1469P.txt file - cDNA_ID_2142328; gDNA_ID_1620435; Annot_ID_157000

SEQ ID NO: 23477 - DNA, 3000 bp, Unknown; identical to SEQ ID NO: 1682
  misc_feature (1)..( 3000): 2750-1469P.txt file - cDNA_ID_2142367; gDNA_ID_1620434; Annot_ID_156932

SEQ ID NO: 23478 - DNA, 3000 bp, Unknown; identical to SEQ ID NO: 1684
  misc_feature (1)..( 3000): 2750-1469P.txt file - cDNA_ID_2142375; gDNA_ID_1620434; Annot_ID_156935

SEQ ID NO: 23479 - DNA, 221 bp, Unknown; identical to SEQ ID NO: 315
  misc_feature (1)..( 221): 2750-1469P.txt file - cDNA_ID_2142375; gDNA_ID_1563722; Annot_ID_148187
  misc_feature (6)..(7): n is a, c, g, or t

SEQ ID NO: 23480 - DNA, 3003 bp, Unknown
  misc_feature (1)..( 3003): 2750-1469P.txt file - cDNA_ID_2142421; gDNA_ID_1620434; Annot_ID_156945
aaacagactcccaacccgacaaagattggcttcttggggagtcatttcttctgccgattgttgtctctgttcctcattgcctgaaacccgtgaccaccttctgctggtgtgcgactactcatctcaaatttggtctctgatattcgcgaggttaactccctctcatcgcctcatatgtacttgggatgagcttctctcttggactagactttccaccaaccaagctccgtctttgctccgtaaagttgctgctcaagctgttgtgtaccacatttggcgtcaaagaaacaatgtgttacataatgatcacaggatccatccttctgctctctttaagatgattgatcgagaaatccgcaacaccatcacgggaagacgctctcggaagcgttggagaccactcatgcttctttggatcagataatttctatcatatttttcaaatattgtaaccttgtttttatttctttttgccaaggttactctagattaggtattgcttttgtaatacttccacttcatttttaatgatatttacaagtttagcaaaaaaaaaaaccccaacattttcttaacatttagatattctacgaaatgattccatataaaattgtatgggtttcttaaatttgtctttcacctcaagcatagaccttgtttcttctagcatgttctccagttgttcaacattggttaacagggttacaatctcgtggtgaggtgaacttgcgtcgctgacttgttcatgatgttgtggcattggttcattcccgacctcttggaattactgaacctctgcaaatggaattttataaagagtcacattaaacatcataatcattgttcatatgatgttattagttgattccaacatgataatgcaggcttataacaagaaataagtatgtaacatctgaaaaaataatgcaactttggatacaatccgcaacaaaaataataatcagaatatctacctttttcaagagcatcttgcaaggccaagaaaccgtcgatggcttctgttaatgaatccagttcctcggagtaacgattcgtcgtgtttatcgactctcctccttctcctctgattatcatttctctaaatccataccagctgaaaaaccaatccctgccacaaacctagaattataaccactactccctagtatatcaaatcatagaaatcaatctctcgtagatcagtgatcacatctccaaattggaacaaattttcacaaccaaattcttcggataatcaaaaacttaacatgttcactattcgcgaagattttttttttttttttaataagatttatcctttaaatcccactattaacaaaaaatctcattttttctttatttttgagattttctttaaggacctcatacctttagagaaccatgagagatataagatattgttagagttggacttagaatccgtccgtgtatattactggtttggattcggatttggttttgcttttttgattagtttctgttattttcttggatccgaacattagcctaagagtagggagttccttcccataaaagccgataaattgggacccatcgctaaagccacgtgaccacgattcctccgccagctcgcattgtctctccttgtggacctttctccaaaagtcgtccgtgttttttttctcttttttttttcttttctaattctgtgcaactgtgcattaagctttcagaaaaaaagaatgacactttttgtcaacgatcgtagccacaatttgcattcactgtttgttcactttcatatctaacatttctttaatttctcttttagtttttcactgcagtaattatttagttttttcatctgaatataaatataaatatacatatataaaaataagaaaataatatatatcatagccgtctttgcttcataattacgtcaacaacccatttttttggcggtgtctgttttcttacctaatcatatttaaataccaaactgacactataaacaattgtagtttagatgtaaacctttaaaccaatccgttggtcatagcttgtgagacataactccacaaaggtattgttagttgcaaatataaggaaaacgaattaaacttaaaacttacagttgtaatttaggtgaacacataattgctaaataaactctaaaaggaatgtattcaatcaaacattttaggtgatttgtatttaaataacaaattttatgttattcaattatggatttttgaaaatctcattagattagattctaaaatctatttaaaaatcattaaaaacattttaagaattaaatttttaatgactataagagacttaagtgaattttagtggatttccttagttaaaaatacagaatttgaaatttcatgagtttagatagaattttagaaaattttacaataaatcataacaacttcttaaaatttatccaaattcttgaaaattgtataaaaattcaaaataactcaaatcatttaaaatataagattgaatacgatctcctaaaactcttttatgtaataaattttacaatcatttggtatatgtgtacattacaacggcacatgcaataaagtaaagaatttgacctaattttctctctttgcttaaatattctcctccaccactttttgtcagaagtcacacttgaaagatagaaagagagaggagaggttagaaccgggaagagtgaaaggaaagtcacgtcggtccgttttataagaaaagaaagagatagtaaggactaaagagtgtagcctaagggaagttaaaacagagtgttattgtcgttgcggttaagctctctcctcgataaagttttttttttcttttacaaaattccatttctaccctttccttttttccaagtctctctctctgtccaaacacatcatcaaaccacatttgtctgtctgcctgcaacttcactgtctctctctctctctttctctcttcttcgattctagattacttcttcttcttcttccaatg

SEQ ID NO: 23481 - DNA, 3003 bp, Unknown
  misc_feature (1)..( 3003): 2750-1469P.txt file - cDNA_ID_2142556; gDNA_ID_1620436; Annot_ID_157029
tatgcttaatttggggtaataatgaaaaatttgacataggattatataaagggaatagagagagaaattaagtggtggtcttcacatggcagccatttttagaatatgatgagatgcaagagatgagtggacctatccacaaaaacaacaatgccaatccaccactcttcccatttatatccatacattcttagtttcttacattagcatatctttaaagagttggaaaaacatgtcttgacaaaattagacatgaattatttgcccaaatagatcttcatcattcatcaaacgatttatgttttgatgtaaacaaattttaccaattaatactatttttctgatctccaagtgctatttttttattttattttgcacaaatagtaacccaaggtctctaaatacttagatttctatatttatgaatgtaaggaatgaatgattgcaaggatccatctaacaaacgatataagtcatttggaggataatataatattatgcatagaagaacattcaataatatgtattttttataaatacttatgaatgtttctatgccattgatgttctctaaaaacaatacactgcaattgctaatccattctaatttaattattgctagctaattaattagtcttataccaaatattttctctaaaaacaaatgaacaaaagtttggtggtaagaggcaatgaagtgagtcttctctttcatccaataataatacttttgttttgtgtgttcccttttgcaattatatgcaagtgggtctataattgagtttgattatgaaggctacacacccatctttgtttttttcattattttttacatatatacattttcttttgtattttcactttaaagttctatcggccaaggatggttgatgtgtttagtgtgttattcatctttttttgtcaccattgagaaaatatggttaacagctccaaagttttttaagaattgtttttgtaattattggtgcgaacaatgaataatttgtatatgtaaatatgattgtcttgaataattgtttcatccatatttctcaatagtaaataatgtatcgtttgctttcttaatcggacaaaattaacaacaattgtcgtagattccttcacatttttatcatgaatcatttaatatttcagccgaccgtttcaagtttcaaccatgtgtacactgttttttcacatttacctagcatattcatttcaattgttgccaccattttgaatgaaacctaaattaattattttgtattttatagaaaaataattatttgagtagcgtttggatttatatgatatggaaaaaaaggaatttaataataaatttgctaatgtcatcacctactgactacgtatctccacggatggtgtatgtcctcataaccagacaaattcagccagccttgcttttctttttttcctcctttaacaacccacaaaattaataaaattaaaaactcaaactttgatttgtgtaattaaactacattctctctgaaattcaaaacttgaaaacaaattattgtcgtcaaaaaaactgtattaacaataagaagtgccaaaaaaatataatagtgtatggaagagcttaatcctatcttattgtgagccaaaaaaatatatattctatttcatttcggatatatttaaagataattaaccaaatagtgttttaaaatgtcaaatgtcaaaatatgaaatttatccttgcttcactcggaaataaaactttgttatgaatataacaaacatcttcgtttaaataatcaattaacaataattttagatggactgcgtagaatttgttcctgctttggccaatttttagatgaatttagtttgctctatgatatgttttacaacattaatttagcatatctaagatcaatgtatgctaatgttatttttataaacttttttttggattggacaatgaattttttttttgtaaataaaatttttaattttgtggtttaagaaaacattaccaatagccaatacgtaggtaagtgaatggttaacattctttaaataataactaatcaatctttaatcacataaattagttgaataattgataattattaacgaactactacttaatgactttatttctgcgagtacataaatctctcttactcgcccacaagacaacaatggcataattccgtaattaaaccataaaaccaaggtcaattacaaaatctctctcaagtctgacactactacatcaccttctcttttttctctctttggcgagaatggcctcgtaaccagtgattaggacacatgcatgccatttcccatcaacggtcaagatccatctcctcttcttctccttcaaaccattccccaccgttagatcatctccaaacctaaccacggttcattctttaaccacggtttgtttcggtcagccaggtaggggcctctctgatgtccttcaagactttttatttttctccattaccaaagtcaccaagaagccagaagaaagagaatagagagagagagagagttttgttcttcttctttctggttcctttgctttgctttggttgcgtgatctcctctctcatcaatcttcttcatcatcattctcatcatcattagcttcttgatttttttttccttctttttttcgtttcaagaaactaaacaaagtttctatttatggttttctgattcttcttctacagatctattatttgattctccttcgatcattgtcaacgttttcttcttttgtaatcatcacagttttttttgagaatttgttcatttttttttctcatatattgattcgagttctttcttcttgaatcttgttcttcatagatctagtttttgttttttactctctagatctatagatctgttgaattcacttctttaatccatctctgtgttcttgagttcctatggtctaagtcaaactcaagttcaagatctgttgaatttggaatcttgctggtgaagttagagatg

SEQ ID NO: 23482 - DNA, 3003 bp, Unknown
  misc_feature (1)..( 3003): 2750-1469P.txt file - cDNA_ID_2142560; gDNA_ID_1620436; Annot_ID_157030
tctctcaatgatttttcttgtcatgtccatcttattttgaatgaaggtaaacgtctgagatgagagagaagaacatataaggatagccaaggagactgcctgatgtcttttgatgagtaaaatggtcattgcttgatataacttatagtcacttgtcaaacatgacactaacccattttactcaaagaaacaggcaagtcatccttggctaccaaatatgattcttctattcatctttgacttctccttctaaataatgtatacactcactttcatatactataacaaaaacttttgaaaccaactgcgaaaatttgacatttttgaaatttaacactttaacaaagaatgaaagtttctgaagtgtaaattttatagtgattttgaagacagaaagaaaagtaggtataacatggatggaaaaagcatgtcaagatagccaaagagactgcctgaaacctaacccgcaagattcaacatgatatttgacctattatactttaaaaggtataataatccaaaatgcatgaatttgaaattgaatcgtggaggcgaaaaagatcaggcaagtcatccttggctactaaacatgacgctttccgccatgttagacctctcttcttcatcatacacttcattactctctatatgtttttgccttattccatacatgcatgtgctctctttttataaccctcgagactcgagagttgagaaggaatatatgcctatcatatcgatttctaaaattatctcttttctttttgcatgggataaatgtagtcaactttatattctccatcacgggaatatgctccttcatatatcggacaatttttcgggtcactaacataatcttcttgtcggttcattcactaaattgtatcgtttttcattggtgggtttaagagttaatatatatatataacgttctcgatcatcttagatgttgtatattatatatacacacatatataaacaattaaatgcaactttagacgtgtttagttcattctgtctgaaagaattgtttaaattttatgaatccgaacatattttgaaatataataacgttaagttttgatataattatgaaatatctatatagatgcataggtagtttaaaagctcaatgatatactatagacttaatattaaaaacgacatttcaactaatatatacacacgtgactcattgtggttgataaaatgttccaatttatttagtggttattaacttattattctcactactttgcatacgttttctttgtactttttgtactacaattcaaattacacgtagctaatcgaatacatattcggtcccttttaccctagtgccatgtgtaaaattatgttccttaaattgatgcttccgccttatggtatgctcaagtgactcaagtggttctcgactatttctctaatttaaaatgaaagtttatttttccttaaaaatccaaattaggaaatttgtgtgatatgttacatttttatcatataaccactattgggtataaaaaggtttgaccattacattaaagaagagtcataatactttttggcatattttttttaggacattgtggaatctcatttgaaagtcttcgattctcttttctgtcatccgatccatatctttttcatttccaattgttgagatttgatttggttcgaatgtcatcatcttgtcgttgcaataaaagtttacacaaatattattcactggtacgactgaggatatattgtgggctaatttttgaattgggctaaagcctcacatgtgattaattttgagttgggctaaaacctatcacataattgttagttatttatgttaaaatagaggttgctctctctcactattcatacatttctcagcattttggctaagatcaagtatagtatctgattttatcaatttaatatctgatatatggactattggttcacatgatacgctatttttaagttagaaactcacattaaaatagcttatctgagttttcacaagtggtctaagcgttgcttatattattgcacggatatggctcattcccaccaccaaatatagtccaaatttttatgtaaatgcaaagacatgggatttggtggtcttagacaacttgtctccaatctccctccatctgagttttgtttttgaattttctctaactatgttagaaagatttgtagtgatgaaactctatcatatatccaacacttcccctaaaattcctttgtttccgtttctgcataattccagttacacacaaagtgcatgcttccatcaagtaattctaagaaaaaaaacatttgttcacaaactatgtcctttcatttttggatggtatagtatatatgggacaacaagtaactagcttttttggagtgtcttgttcaaatttttgacatatagatttgtttgtatactactatatttcatttaactgcatgttttaataaagaaacggatctttgatacatataggtagttttctaaaatcatttggatcttgtgtcatatcgatttatttgtacgtgagatttggctcaccttgccgattaaagttcaactaacgttttgtaaattttattttgtttatagaaattcagaagaggaaacttgcacgtctaaatttgtatataaattataaaaagagccaaaatgtcactgttgttggtgtttataacctctcttacatacaagtcgcaagacaagaggtggtaaatgtggacttttattctaactaattaaatacagaaagatggaaagacaactttctcaattactctctcaaacacaaatttgattctaactaaattaaagttcaactaaagttagtttgtaaattgtattttaggttatacttaattgtactactttttcaaaaaataaaaaacaactatgtttttattttccgcgcatctttgcttggacgagtttgtcgtgttcttattataaacaaatagaaaaacggcaaaagtctcacacaaatg

SEQ ID NO: 23483 - DNA, 3003 bp, Unknown
  misc_feature (1)..( 3003): 2750-1469P.txt file - cDNA_ID_2142564; gDNA_ID_1620436; Annot_ID_157031
tacagacaattgttgccaaggatgatgtatcaagcctcacatggttggtcttgtgaaatcccaacgtttgatctctaacttatactgtggctatatatgttatagacatctaatcatatgatgtttagaggttctaagattctttagagatctaaagatcttttatttgttcatcgaaaataagacaagattatttaactgaatgtacatgacatgaatctatctattactttcgtaagattacaagtttttatttatgttttgaatgtaatgttaaactagactcaaataaatattaccacaaatctgacattcttttgaaaaatctggcatgctttggaaaatatggcattcttatatcaagtgtgagatattcttttgaaaaatctgacatcttttgaaaaatatgacatgattacatcaagtgtgactgtgacattctttagaaatatatgtgacataactcttttgaaaaatctgacattcttttgaaaaatatgtatcataagtttttttagtacaccaagtgtgacatatattcttttgaaaagtctgaaaatattctaagaatttgagactttagtttccagagtcaaaccaaacttggaggcctttacatgcatctcttatcaccagtcgctcggatttatgaaagttataatgaatgcagtcgtatgtaatctttctttaggatcaaacaacaatttcaattactctgtctaaaattcttgatttacatgcgatcaaggtatactgtatataggtaatttgttaaaaatgcaaaactcacaaccgaagaagatttatgttattttggttcttaaagtacgtagatagttttctaaaatcaaattaaaaatctaagaaaatatacaacgttaagaaagaaaaaacaaagacacacacacacatacatgtgaacaccctcccgattggagttaaaactaatttaagtttcgaaattaaaacaagatccaaaaggtcactgttgttgcggtctttacatccaaaaaatgtatttatttgtgctctactcttttaaatacaacaggaggtgtgcaatatggactttctcaattatgttgtatcctacctatataatgaaataaaatccaacggaagaaggccattaattctcctccacgtgcgttatgtcttttatttgttttctatggggctctattatgtttggtcagcgcaacctaattattatttttttgtatcatcaaacagttgtgtttttattcttccacgatagttcaatcttgttttgtgtttttattcatcaaagattcaattatcttttaaacacctaattttcatacaaaatataacttttttttttataagatgataagacttttggtattccttctattataattgtgattccactcttgtgtattgtaatttaaaaacttaaaattttatattttagactaatatatcgtcaatattaaccacttcaaatatttattataaaatctacttcggcattttcaaacgtacccacttccgattctatgcagtttaacttattacactaatttttattttgatgtgtttttatttattatgaaattattacaataatctagtaaagttaaattataattcaccaaaagtttgcggttgccaaatattcttcattattattatttttcatatctcaaacaaagtagttatgcaaccttgcttaaaatatatgatcccataaattttcaaaaccggttttatatgcaaagtacatgtcaaaacgttatcttatttacatccatttactaatcaaatatctattttaccacaaaaggtgtgttttataccctatcatgttttactcttgagatatgttctttgacaccacccacaaaatatctctacgaaatacgaagccactatatgtctctttaatttcactttttatagtttttttcaccgctaaaattgttgactaaaaaatatattgcataaaaataattgataatatatttataagaaaaactatgataagaaaaaatataatcggttgaaatgagtcatgactaacaataattaaaggttaggaaattaaaagaaaataaattctgaaataactaaaaaaaaaaaaatagaagatgatgatatatggatccctatactaatattttggaagtacattgaaaaactaactttcaaagacccaattaattaagctcattaaggataaacatgttaaatactaacttatggacattaattaaattaaaaattataaaacgaaaataaattgatgacaaaaaaaaaactatgaattttcttattaggatttgtaatctactttcttgaaaaaaattgaagtttactgacggcttcctttttttggaaactccaaaataacaaaacatatgaagaagttttggaatagcctttgactcaacaactttaacaatagaaagaaaacatgtttaattaatgttcatgcacttcgtctcggctgccccttgtggcctgtggggttgccgggttggcttagcttgagacgacccaatactgaatttgttagctcggtcagtgaagtctacatgcatgatacaaaaagattgactagtgtttaagttttttttttttttttttttttttttcataaatggtagtgtctcatattagaaatggtagtttgaaaagtattcagtttgtttgttcactttggattatttgattttggttttgttaattgaatcagttttgtttgaaaagtattcacttttgaaaagtgttcactttaaaaagttttgtttgaaaagtgttcactttgaaaagtattctttgagaagtgctcagttttggtttgtccacttacgattattattcacaagctacagcggatagtagtgactagtgacttatgactttgaataaagaatttccctctaaaggaatgaatacattataaatagattattaacctaagcttgatagagaagacagaacaaaaaaaaacacaagaacagggcaaggaaaatg

SEQ ID NO: 23484 - DNA, 3003 bp, Unknown
  misc_feature (1)..( 3003): 2750-1469P.txt file - cDNA_ID_2142568; gDNA_ID_1620436; Annot_ID_157032
tatagtagagagaattatttgtaaagttgtttagatatggatataagaaatggcattaattgtaattcttttgaaaatgaagatttatttcaaattttcacttcaaaaatactaatatagattaaaattgtgctacaaaaatggtcattatatcacataatacacactatgatatgtgaatatataataccatatttaaacaatgttatcatggtcaccctattatagctccaacaaatacatcctatactattatttggaaagtacataataaaaaataaccttattttttgtaagtaattacataggtatgccattagaaataaaattttaaagagttaattaatttaatttaattagaaaaacgaaaaacattattaatttccaaaaaagtaaccaatcaatatcaacatataagatttgatatctaaattttaattaatttaatttagttagaaaaataaaatacattattaatttccaaaaaagtaaccaactaaaatcaacaaattagatttgatatctaaattaacatgttaattttttattaattattatacttcacctctcatctttatatgattctatttttgcgaaagaaataatatcatcatatcatcagtataaaaaaataattagagttttttcgcatattccatgatttgaatttttaaaaacgaatagaaactgttcaatacatgaaaatatattataacgggtcaaaaatagatttaagaaaacttttgactgagtaacgggtcataatttgaatatttatatttaatttcatacatattattttgaaaatttataatcttatatactataataattaataacatattagatttttttttatgtgtatgatgtaatttaatttttagtacaagctggaaaatcctacaattgacgggtttagatcgatatgaatacaagatggtatactacaggtgaaacgctaaaattaacaatcaaaatacaagtgtataatcttaaaacactaaacaatataaataatatcaacaaaacatatacaactcgcagtgtactatacatttaaaatcaaataaaataatatcatatatttataaatcatctttacaaaaaatgtttttagtttagctaaaatataagtctacctgcggtataccgcgggttaatatctagttgtttatgaaaacggtatcacaacaattttttataaggcatcatatttagatgttctaagattctttagagatttaagatctttatttgtccatggaaaataagacgagattatttagttgaatgttcatgagcctatctattattccggaaggtgtcaagtttaactaacttgagtataaaggttttatgattctagtcatatgtgatgtggctctagcagcacaagtatttcaactatactgtttgaaataatggattcttcaggtacatgttgaaggtagagaggtaaaattttcattgtaaaactcacaaccgaagaagagcaaattacaccttcaaaatacacaacgttaaaaaaaaaatgacatgtacgtaagtttgtaaattttgttttgttttgtagaaatttcagaagacgaatcttgcacgtctaaatttgtatctaaaattataacaagatccaaaaggtcactattgttggtgtttataaatgctttcttttcatttttgctctaaactctctaaaatacatgaggtggtaaatatggacttttagtctaaactagatacacacagatgcgaacaaaactatctcaattatgctggagttttgcctttcctaaactttgttatagattttctagatgttagacacaaataagataatatcctctaatagtatatgtcttctgtttccattagcattattattaccaaaccttcatttattccctgttgagttttgatccaatttttcctgtttctttttaatctataatagtcctttttatttatctatctaaagagaattctcatagtggcagcaagtaaggattatttagtttattgttatacttaaaagtgtaaagtataataatttaagtcgatcgaaccagggcttagattgatgtcggctggtagattatagtgtcccacgtcagttgtcatttgtaaggttgcaattcatttaaaatttgaaaaattgatattaccatacacacattctatgcataatgtgcattatcattttttggacaacgatgttattactttgctagtatattgttctaattaatcaatcagtttacaactttgactagccatacaagaatattgacttatcattaacttgacgatttcttacttcataaaaattaattagtcaaacgaatatctatttcttaatttgtaaattgtttggtaaattctctaatatttatactgttttctaagattacaaacaactctcttattttcatgcatgatttacacgtgaataagtaacaacaacataggtccgcaatgatacccaaagcatttcctgaccattcacaccattcaggtctagtacttgtgctcttattcaatcatatatgttatcactagatttgtttctttatttatcccttttaatcaaattgttcaccagtttctacggctcaaaaaccaaaaaaaatcataacacatgacacatgtgacatgtcaaatatatatatttttatccaaaaaacgacatgctaaagttttattttccaacagaaaattcctttttttgtctttttattttttatataactaagaaattttccaacataagttttttttctttcaataataactactattactatatttatttcatatattgtctatttttaaccaataattaccacatgtgacatgtccaatatcgtaattgtatttttttcaaaaaggaaatactaaagttttaatttccgcgcactttcttggctctttctcggaatagtttgtcgtattccgactataaacaaaaaaacaaaaactcttttcttttagagcttctcacaaatg

SEQ ID NO: 23485 - DNA, 3000 bp, Unknown; identical to SEQ ID NO: 1700
  misc_feature (1)..( 3000): 2750-1469P.txt file - cDNA_ID_2142584; gDNA_ID_1620436; Annot_ID_157036

SEQ ID NO: 23486 - DNA, 3000 bp, Unknown; identical to SEQ ID NO: 1695
  misc_feature (1)..( 3000): 2750-1469P.txt file - cDNA_ID_2142598; gDNA_ID_1620436; Annot_ID_157038

SEQ ID NO: 23487 - DNA, 2652 bp, Unknown; identical to SEQ ID NO: 1694
  misc_feature (1)..( 2652): 2750-1469P.txt file - cDNA_ID_2142601; gDNA_ID_1620436; Annot_ID_157039

SEQ ID NO: 23488 - DNA, 3000 bp, Unknown; identical to SEQ ID NO: 1730
  misc_feature (1)..( 3000): 2750-1469P.txt file - cDNA_ID_2142667; gDNA_ID_1620440; Annot_ID_157129

SEQ ID NO: 23489 - DNA, 3003 bp, Unknown
  misc_feature (1)..( 3003): 2750-1469P.txt file - cDNA_ID_2142672; gDNA_ID_1620440; Annot_ID_157131
agcaatttcttcttatggaaatgagtttgaaaaaaatgcagtaaacattttggtataaaagatttaaggtttctctattctttccaaaacaaaaacattccctttcccatctctccctacttgtaaatcttcgtctaagtatctgcaataatttctcagaatcaaggaatccaatccataacaaacacaattctagttacgattttggattttaattaaaaaaggatacgaaatctcgaatagtccctcggggttgaagattcccaaaagaagatccatgttcttcctaaatatgttcatcaactgattccaacacgaaacaatttttttattaccaaaaaaggaatttgattatatatgtcggagaaagaaaaaaaaacaacaacacagacctggtctggtttgatcgttgagctttcataagtaatctctacactctacaaacaaacaaacgcaattccgtcaaaacgcgatttttccaagaatctaaaaaacctaaaaacgtcaagaaaacggtaatgtaccgatttggacgagatcttgaaggaagcgacgattctaaactcgccgtcgagtagattcaatccccggacatcgaatttcaacacatggaccgttttgcccttcgttaattgaaaaagaaacacattaaaaacgtcatcactaaaaagctgaactgatcaatttcttttttatctacctgagcaatgtcaatctgttgaagaagatcaccaagagagacgaaatctcgaagacccaatttagttcgtttagaacccaatacagtgattgtactgtaaatgagtttccagcaacctccgatcttgtctaactctccagtcggctccggtgtcggattccgacattccaaaagcttcaccagtccctcgatctctgtctttttatccgacttaactccgaatatccctctattgatccctttaatcccaatacaatcagataacagaatcaaagcatttaaaatcaaaatttgaactacgagctaatgagtttcgaattaaagattctgatagtcgaaaggaatctgaaaggagcgaatctaatcacctttgagagcttcgtagagctcttcttttatatgagaaactgtaatctcttcttgttcttgttcttgttcttcatcttgttgttgttcatttggggaggaacaagaactctgttctgtgactttcccgatgaacatgggtctgagcctaaatgagttgtcactaaaactcagcgttttgccattagaactggtgaaagagactaatactttcacgtttcctgttcttctcgagattgctcctcgtgaagctgccattgatggtggctggaaaaggttactcgtcattagcagtttatacaccagaatctctaaacccaatggagcttaataagaagtagaagaagaagatgggatttgaggaaaaagagagagagatagatttatggggaggagaatggacagttttttttggttattttatccatcttttagcatctatctctcccccccaccatacactgcactgactctattataaaatttagccaatcccattggtcttttttttcttttttaagatggtgtcatggtaaaattctcaaaaaaatctccatctaaattgagaaaaacccaatttttgttatattttgcaaccaattgcatatgttttaaaaaagtgtttacacttcatcaaaagcagtaatcggagtacagtaaccacaaagtatcaacatagtaaatgctctgttctttgtcacaaggcttttaaaaaacagaaattcaggcatctttggttaaggttgcagagtcttgtgatggtggcttccattgttgtggagtctgagctttcttaatagagagagcatgaatctctttcatttcttcttctagcgcagcattcaccatacgatgcctctccagcaatctcttcccttcgaattgttcagagacaacctccacttcaaaactcgaaccacaactgcaataaacagttttgctgatattaagaacaagaaattatgccataagccagagaatcaaatgtgtattgacaatccggtacttaccctccagatatgtcaatgacttcctggtacacacaaaaacaaacaatgtcactaaaaaattctaaaagctaaagattgaaacaattggaacacatgaatcaagtgaaaagggaaatagattgacattgaagtaacttcaatcttcacatgttataaagcaaagaaactatacacatccttggatctgctttttgagttctagttcacaaaaaaccatgacacaaataaaattttccgacaagaacactcactactaagttgctaatacatcaggaacactacgtcatcaaatcctgagctcagtatcacactgcatcaaattacacctaactacgcaaacaaccaccttttatattctgtttcagagctgaaagacaacacatagtgatgtataatctagatgctgagattattacaatacatagtacctcttatgatccaactatcaaagtgtatgattttgatcaaagtgagcaggtcaaaaatctcaaatttggcaattttcccagatcaatttgatgattagggtttcaaagtttcccacaaaagtttcaaaccctaatcaatagatgaaattgaaagaagaaagcagtataagaacactcacgagatgaattggcttaagtttcgaagtcaatgaagcttcgacttgctccttcgtcaccatctctctctctctctctcaaacaaaaattgaaatccctaattactgtactcattgaattagaatattaaaccatacgctatttggttttggtttagcgagagtacggtttagtttggttcaattgggataccattcggttatcgacaattccaaaataataactagggtttaagctctgctttcctttacttcgtcttcctcactcctaaaaccctctcagtctctccatttcccggagcaaaaatagctctccgaccatg

SEQ ID NO: 23490 - DNA, 3003 bp, Unknown
  misc_feature (1)..( 3003): 2750-1469P.txt file - cDNA_ID_2142684; gDNA_ID_1620440; Annot_ID_157134
cagtttactgaaatgggaatcgaaggagttgtcccagttgaactattgccgcctgaggtccggtccaaataccaagctaaaccaaacgaaaaagccaaacgagcgaagaaagaagaaaccaaaggtggatctcatgaaacagagggaaaccagattggtgtttctaatagtgaagctgaagctgaaggaggaaggggtgatgcagagacgatggagagtgatgctattgcagacactcctacgcctgaggaacagcaaagactcggtggttctgatacagaaaacggtcaagaggccggtcaaatcgaagacggagagacagaagaagctggtctgatggacactgatcttgatcatcctcctatgcccgtctcatgaatacgctttcagtttgtcgaccctttcttcaatggggaatcctttggatatgaagttcaaaagtattgatgtttaacaaattatgttaaaaggtattttctaaatatgtttgtatgagtgcaaatctgctagcttattacctgtctttccatttctatatactcaacaaaatcatcatacaattaagttcttttgcgtaatttatcgtctaagtgtaacactagacacatattcgcagctaataaacattggattcaattgcaatccactaaaaatacactcaaacaaacaaaaaaatcaaatacttgaggaaccaaaagctaaaagtgttactattatagctatcaacataaactttatgttttgccatcaatatttatttagaatataaatgagtggtttttaagtcgtgtcacgatttttaaagtccataaacaccaccgatctccatataataataaggtttcatcatatgccaaatccaataatacgtgaaactataccagttcattgtaggcttatttggttatattattactacctccaatcattgaaaatgtatatactttgtttagtcgttatcacttgtcaatgcatatcaaatcaccttataaatttacccaaattcactattgaattgttgatgcactgtcacataagatcacagttgtcttatagtcgtcgcactgttatgacaaaaaaagtgtcgactcatattgaaacaaaaaaaagactaaacaatgttggcacagcgatgcgataaagaatcgaccaagagacaaccgagtgatttgtgttgtcaacgacaaatgaaaagttgcctatttttgttacttatcgtttgaatacaaaaccgtagatcgatctaaacataatccgaatatactaattttttgtttaaacatgatttattaacaaagtcatttaattattgtaatacaaaaggtttttgccaaaacaacaacatgctactttttcatcattttcccggaagaaactaaagatacatgtggcaccgacacttttctaattttctatcagatcatgtggcccaaaggatttggaaacaaacagtacctagaatgcattctaatcatagatatttatttttataaacctactacgtctttaggcatatattagcttaacactaaaaattacatatgtttttttatatataaagaagacgaactcacaactttattagtactttattgaaatttaagagcaggttaaaaacattgaaaacatcatatattgtgattttagtgttacgcaaatattgtctaaaaaatacgttagtttttcttgacttaacttatagtgtacatatataggtatatagattgtcggcaaatgtatacatatggatgtatggcatataaataaatatgatgtgatatgatagtctcaataatttgcacattgttttccacttgtacataatattttgtggtcaacagtacattaaatttgtatatgcaaaacaggagaaaagacaaatgggaaaaataatggtgtgggtggagcctaatttaattgtatctacgcaagagctagtgaatagaattagagaatttaagtctgtatcaaggcaaatgaaagaaataaagaaagttattccttgaacatttctaattttatatttcaggttaatataaagtacattgataaaacacagttaaaagtcaaaaccaatgtgctcaacatcctctaagcattatatatatagcttttatttttgtgaatctatttttattgtgattagtatagtcatcactcaggagacagaagaacaaaatagagggaaataataaatgtaaagggtgatccaatgtttaccaaatctatataaaattttcgtccttttccgataaaaagactcagtgagtcaaaattattcatttaatttttcttacgtcaatttaaagtcaatttatacattttaatttttgtgtctactttataagtactcagtattttttttttttgtataaagaatttaacgaaattaccaactgttaagacaaaataggagtggaggacagagagcgccaagcgacacacttttactgggtcccacattttaaattcatttattatcttttatttattttctaaatctctttttatttttttgttggtagtttgtgtggttttctttctctactttggtttggtagttgattacttgaggaggtacttcaatatcttccgtctgtgtctctctctcttcgtcttcttcattacgcgtcttcttctttctcctcttcttctacattagcccctctctctttaattagctgcagctcacctttcactatctcttcttttatattgattgtgaacttgtgtgtgtgcgtacatttggagtttcagagaaaaacagttggattcactccaatacctaacctttcacccatcttcctcattacttcttcagaagaaactgagaaatcttctctgcaaagcttgtaattgcatgttttgatgggagttgtaacgactggatctctctcgaccaacctgttgggttgacttgacccggttgcagacctcggaagctagagattgcgtgtgtgtgtctgaatttgacatactgtctactgttttgtcggtactatg

SEQ ID NO: 23491 - DNA, 3000 bp, Unknown; identical to SEQ ID NO: 1723
  misc_feature (1)..( 3000): 2750-1469P.txt file - cDNA_ID_2142696; gDNA_ID_1620440; Annot_ID_157138

SEQ ID NO: 23492 - DNA, 3003 bp, Unknown
  misc_feature (1)..( 3003): 2750-1469P.txt file - cDNA_ID_2142734; gDNA_ID_1620440; Annot_ID_157148
acatgatctatttatcttctatcaacaaatttcatataaaaaatttctatacttttttttgctggtatcaaacttttctatacttgatacgtacgtacacatataatagttgaatttttgactaactgtaattacggtaaatattaattagtttcacacatgcacccgttttcaactgctatatatgttaatcgtataaatcgttagtaaacattttttttcttggtaaggatcgttaataaacattttagtaatgtttatattcacaatttaattaaatctattgcagcagctggttttaatttgttgacatcatcattagaatattatgttagcttagctcgtgggtcatatattaatcaatcataattactcggcgtttgtaacgcattattccccttagcgagacatttttgtcgtatcttattgttatatgctacgttctataaacatatccctaattattgtgtaaatagtcaacgtttgtattgttacatatgtacatgtaaatcagtaaataatgactcataaaagtgcaaaatcgtttgatgattagaccaaaaactgtttatcaaattacgatttatgacaatataatctaattaatgttattatactttgtttatcagtattatggattgttttcacgtttcaaattcggtttatattattatgatcaccacagacgagtatatagtattcaatttcactactttttttacacgagtacaggacataaacaaatcgtaaacaggaagatgcaatataggaatagatgcgaccgataagctgttacaatcagattagtatatttaattatcatattttagttataaccactcaatgtaattgctgtaagttgactaagaagaaatgatgagtgatttgaactctatttatgacccaatctcttgtagttagaagaaagaagaaaaaaaatggagggagagggaagaagagaagatggagattgctcttatctctgcatcccttttaactccatccgcgatatctttcaatcgttcttcactaggtttcgcggtctaactcctgataattctccggtgacggtgagtaatatgaatcaacaattcttataagttaatatgcacggattcatacaaaatagatttatgatcacttctatcaaaagcaattttctcgttttccttttaacgtgaaattcacaatcctatatcatatatattaaaacgatgattaatttgtttaatattcgtcagtgttatgaagtaaatatttctgataactgtttgtaatttcggagtttctttaatcgttattttttgtattttacaattttacatacttgtggaattttgaataactatttgccaaatgatcatgttcttaatcgtgattaaatttactcggatgggtacgatattaatatatggtagttggtacttgtataaagaaaatggtaaatggtttcttgagctcattcatataaaatcaatcatttaaaaaatcaaatacatgtttcgaatccgtgggctaatttatgaaacttgatttggaaactaagtctaaagtacgacatgaatgtttttttttttgtttctgaattattgtcacatctttcttttcaatatgaaatttctaatggaaaatgtgtatatgtaataatgttggtgacgaagatatcacaagaagtagaggaagagacagaggtagtgaatataccgaggagtgtggtgtcggggaacgttgcagcgcgaaagggtaagcagcaaacgagttccgggaagggtggaggtaccaactaggcaccttcctaattttagcttccacaagtcttcgtttcaacaaaaagtcaacttcaacattaagttaataatattgttaacatttacaacttctcaagcttatgtatattgttataagtatcttatattttatgtgaattatgtgattattgactgtttgtaagctctttgagtcatttcatgtatgaataaaagataaaagcaaattccctcttatgatatatgaaaaagttgtaaaagaaaaaataattaaataaggatgaataaaaagtttgggattgtgactgtaaataatagtgctggctagttaagattgtgattcagaactacagatcttggccaaggtgaataaaaagtttcacaaatgggcacaagaatgtaaaaagacaatgagttagataaaaataaatcaagattatttgttgtttttatttataaataataataaaagttctaattgttttactgatatgcaactacaaaactgtagagtgagtgggtcattcgtacgcaaaccaaaatattccctttatctgtcccaaaatgaaactaaactccaagggttttatgggtttgcacagttggccactgatctctgcatctgaaattcaaactccacattttccattgtatgtgaatacatgattaaataaaaaaacaattttgccaaaaaatgaaactaaacactctacaagtaaggcagcgtaacaatatcttttaaagaataataagaaagcgattttgtccactaccttgaatatttttatgtcttgatttctatagtagacttttttgataattcccaaaaacagtgatatttattcttttaaattaatttatatatttttgattgaatagtttgataaaacttctcacagctagtttatatatagaagaaagatctaataagataaattaagactttcatcgatcattggccttcaaaaccaatttgatctggtcaaccttattgtaagtagagcacatgtgtacatcatgttgaaaaacataaataaatagtaatattttataccgaacatgcaataatacgaaaagacgcgccaaatgagctgttattagtagattaatatatgtaattaccattttataataattagtgtaaattactaaatactgatgagcctatattaataaactcaagtcacacctcagtctctcacttagctctcacgaagcagaattgaagaaaaacatg

SEQ ID NO: 23493 - DNA, 3003 bp, Unknown
  misc_feature (1)..( 3003): 2750-1469P.txt file - cDNA_ID_2142739; gDNA_ID_1620440; Annot_ID_157152
attacactcttaagctagaaagactcaagcggactctgaaaaagggtaaagagaaaagtggcatctgattgatcaccttctaggcttctactgcttagcacgctttgcaagataacttgtagtgattttagagaaacgagtgattgtggagaacaattgccataaagagcgtcccttaacaacaccttctctaaagctcctcgcttgtttagccaacattggttctgtttcatctgtcttggtttgacgcatcacctcctgcattgaagctactgatgaggtaaaaatggagttaaccatgaaagtccatagttcgaatagaagagttcagaagtgaaaggtcagacctggattcatgtttgttaaccgtcttagtctatcttcagctacacgaatagcccgtgtcgagcttttaacaccttgagtgataccttggctacacaaacactgaaagagttacaaaacagatatgaagaaattggtaatcatcatggtgggatgtgagacaaaccctaaatcactgagctccatagttaagtcactgatctccattcccgataaacgaacagcagccattgtatctggtagctcttctctagttacatccaaaagcttttcaagagactcagctgctttcttgaaagcctttctcaacattccaaagtaaaactcaaatcaaccttcaaaatccatcaaagggttgaagaaatctgtaaaagcaaaatgttggagaacgaaccagaagagtaggaatcgcagcaaagaagagccacgatgctgaaattgctgtctgcaacagaacccatgatgatgattgtttacaaagtgacataaagtccagatctttattgagcaatttgaatcaaaacctaaatccaagagaggcttaccacgcaagcgacgacattgagcaagacgaagtgcttctgtgtgaatgtccattgagagagttggagaggaggctgtcccacggacgatgttaattgggaagagatcgatggctcctgaggattcgagtacaatgcagagggagtagaagatgcgattgagtctgaacccttggtcaatcgtgaaatcggtgaagctagccggagagtgacccgtcggcgaaaggagagatttttatcgatgaatccgttatggagaatcggattccaagagattagagattggggtgattgcaatttcgaaggcgagaataacattgtgaatggttttagctctattcgtcagaaaccattgttaagcttcgagtcgacgataacaatggatttcagttgtgtcagcgagaaaatttgcgtcaagtttagaaacaacaatatttcacgaaaagtcctctgtttatgcgttaactattgaaaataaccccattactatcatttgagttaatttgaccttctttgcgtcatatgcaaaatcggaacaccaccacattggtttggaggtttgtgagctacaagcctataaactacacgtagcacctccctatgcacgtgtcacatgaatgattttaagggtttgggctgatgtttgagctataactacatatatacatttggtttgattcgtttttcttacattatagtttcatcaaaagccaaagcataattgatggatcaagtactctactcctcttacatcataaaaatccctgtaatatcacgaatatcaccatcacaagctcaacttacgaccaggctcaataacacgacttattttggcttgtcatcgtcgagaggcaattttgggaaggtgtttgcaaaagagtctcgtaaagtgaaactgattagtccggaaggtgaggagcaagagatagaaggaaacgaagattgttgcatacttgagtctgcggagaacgcgggacttgaactgccatactcgtgtaggtcagggacttgtgggacatgttgtggaaagttggtgtcagggaaagtggatcagtcactagggtcctttcttgaggaagagcagattcaaaaaggttacatcctcacgtgtatcgcacttccactagaagattgtgttgtttacactcacaaacaatccgatcttatatgagttacacatgcctgccttgaacttttgaaatctcagtattaaaatatgtatttcagtatttgatgtgttttgatgtatttttatgtattgatatcattttacatacgttgattcaaaatatttaaatcggattccacttacaaaatcagactagtaatgtatatgtgcttcgatcatctttgttcagtagttgaggcttttatccccatcatgggtctgtaattggtatcaaatatactatataggcccattaaggattcgtaagatatgggaaataacgttgggctttatttcgtcaccatgggtttagttgttgttgttgagttgtctttttcgcatctggacggatattgtccgtatgaatttcttagactataaagattaaatgtaatttcaaattattatttgatatacttaattcaattttataaatttaatatcttcaaaaaagtttgtgtccacaatataacaaatgttatcaaagcaaaaaaaaaaaaaaaaacttcttctaatataacaaatttccctaaatagcttgcaaattatctgtaaacatgatgaaaatattaaacatgatgaaaaatattaaattatcatattattcaaaaaataattaattagccaaaagctatatatgaattttgggccttacaataatattttcgcaaacggcgcctaaataatttgggggaaaaaatcaaaaaccctatttccttttcatgaagagcgctcgttgaaatcacgcaataagtagaacacatttggacaaaaagaaaagataaaataaaataaaaaacaaaacccccaaatttgtgtctcctccggaaaaaaaattcgaaattccggatccaccgccatcaatccctagctttctctctctttctctatcttcgccggcgaaaccagtagggttgctcaattcgttggtagagtactgtggcaatg

SEQ ID NO: 23494 - DNA, 3003 bp, Unknown
  misc_feature (1)..( 3003): 2750-1469P.txt file - cDNA_ID_2142757; gDNA_ID_1620439; Annot_ID_157106
ttatactgtgattgcgggttcgggaagtggtcggagacatgatctaaggcttgatttgcatcctttggtgagcattaatccgaaatattatgatgctattctgaatggtgtggagattctcaagatgaatgatcccgatggtaatcttgcaggacctaatccagatcctctagtatcaccagacttaataccaaaccgtgcaacgccgcggattcgaaaaaataagtcacatattttgccgatcacacttgcagtggttggttctttagttgtgctagcaatgtttgttgttggtgttcttgttatcatgaagaagaagaagaagagcaagccatctacaaactcgtcatggtgtcctcttccgcacgggacagattctacgaatacaaaaccagcgaaatctctgcccgcggatctctgtcgtcgattctccattttcgaaatcaaatccgccacaaatgatttcgaggacaagctaatcatcggagtaggcgggtttggttctgtctacaaaggacaaatagacggtggagccacacttgttgcggttaaacggctggaaattacatcgaaccaaggtgctaaagagttcgaaacagagctcgagatgctctcaaagcttcgacatgtacatctcgtctctctaatcggctactgcgacgaggacaacgagatggtactagtctatgagtatatgccacatggtacacttaaagatcatcttttcaggagggacaaaacctctgatcctccattgtcatggaaacgaaggctagagatttgcattggagcagctcgtggattacagtatcttcatactggagccaagtacacgatcatacatagagacatcaaaaccacaaacatacttctcgatgagaacttcgtcactaaagtatctgactttggtttatcaagagttggtcctactagtgcttctcaaacgcatgtctccaccgtcgttaaaggaacgtttggttacttggaccccgagtactatcgccgtcaagtcttgaccgaaaaatctgacgtgtactcctttggagttgttctgttggaggttttgtgttgtagaccgattagaatgcaaagtgttccaccggaacaagcagatttgatccgatgggtgaagtcaaattacagaagaggaaccgttgatcagatcattgactcagatttatcggctgatatcacttcgacatcgttggaaaagttttgtgagatagccgttagatgcgttcaggaccgtggtatggaacggccaccgatgaacgacgttgtttgggcgcttgagtttgctcttcagcttcacgagactgctaagaagaagaatgacaacgtggagtctctggatctaatgccaagtggtgaggttggtacgaccacggacggagaagatgacttgtttagtaggactacaggacacgtggggaaatcgaccacgaccgatgactctgttctagttgttggtgatgagaggagtggttcgagttggggagtattttcggagatcaatgaacctaaagcacggtagatgatggcttggtaaacaagtattacattcttgctagggttaatatatttgtgtatgtataattgtggaattaaaaaattaatgtatatatatatattattatgagttacatgcgtagcaggttaagttaatcaaaaaacaaaaatctttgtaattattatgtctctctcttccttgactcatgtgataagatattatcttatcaagtttccagttatcatgagtcatgatccttgtagatgattaggctaagcaaaatgacattaagaactaagacgtttgtctaatctagagtggtgttaacatttttcgcctaatgtatgtgacaatataggattcgccaaatcctttatgacaatttttaatctgtacaaatctgatcatcatcgatcccgatacacaaaaactaaactaaataaccaaggactcggcacaaagaacacaagtcctgaagtccaatatcgattagctcaacattgaccttgatggggataaggaaaaattaattcaaatcttggagaataaccgagaaaaaggagaaaattttcatatccccattcgaggaataaggaagttaaacatatctcgaagtgaagactccctcgtataaaagtgaagttcgacagccagccaatagatccacaacttcacgcttaggaaccctacatttagttattgctaagaaccttaacttgctcttcaagataggggaaaatccttttgtaacaatctaatttaaacttgatttttgtactcttttctattttcagtttacttgtgtgttttactcgaacagtcacaactacaaatgtttttaacagattataacatttgcttatgtataaatattctttctttgggtagtcggtacacataatcttttgtttaactactacggttctcgagtaaataaagattgtttatgataataagattttatcaaagacgataattttttattttttaatgagaaatttaattttcctttttctctattttaaaaatatttagtgttaaggctaagttgtagtagatagatgtttatttagagaatagcataaacctaaatttaattatgacgtatatgtatattttacatgaagataattactaacgccaaatcgataaataactgttttaattattatttttcttaaaacatgatattgataacaatctcatcaattaatatctttcaaaaacaaataaaatataatattcgtggaaatttatcaaagaaatctagttacgttctatatatataaagaggcaaaataaataatagtctcgttcgaattaagttatatttattttttaaaggattaaacgccgccttcatataaaaaaaaggaaagtactaattatcaaaaaataaaaagaagtacacactatatatatctaagactttcaaaaccctaacacaccaaatcttaaaggaatcccaatctcatattacttttttctcgatg

SEQ ID NO: 23495 - DNA, 3003 bp, Unknown
  misc_feature (1)..( 3003): 2750-1469P.txt file - cDNA_ID_2142765; gDNA_ID_1620439; Annot_ID_157108
cccaatttcttagtacattaatctttgaacaagatcttgcatctatgaatttccgtggatagagcattttcaacacaacactcgaaaccttcacatacttatagaactaagaaaataattaaaaagagttaatgtttgactcaaacatgtatattagattgtgttttgctctgaatagatactattattcatatatatatatatatataaacaaaaacctttgcccaaaaataaaataaaaacagaaaacctaaattaaaaatctagattggactacgttagtaatatacaactacaaataatttatttaagacctaaaataattgaaagaaaaaaccaaaaatgaggtaccacttgtaggagtatgtaatcttaactagtatgaacaatgagaagtcagacactcagaccttaaataattgaaagacaaagccaataatgaggtatcacttgtgggagtatgtcatctttactagtatgaacaatgagatatatataatcgcagaaaaacatattggtgttattttcgttagtgactgctccgatctactaagatggtgtatgtgaatgtcggattcgcacactcaagtatttatttattttgtgagaaagattatttttgagggcaaaaatcaaatgtaaaagctagagattaacactcaaatgactatagtatgatttagaaaaattgtgtgtgtgttagatagtcccaaacctctactacttatactaaaacatcgtatttactctcaattatactccataattcttcttttaatgcttccgtttcagtcctcgggtttaatgcctcaatgttcgaatttgaattaatttcgattctcatgggcttctcagttcggcccaacaccccaggccaaactatccccaattcggctttgtcaccatctcgtagtgtcgacacctcgctacatctctgaccatcattccgggtttttttttgggccatacctctcgtgggcttcctccctgcttacgtgacaatctttggttggttccggactacaggtgtgggatccgacaccaacagcgtctacccccacataatgattagtcttttaagatttatctaaaaaaagtagagaagagtaagaaagtgttctcgtcttttactattcccctgtttttcgtaacactagtgttaaaacggatcttttaacacggaacgtccgtgttgtattatgtatgcaaacaatatatttttcaattaggtttccaaatcctctatatgtatattaaaatagagtatatttgatgtttatatatcaagctcacaattattctcaatacagtatttttatttttctttatttaattataatatctttcttatcaaacattctcatttcctagtaatacatattttgattattctaacactaattgccaaacattcaagaatcctaaatttaccaaaattaattattttagatatttttatacgtacaccggagtttaatgttctaaactattctctctctttcacaaagagtgttattcttgttttttttttttcacaaagagtggcattctacattttcaatgtgatacactaagtttcttgatttacctttacccaaagctattttattgaacttcaatcactaatcatgtattaattagggcatacatatatagttcaaaatttcttaatttgtgtaaaatatatcaaaatgacactagttgtgaaacggaaagattacaaaaaatatttttctaaaattaaggaagtgtactggtttaaagattttagagaatttggtgaattttacatattttgagagattttgataggtatacggatgatttgctagatttcatatttaaaaataacaaaataattggtcatttggtgaaatttactaactttcattttcaaatcaattgttaatgtgaagatcgatcttgtatcgatccaatgactctaagcatttcctatttcacaattaaatctctgattctgatcagcttaactacgggtatctgtagaagagagctaaaccattcacgatgttaatcacttttaaattgcaatcatctttgagttgaagttgggttagatgttgatcaattagactcgtcaccgtaagctctctgactacattcaccattgttttttatagactttttttttttcaatcctttcaaatactattttagaggcgtgattgtttactcttatttttcaactaaaaaatattcaaagtctctcaaaatcatttttcattattttttaaaaaagttgttaagcttgaataatagtggattggatatggttttaataaatctattgaataacaagtgattgtgaagaattttgaatgattttccacaaattttagtttcaataacatgaaatttgtgaggacattttaaaatcacaaattgaataaccagtgatttaaaaaaaaaaaaaaaaccaaaaccttcaaaatcctagttccaaagtctatataacaaattttaatacttttctactaaataaacataagaagaaatagtattgttaattagtcacaatccaaatttacagaaccaaatacaacaactttgtaatttcttaatgtattaaaaattttaaaaatttccattagagatagattctgatatataaaacttggataaaataaatatcataaaattcacaagtgcataacacgaacacttgcctagttttcagttaatatacatatgttgaccaaaaaattaagtcttaaaaaaaagaaaaagtaatagtttatacctttattggcttaccaaataacgtctgacgtgtaatcttgactcttgaccttaacttaaatttagatttcatttgatactaattaaactattccctaaattaccaggaagtaaccaaattgtggagagaacaaaaacaccaattcgatattttcattcatggcttagaaataagaatcctctaagttctcctctctattgaaaacccaaaacaaaagttgagaacttttcatatttcagatg

SEQ ID NO: 23496 - DNA, 3000 bp, Unknown
  misc_feature (1)..( 3000): 2750-1469P.txt file - cDNA_ID_2142785; gDNA_ID_1620439; Annot_ID_157116
ttggaaataatatacacacaaattataatagttgatttctatgtgaccttacatacatggtggaaattccgtccttccttttgtccctgttgcagtggttaaagaataatattgaccaactatcttcgcttaatttgttattttagtgttaacattatttttactcaagaaagtgctaggtgctaaccaggcggtaatccaatgtctagcacctaaaacgcttaatcgaggtttaaattatttttagacgatgtaagcgtttttaacataaacattataaatatgatattacatataataaatatataaaaatatttattaggaaattggataaaaatgttaatacgtaaataaagttaaacaaaacatttattaaatttatatgaacatttataactatataaatataaataaaacttagttagaaattgataaaatactaaaacaaaatctatacgattgtaggtggtcaaagcgactaggcgctgtccgagaacctagcgtctcgtcgaggtttatgcgactgcctaaatcggttttcaaacactgcattaaattaatattttttctaataaacaacattgaattagtctttgcatactataagttaaaactatatgccaaaagaccaatgaatttcgcaataatcaaaacaatgcacgtaaactttgttatattattctagcagtagcagtcgatctacagtaaaagcatacgtttacatagaagacttgttcgtgttagttgtaaatatgcttatcaaggcagattaagcaagtcttccggtaaacgcaaatttgacgtagtcatagataacttatataaagtatgctctagttttacctacgtcaaagcagatttgcaaaaaatgttgtaattctatctatgatatatctagaagacaaagatataaatctgtcataaatctgctaatttcgtcttaacagtcttgcatggtgatgtcatttttcatggatacgtaatgaggtctgaaaagttggtacaaaagatcaaactactcaaataaggttaacgaaaacaaaacatattatataaatatttacattaatatatttgcatcaatttactgctaaatcacatctaaacttataaaactattcatatatttcaagggaaaactgacatgataatttcactattgattttttttttttatcttcataactttaatctatcttggtaaacaaacaacataacttcaatcttttaaaataaagcccaaaaccacataaatcatgcaatacatttctttttaaaaggatataaatattaatcatgcgattaatacgaaatggatgtacataaaatcaaagtatcattttgaaagaagcatgagttttacaaagcgtgcattgttggaaaaatatacacacaaattataatggttgttttttatgagaccttctcacatatatgatggaaatttggtctttgcttttgtccttgttgcagtggttcaagactaagatttacctactaaatcgcttaatttgatattttcgtattaaccttacttttcctatatatattgaattagtctttttattttattttcccccaataaacaacattgaattagtctttacattttatgagttaaaactattcagaagaacaatggatttcgaaaatagccaacacagtgcacgtacaaaaactatactattattctaggtattgcattcgatctaaaagtaaagcagacgtttacatcgaagacttgttcgtgtttgttgtaaatatgattatcaagggattaagcaagtcttctggtaaacttaaatttgacgtagtcatagaaaacttacataaagtatgctttaattttacctacgtcatatgttgtatttctatctaaacaaagatataaatctgctaagaatcttaacatttgttttcggaaaatgaaatatttgtttggcttcttgacttcttgtatataatgtttggatcagatggcggttctgttgtgactcacaagtcacaagttgactaataataattttatttattgtcaaaataaaatgttaaaaatagtgataaacaagacatcttttcttttttatttagcatggaattcgaacataggctctagtagtattcgtggacccaaaaacagtctttaatctatttttgttttgggaatactccttttcgcaaatacactcgaataatgattttcctctcttatgaaaaccattagaccaaatgtttgatagtcatcataacagttaaaaaatggcataattgcaattactatgtctgagatgtttcactggtagcacaacagagaattttccgttcacaaactaaatgaaaaagtttttagaacaattgtatattgataagttttgttgaactaaacaattcatgccaaaaaaaaaaaaaccgtggttatcactcaaagtactaaaaaagttagcacatgtttgatagtcatcataaatcaatataggctcgaccatgcactaccatgttaactttttggatgtaactatgagttctctgatttggggaagatatggcttctttgccacccttcaatttgtgtatggtagtctccaagtcacttaagttgatccgattccttgttaattaatttgaacaagtcatttcttttctttttcttttttcttttttttttgaacaagtcatttctaggcatggttccaactgcaaaacagctaggaaacttcttaaatctagaataaattaatataagctctggtcgtggctttatttatataggcatgcaaatccatttataattaaagatatatgaagtcatcgatagacttgttaaacttttttaaactgccaatttaaaacaatgtatatagaatatctttggaccacgtcaaatatgacatgcgcttttgccctataaatactgagctcaaatgcttcacaattcacaaacaacacacacacatataaaagtctttgaaaagcattagcatatccctttgtttcaaaatg

SEQ ID NO: 23497 - DNA, 3000 bp, Unknown
  misc_feature (1)..( 3000): 2750-1469P.txt file - cDNA_ID_2142788; gDNA_ID_1620439; Annot_ID_157117
atttatatagaaataaaaacttagttggaaattgatgaataaactaaaacaaaatatataagattttaagtggtcaaagcacatggttgtttagacattgtccgagaacctagagcctactcgaggtttatgcgaccgcctagatcggattttaaagcactgctttcactacattgaattactctctttttctaataaacaacattgaattagtcttttcatactataagttaaaactattccaaaagaccaatgaatttcgcaaataatcagcacaatgcacgtaaacgttttttatattattctaccagtagcagtcgatctaaaataaaagcagacgtttacatagaagacttgttcgtgttagttgtaaatatgcttatcaaggcagattaagcaagtcttccggtaaacgtaaacttgacgtggtcaaagataagtatgctctagttttacctacgtcaaagcagattttcaaaaaatgctgtaattctatctatcatatatctagaagacaaagatataaatatgtcataaatctgctaatttagtcttaacagtcttgcatggtctataacgtgggtagttgagttgtctaaatctgctaaaatatctttgtttggcttcttgtatataatttttggatggcggttttgtagttactaacaagttgactaataataatttatttattttcaagataacgttattagacaaaccaagtgttttcaaaagcagtctataccgtatacggttgtctaggtcttgattagacgtttagacgatgtgtagatgaccgctaagactaaaattacataaattttgttttagtttattttttcaaattttcaactaaatttgatttacatacattaattataagtattcatatattatttgatatacattaaaagaaagggttggctaaaattttgtttgataaatttttatatgtaatatctaatatgcttatgttataaacgcctaaatcgcttagatttcgattagacattatagacattaggcaatgattcaccgtctatttatcgtataccgcttttttgaacattagactaaatattgacaaacaatacattttttttttttttccaagatttgaacctaggctctagtattttttgtccaggaagaaagaaactcttatattctttttttggttttaatgttaaagactctaaaattttgaatagatgctatggataaagctgactaaaccgctagcagagtagaccactctattttgagaacaaattgctaaggaccaagtttttctctatataaaagcggtatgtagttagtacgccgcgaacttgttctattttttttaatttactattacggactaaaatttgtgaataataaacaaaaaacggtctaaactttaaacagatttgtttgccctaaccgccacaaccatttaaatcctaatattcgtggacccataaatagtctttagtctatttccttcaaaaatatttgtttttgcaggtgacacgaactaggatgcttctctcttacggaaaccactacaccaagaaccacttggtgcatttataacagttaatatgtcacaactgcaattaccgtagtttatcaccattctcgttttcgtgaacaccctagatttactatgtttgagatgtttcactcgtagcacaacagataattttggattcactactcaaagaaaaaatttagaacaatttgcacccaaaaaaaaacaattgtatattgacaaattttattgaactaaacaattcttgccaaaaattcttgtttatcattcaaagtactagaaaattaagtacatattagtcactataaatcattagaagcttaacaagcctataattggtgttattattgagatccatgtcatggctcgtttataattaaccatcacttccattttaagttttggaatgaaactacgagttctctgatttggaggaaatatggcttctttggcgccctcaattcgcgtcatggtaatctccaagtcacatcagttgatccattgctatgttacttaaactaccatttgttgcagtggaaatagtcgtgtctcgtatctcggaaactttttgaactagtacaaatcaacataagctatggctgtggttttgtgtatctatatatacatttttgcagccattttgtgaaataaatcatggagttagaacttatttacaatggctgccactgacttttaattattgaattttttttgcaataaattaattaacaaataaaaaacattccaaatatatttcaatcccatatatcacgcaaatttctccaaaatttgaactagatttcggtaactatttaaaacaaaaaatatttgacagaccaaaatacaattgcaatcccttaaaatgagcaaaacacacttaaattcatttcttatcaattcactaaacttatttctccaaaatttgaactagatttcgacaactatttaaaacaaaaatttgtttgttaaactaaaatacaattgcaatcccgtaaaacatttattttcattatatatttaaattagcggtgtactgcggagtttttttacgggacgggtttggcggaacgggtttggaaggacgttacttaataacaacagtaaactataaaataaaaataatttataaatagatataatttgcaaacttttatatatactgatttaaaaaaaaaaaattgttttcgcggtgtaccgggttaaaatctagtatagtcatgtaaatccaatttaattaaaatatatagattgaagttatcgatagacttgttaaacatttttgaactgccactttgaaacatgcgagttacaagatatgtagataatatcttggaccacgtcaaatacgacatgcgcttttttgtcctataaatactaaactcaaatgcttcacaattcacaaacaacacatacatttataaaagtctcaaaaaaggattagcataaccttttgtttgaaaatg

SEQ ID NO: 23498 - DNA, 3000 bp, Unknown
  misc_feature (1)..( 3000): 2750-1469P.txt file - cDNA_ID_2142790; gDNA_ID_1620439; Annot_ID_157118
tgtcctataaattttaaagcactgaggattcaccaagtatacatgcataacaaatttagagcgagcaataatgagggtttctcaatctctaatcccttttgccataattgctttggtcctttcctttgtcaatgcttatgatccaagtccactccaagacttctgtgttgccattgatgacctaaaaggcggtacgtaaagaaatctccggttatctatttctctacttttctccttatgattaactttgacgtagtaatataatatatactctttgatattatatttctacatgcagtttttgtgaatggtaggttttgtaaagacccggagcgagtcgatgcaaaagattttttcttctcaggtctcaatgtgcccgggaacaccaataatcaagttggctctaatgtgaccactgttaatgttgatcagatccccgggctaaacaccatgggaatatcattggtccgcatagactacgcaccgcatggccaaaatccacctcacacgcaccctcgtggctcagagatccttgtccttgtcgaaggaacattatacgtcggttttgtctcttccaatcaagataacaaccggttattcgccaaagtattgcaccccggtgatgtttttgtgttccccataggaatgatccattttcagttaaatatcgggaaaattccagcaattgcttttgcgggattgagtagccagaacgctggtgttatcacaattgcaaacactgtgttcgggtcaaaccctccgatttatccagagcttcttgccagggcgttccagttggatgcaaatgttgtcaaagaacttcaagccaagtttgggtccatatgaactgatcatctaagtcgtttaagagtgtttatcattgaaacacaaattaaaggaatacactactatgaaatatttatgtaacaaagtaaaaatggcttatgtacctatttctatattataatataacaactttaatagtgctgtgaagccaaatttgcaatgaatcggtgaattttgtcttaccccctccttgctaaatatgtgtcttaaaagttgcaatcagttgctctaaaaatggtctcaggcgttgaaggttgcatgttttttttcctcactttccaaagataaagtagatgagaaattgtacgacgtgttgtctaagagcagcaaaaactactcaatcggataaaattacaagaataatcgacacatgtaatctagtggtttgtgtttgtgttgttgttatgaaaccataaacaaatatttataaacaaaattttatatgttgttaaagtattatcaaaaaaattacatggataaaatactagtcaacgtaacttaacatcaagtctttttttaataattttcaaatcaagtctttatgatgtcgcttttcatggatacctaatcatgtctttattttaatgttgctacaaaagataaaactactcgaattaaaaaaccgtttagtgtaaacgagccataaaacataaaatattaactttcgtagaaatgcatcaatttactactaaaactacatctttttttattttgaacaaagactaaaactacatctaaaatcataaaatataactattgttgaaggggaaagtaataaaaaaaaaaacctttcatcatcaaatatttactggaatcaatttgggtacacaaacacacttcaatccttcaaaacagacccaaactcgtatcccaggtgaatcatcatgagataaatacgataaagacagtcaaattattattttccccccaaatcatagtatcattttgattgagagttttataaagcgtgtcttgttgaaaaaaagatacacataaattaaaatggttaatctctacaaggccttcgcacatacatgctaggaatttggtcactacttttgtctttctggcagttgttagagactaagatatttaccaactaaatgatgtcttttgcttaatttgatattttagttttaacctacttttcctgatttgaattagtcattacgttttataagatataagtattattccaaaaagaccagtgaattttgaaaacaaccaagatcaatgcacctaaagatttttgaaatattctaactataccattgaatttaaaataaaagcaggctttacatatatagaagacttgttcgtgtttgttgtaaatttgcttatcaagacaggttaagcaagtctctggtaaattgacgtaagcatagataacttacataagttatagcagattttttgttttatttttgtcgtcaagttatagcagatttgcaaagtacgttgtaaatatatatcttgcaaacatgaaataaattcgtaatatatctaccgaaaatataatgagcataagatatgctctactcatcgcttgagattgctttgcctaaatttgtcagaaatatctcaaaatatctcatatatatgcttgactttattattagttagaaacatgaaatttttgtgataaaggttggtatttttgaaaataaatgaagctattaattgttcattggtaagtaaataataactttatttagtagtaaacaacttataaaaaaagttatgaatggtgaggtgcatttacaatacttaggatggcatttagaaaaaagatagtaatagaaattattcacacacacatattctacctgacttgaatctagaaggtgcatgatacaaagacaacaatattacaaatcaataaactacgagctcttgtcattggattgtgtatatagtcgtgcaaatccaattttaaataaagattgattgtcgatcgataatactgattaaacgtttttgaactgccactttgaaacatgtgaactacaaaatgtataggaataacttttggaccacgtcaaatatgacacccgcgttttccctataaataatgagctcgaatgcttcccaattcacaaacaacacactacatatctagaaagcattagaaaaaaaaacctttgtttgaaaatg

SEQ ID NO: 23499 - DNA, 3000 bp, Unknown; identical to SEQ ID NO: 1719
  misc_feature (1)..( 3000): 2750-1469P.txt file - cDNA_ID_2142793; gDNA_ID_1620439; Annot_ID_157119

SEQ ID NO: 23500 - DNA, 3000 bp, Unknown; identical to SEQ ID NO: 1718
  misc_feature (1)..( 3000): 2750-1469P.txt file - cDNA_ID_2142800; gDNA_ID_1620439; Annot_ID_157121

SEQ ID NO: 23501 - DNA, 3003 bp, Unknown
  misc_feature (1)..( 3003): 2750-1469P.txt file - cDNA_ID_2142838; gDNA_ID_1620631; Annot_ID_162685
tcttgtttactgtactgctggaatctcaggttcaggatctgttcttgctctgaattttgtttaaagttttcgaatttaggttgaaggaatctggaattagggttacttggttgtgagaaacttggatataatgaagaaagtttgatacttaaaagtaatttcacatttaaagattgaaactttgagtaattttcttcttaaagtttgaaactttggttagtttgccccactttgtttcttctgtgtgaagatcataatctgattttgacttgtgtgtggcgaattggtttggtaatgagcaggaggacatattaatccggcggtgacttttggtttgttcttggcgaggaagctatctttaaccagagctctgttctacatagtaatgcagtgccttggagctatatgtggtgctggtgtggttaaagggtttcaaccagggctgtaccagacgaatggcggtggagctaatgtggtggctcatggttacacaaagggttcaggtcttggtgcagagattgttggaacttttgttctggtttacactgttttctcagctactgatgctaagagaagtgccagagactctcatgtccctgtatgttgctaattctctagtatccttgagttgtgttgagttcatattcttcacatagagctcatgtgttttttggttatcgaacattttgcagatcttggctccgcttccaattgggtttgctgtcttcttggtgcacttggctaccatcccaattactggaactggcattaacccggccaggagtctcggagctgccatcatctacaacaaggatcatgcttgggatgaccatgtaagttttcctctttaattacatcaacggttgtgctaagtatgataagttatgaattgcatctaaatagcaactcagaatttttgataattctgctcttatctgttgtctcttttgttttatgtgtctgcagtggatcttctgggtcggtccattcattggtgctgcgcttgctgctctgtaccatcagatagtcatcagagctattcctttcaagtccaagacataaagtttcctacatattctctgatcatcatcaagctaagaatatatcaatctttaattctatatgctttcttcttgtttcctatgtcatgtgtgatgatctctatatgtaccactagagctttgatcttgtaacagtgtaaatgtgtaatctattatgtatcaatggcattgtatcttgtaacattaattatgtcaatggaagaatacattgtgtacatgtgtaagctcagaatcttgtttgaatatcacagagacataactgaactggacataggtatgctaagttgctaacattgtcaataagtgtttccaataccaaacattagcaacataattgtaaaatgtgtagaatttgatagaacaacatctaagccgaactgaactggtctaacaccatcatcgcaagtatttcttcatcttctttcttctataagagtctttcattttccactttttataacatgcttataactgaattttcaacttttgaatcacagtttcagttatagatattcttggatgatgttcagttcggggttttggttttggttttggttttggttgatagtcatgaaaatgcatgttctgttccacatggtagggttccagtaaaataataaaagaaccagatttagtaacatctttcacatgaatgataacatatttcacatgtttgatgcagcaacttgtaatatggatgatagtcatgaaagaatctaatgggccaagaaatgtgaaagagtctacatgactatcatccaaaaaagagttgtagcaatatggatgggccaagaaagtgcaagacttcagcttgagcttgactttaagagaataagtaatttgcatttgccctttggtcatgtagtactcgggttgtttacatttatcaaacaaatatcagagttgtttattgttatttgggaaaatctttaaactttctacataatctttgagactagtgggaattaagagtggtgatgtagtggatcaagattaaaaaaagttgattgtttaaaacatcgagtatcttgcaatacaaaacaaaacccttaaaccaatcaatacgaaaaagatgaagatgtcaactttccttttcaaaaatatgcaagtttgaatccggatggtaacatactgatgttactagttacacaaatatctaggctagatgtcctaatcatcttcaaaatattttgttgatgttttatcttaaataatcaaagtttttcaattattgtgggtgttgtatatatttaacataatcttaatccataaacaaaaagtaatataaaggtgttgcgggaaaaggttacttaatggttaagaagtttggcttatgatcatcccactttgtgaagtatggcatgaactttctttttaccgatattagagccaaatgaaagcggtttcttaatcgccaagttccaaccaaaaaacaaaaagcccacatttacgaaaaatactcttaaaccaacattttgaattcatatgatacaaagcttcaaatatccaaatcgaggaaattattttttaaaaaaaacaatacataacttttaaatataaattgcgaaaaaaggtaaagccactcatcaaaattcaaaagtgatgagattaaagcaagtgaagacgcatacattatcacattaaaagtagcaaacacaccaagaaattagataaaaagataacaaaataattccatccactttctttttcttttgttttgtcaagattttgttttttgtatttcagtcatacgtgtgaatgtatatcaacaacattgtttttaatgtataaaaatctcaactactataaagtagctgaatgatatgtgattaagatatatatcgagagagacaagccagcaagaattttcagcacacatacacacacaaaagattcaaagaatcatctagtaacaaataaaaaaggagagagaaggaaaatg

SEQ ID NO: 23502 - DNA, 3003 bp, Unknown; identical to SEQ ID NO: 23501
  misc_feature (1)..( 3003): 2750-1469P.txt file - cDNA_ID_2142838; gDNA_ID_2926182; Annot_ID_200330

SEQ ID NO: 23503 - DNA, 3000 bp, Unknown; identical to SEQ ID NO: 3207
  misc_feature (1)..( 3000): 2750-1469P.txt file - cDNA_ID_2142850; gDNA_ID_1620631; Annot_ID_162689

SEQ ID NO: 23504 - DNA, 3000 bp, Unknown; identical to SEQ ID NO: 3207
  misc_feature (1)..( 3000): 2750-1469P.txt file - cDNA_ID_2142850; gDNA_ID_2926182; Annot_ID_200334

SEQ ID NO: 23505 - DNA, 3000 bp, Unknown
  misc_feature (1)..( 3000): 2750-1469P.txt file - cDNA_ID_2142859; gDNA_ID_1620631; Annot_ID_162692
cttatttatatttacgtatgaaaatgtgtgttttgagttaacagttaattactttcaacttgtggaaaaagggtttctagtcaatattttcagcaatatatatgtactatataagtattgaacattggacattaactgatctgtccttgcattacgtgattaagtgaagtttcttcactctttagtatatcggaaagtgaagcttcttcttttgcacatgggtgatgggtatacattttataactcggatcattcgtgaaacctagatattaacagaaaagaaaaaaaaaaaaaaaaaagacatagataactttcaaaaatgtaacgaattaattttcttgtcatatttacaataccaaatgtagaaacactagatgagggcttgatctcttatcccgactaacaaaacaaatttttacttattagctcactatgtttgctaaattgtataaaaccgaaaaaaaaagcagaattttataaattacactttgtttattttgatgtttttatcataaataattacgtcatgtaccatgtttaatacaagttgttttaagaaaaaaaaaatcttcggtacgttttcattcaaatgtatttgtcaaagacgcaaaccagctaaatcaatggactatatctctggacctgaatgaaattatatattaaatatgcggcaaatatgaaataatgaaaaagtacgaggctattttataaaattatttaattaaaccaagagtcccggaccttctcaaaccttcctctgcctttgaaattatccaaactaaaaacaaatctgcgatcagtcttcactgaagaaaagctttcgcaaaagaagaaaccgagacactcatttgaatttgctcagactttgaaatctggtaattatttccatcttcctcttgtacgttaataatctctgttttctcatttaatactacgattcttgaagttcttgatcattcaattccttgtaatttaagaataattatttgattgtagttggtggtttatagtctctcaagtgttgcaagagatctgatcatatgttactctactgttcttgtttgcttgatagatatatattgagatcaacgtagaacctaacctcatgcgacgttttcctgctcttatagagaagttaaaaccgatcttcacggtctcaggatcaaacggtataattaactatcttgtatcaaaatccttcatatgatttcagtttgtcataattaggaagaaaacgaaaatagtgactctgtttttttttgtgagaagcaggtaaagtggtaagaaccattgtaccgaagaaacctgtgaacgagaacattagtgaaagcgaaacaatgaagaagatggaggaaacggtagagcctatggttgccttaagtagaccaccaccattttcaccatttgtcggtccagtgctcatgtattccctgcttcaatcatggacgtctagccgcgacgaagacggctagttgtgtcagccaaagtttcttaacaagaagctcttaaatcttgtctgatagacaataactgagtttttagtagaaccttatgagatgtttattagagataataaaggtttgatgttgtttatagtaagtcgatggtttgtttgttacagtgaccaattctctccaataccttaaacactgtaagaattgagtcatgattttacaatttgaatgattatgtgctctcaaactctcatcaaatgatgggaattcaaaacgaaagcgtttgagagtattgaagtttagataatgagcttactgtttcatcaaaagctaatgggctttggccgatttcaggtccatcaaacattaacctaaagttttttttctttcttataaacaaaatagcaagcaataatgaacaaccaaatcatataaaagtggacatagaatatgatatccctgtgcaatagccctaatgctgggaccaaagatctctaaatataataattagagaatatagagcaggtatatatgcagctttttattattttattcataattccattttaatattaaaccaattaagaagaggacagaaacagtgttaatcaagaatccaaaggagaatgtaatgcaatatttaatgggggcaaatccctctcatttatcgtcttatgttatagttaattcaaaacaaaacatacgagtcccatcgttttcttaggaatttgtatttagttggttacagaagaaatttgatattggattcgttttcttattaaccttattcatatggactaggagtttacaacaaaaaattaccaaatccatacttttaaatcacaaactacaaatgtcaaacaccaaaatagtagtggttacaattatctatcaccttctccaacaacaacaaactaatcattgtggtatagtttcatatctgtccactttttttctccaatagttcaagttttatttttgcaatttcaacgatagtaaatattatatataaataatatattgagtatttgaaaaaataaattttgtttatgtaactattatatatacatataagttgactttgtactaatagatccaaaaaatgatttttctcagaagttggcaacaaagaaaaatttggagccagagttaattgacttaaattcataacattcacaatcaataacatgaccttccaaaggatataaaattgaaaatgtataaagtattaactattaagggatgttttaacaaaaaatatgctaatacatgcattggtcattaatgcattataatgttgaatttctatttataaaaatatgatcacctattagaaaaataaaaataaaaatattagcatctatagtcttttgatcagtacatatgaataaatctaaaattagatttccaatcttccaaatgtccaaacttttaatgaaaaaaatctaaaacccattattcatttccaaaaaaagaaccaaatctgggttgaaataaatatacacaaacacgtggactgactagaatctaacaatgttaaatgatg

SEQ ID NO: 23506 - DNA, 3000 bp, Unknown; identical to SEQ ID NO: 23505
  misc_feature (1)..( 3000): 2750-1469P.txt file - cDNA_ID_2142859; gDNA_ID_2926182; Annot_ID_200337

SEQ ID NO: 23507 - DNA, 3003 bp, Unknown; identical to SEQ ID NO: 21081
  misc_feature (1)..( 3003): 2750-1469P.txt file - cDNA_ID_2142867; gDNA_ID_1620631; Annot_ID_162698

SEQ ID NO: 23508 - DNA, 3003 bp, Unknown; identical to SEQ ID NO: 21081
  misc_feature (1)..( 3003): 2750-1469P.txt file - cDNA_ID_2142867; gDNA_ID_2926182; Annot_ID_200341

SEQ ID NO: 23509 - DNA, 3000 bp, Unknown; identical to SEQ ID NO: 3213
  misc_feature (1)..( 3000): 2750-1469P.txt file - cDNA_ID_2142875; gDNA_ID_1620631; Annot_ID_162700

SEQ ID NO: 23510 - DNA, 3000 bp, Unknown; identical to SEQ ID NO: 3213
  misc_feature (1)..( 3000): 2750-1469P.txt file - cDNA_ID_2142875; gDNA_ID_2926182; Annot_ID_200343

SEQ ID NO: 23511 - DNA, 3000 bp, Unknown
  misc_feature (1)..( 3000): 2750-1469P.txt file - cDNA_ID_2142987; gDNA_ID_1620626; Annot_ID_162468
actaaccttggcttaatattttattggatctttcatatttcttgtgttactggcaaaatttgtagtatttcataatcttttctaatttatagatttttgtagatttttattttttagtcaatttgtggcagttctgagaaataataataaattgaatttataacaaaatagtagcaaggagccaaaggacaaagatctcttagctaacaacaacacaacatgtaatcataagaaagaaagctttttgaaacaaaaagctcattctaaaaagcaaactcatcacatggttccaaatcagaaccaagcacatagaccaagaacaagacctaacacaacataacaaccaccaagcctaactgagccgctaatgggagctggagccaaagctggaccatcttcgaattcaaccggagaaggagctggagagatgacactgtgacgaggactgatcacaacaaggctcagcttctgacctttctcacagtgaccattagctccactaatgaagtagaaaggaccagacctgtccaatttcaccttggtttctccatcagtgtagttagccaaagggttcgtggtgttgcagctgttgtaagcttcttttgttacttccaaaacagagtctttaccagattcataccggaaaactgaaaaagacagattgtgtcagaacagaaacaaagtctatgtcagaaacagagtattttttaatggtgggtaccaataaagtcgccgactttgaagcgagctttttgagcccactcagtgaatgagtaagaagaggaaggagggatcttccagtcgccggattttccaccgacggtgacttcatttgcagcggcgagtgagaataagaagattaaagagaagatagcaacgtgaagtgaagaagaagccatagatgccgatagaaacatagtattgagtagtagagaagctagttgcttggagtgtagtgttaggaatgttgttttggaaattgctgagttatgaggaggttcttgtgaggttttatagtggtgaaaattcgaaaactagccgttagattatttactttttgttttgttgtgaaaaaagaagaattttgaaaaggtaaagaaacgttaaatgtttgttactgtagccgttgcgagtgatgtaaccgttagagaaaatttgaaacaatgtaattatggatactgacatttgttgtgtgtgtcaggcaaaactatgagtgtttctcgttgtctcgcttttaattttgacaaaataattgttcgtgaataaacgtagtaaacaaagtaaaatctagtcattctatttggtgatggtgacgtttgggtattgccgtattgggcctattagctattggggtgatacgtatacacacctttacattttcggatatatttgttgagatcactcctggcccaaagaaaatagaaattttcaaaaattttaacaaggaatttacgttgttcttcttttttcaataaggatttcgaatcaacagagcaaggaccaagtgctaaaaccaattatcaattgagttatcttctttataacatttactagaacaagacataagctcatctatgactatgagaggcgtgtttatacaagggatttggtttaactaatagcaagaatggctcatgagtttaccaactaacgaggcatcaactcatttactcagctacatgatccgtttgtgcaacgtttcccactgattgagactattgtactgacatgtctagcatcaccccgtaaactatagtattgtttaggtgaatttggtctccctaaccatatatagggacatgaagaaaatgtcttgtgcagtttgtcagtcatattagtgtattatatcttgttacctccaataatgtcatatattggaaaacttgagaagtgatcagggccgatgaatgaaacattttttttatgtaatttggttaaaaagtgtaacgaaaaaataattaaagtgaaatctacttttcaaaatcgttaaaatgttttttgtgaacttcaaaaaatataaaaaatagcttacttttcatttaaaatgtctaaatttaatgtaaatattaaattagaaaaatgaatttatacatataccaaaaatcccagttttattttgtatgtgaccccaatattcttaaaaccaattaactttttcgacggaccaagtattccgtcgatttggttcaatatatatgtaacgaaccataatctacctttcgcggttgaatcggtagctaaaaaattatttctaacaaatataaaattacaaaaattgtatttttccattaatgacttaaaaacaaactatgatatctaagtgtgtactcattcaaagattatttaatttttttaaatgaagtcatggcaaaaggaaataaattgcaaattccgagtttaggaaagaaaagaaagcaaatcttaaataactcaaaaaagaatattggaagacatgtatcatagtcctaaacaaagtaacagatctttgggtcctcctttcttttttttcccttctatctgaaatccgacatcatcctcaatctctgtctgaatttctcaatagctatatcatcttcttcttggtcttagaatcaaagaaaaaccctagttcctcttttcccaagataaccaaactctctctcttctctctctgcatcattccctttcttctttctcgcatgtgcagagctatcaaacatctgttttgattgaaagctaagtttccaattccaaaacggaagaaattgaaagtgtgtatgtcaagacaaaccaccaaactacaaaagaaacaaaacccacatcgcattgttccttaaagacccagcaataagattatctcacgcttccttctttcttcctgacatttttctcgtttttgttttctccttatttggggtttttcctgcaatgtgggtcgcatttggtcataagtgattatttctagggattgtgtgacctctctgcttttttgagttaagcatttaaagaaacctctcaatg

SEQ ID NO: 23512 - DNA, 3000 bp, Unknown; identical to SEQ ID NO: 3118
  misc_feature (1)..( 3000): 2750-1469P.txt file - cDNA_ID_2142994; gDNA_ID_2214706; Annot_ID_136962

SEQ ID NO: 23513 - DNA, 3000 bp, Unknown; identical to SEQ ID NO: 3118
  misc_feature (1)..( 3000): 2750-1469P.txt file - cDNA_ID_2142994; gDNA_ID_2214706; Annot_ID_189839

SEQ ID NO: 23514 - DNA, 3000 bp, Unknown; identical to SEQ ID NO: 3118
  misc_feature (1)..( 3000): 2750-1469P.txt file - cDNA_ID_2142994; gDNA_ID_1620626; Annot_ID_162473

SEQ ID NO: 23515 - DNA, 3000 bp, Unknown; identical to SEQ ID NO: 3113
  misc_feature (1)..( 3000): 2750-1469P.txt file - cDNA_ID_2143028; gDNA_ID_2214706; Annot_ID_189849

SEQ ID NO: 23516 - DNA, 3000 bp, Unknown; identical to SEQ ID NO: 3113
  misc_feature (1)..( 3000): 2750-1469P.txt file - cDNA_ID_2143028; gDNA_ID_1620626; Annot_ID_162485

SEQ ID NO: 23517 - DNA, 827 bp, Unknown; identical to SEQ ID NO: 20522
  misc_feature (1)..( 827): 2750-1469P.txt file - cDNA_ID_2143120; gDNA_ID_1620749; Annot_ID_166735

SEQ ID NO: 23518 - DNA, 3003 bp, Unknown
  misc_feature (1)..( 3003): 2750-1469P.txt file - cDNA_ID_2143154; gDNA_ID_1620749; Annot_ID_166758
ggactttgatatttgtgtacatagattgcaggtttgatccttgtttctgagcgatttgcttgttggagattgttataatctcatggagtcgtaatctattaggtgttttcatgcttgattgttcactaaatcacatttttatgttttaagtatgttggtgttattggattctactatattgtagcttctgtggtccctggctttcgtagtttttagtaataaaggtgctttttgatatatgtaggtttatcaacttaagaatgtctaattatcaaggggatgatgctgagtacatggaagatgtggatgatgaaatggatgaggatgatttagatgaggattttcgtggggatgatatggctgcctctgattccgatgtcgatgagtttgactactctgtaagtattcctgtgtgaagtctaatgtaaatttgctaagctatttttaaaattcctgtgtcaaatgtatagctttaatgtcaattaataatttctgcagtctcttactctgttgtgtgggttctttggtttcagaataataaaatagctgacacttcagctgaccaagcccggaaagggaaagacatccaggggattccttgggacaggcttagtattacgagagagacatacagacaaactagactagaacagtataaaaattatgaaaatgtccctaactctggggaatcttcagggaaagtaagtcttccattctctatgtctcgtaggttttctttttcttctatatgtttcactaatattgggtttcaactgatacttatcatttgcttaatgaattcaggattgcatggccacacagaaaggggctcttttttatgatttctggcggaatacaagatctatcaaatcaagtattcttcatttccaggttcatattatttaaacatatctattttctattgagtcaatgtttttttggtaattccatcagtatgtcatgtgtttgggtaatgagggtgcacaaattgctacaactgtctacctaagttaaagcttaaaagatatggattcatagactatttttatgcggacatctaactaaagttgttttctttttattgtagttgaggaatttggtttgggcaacttctaagcacgatgtctaccttatgtcacaatatttggtgagccactattctactttgacatccggaaagcatgatgttctcaatgttcaaggtcatgtttccccatctgaggttagtttcttcctgaatgatataagattcctctataaatacctacatcagtttaatggttgttgtctttttcttgtgtgggtgcagaaacatcctggaagtttgttggagggatttacaaagactcaagtgagtacactcgcagtgagagataaatttttagttgccggtggatttcaaggagaacttatatgcaaggtaagctctagagttttacaatcatggatttttagtttttcacacaacaattacatgcattctaatcaaggaacttcatctttttccacattgattttattttcagcatcttgatagacctggtgtgagcttttgttcacgtactacttatgatgataatgctataaccaatgctattgagatttataacaaacccaggtatttgcatgtcttttgcttgaggttgtatttgccaacttgtctcttctaactgattttttgatgtctgtctgtctgcagtggggcacttcattttactgcgtcgaataatgattgtggagtcagagattttgatatggagagataccagcttgttaaccagtttcgctttccatggccggtgaatgtaagtccctactttttccttgattttttttttgtttttgttttggtataagttgatctgtagtgcttgtagcagtaagtttcagttacaaatacgttttgtaatctgatatcttcttttacattacgaaattgtaaatgtaattgcaccccaaattatttaacgaaagggggtttttgtattgatagcacacatctttaagtcctgatggtaaattgttgacgattgtgggagacaaccctgaaagccttctggtagaccccaacactggaaaggtacagaaacgatctctgtgttacgtatccctgaataaatatgctttctaactaaatttggaattttctacagacactggcaacgctatcaggacatctggacttttcctttgcatcagcatggcacccagatggattcacgttctccacaggtaaccaggacaagacctgccgggtttgggacattcgtaacctgtcaaaatctgttgctgtcttgaggggtaaccttggagcaatccgatccattcgctacacatctgatgggaagtacatggccatggctgagccggctgactttgtccatgtgtatgatgtctcaaacgggtatgaaacggagcaagagatcgacttctttggggagatctcgggaatatcatttagccccgacacagaagcactcttcataggcgtttgggaccgcacttacggaagtctaattgagtatagccggcgccacaactactcctaccttgattcatttctatgatcacccgacataccagaggaataaaagagccgatacatatgtgctgctgcactctcctgtcgctctgttaaactaagaaacccgagaaaagagaaaacataaactcaagtcgatctctaatggtgtaaatgatgtgttgtgcaagtactagtaggaatgttgtcacagagagcggatttagttagttaatgttcatttcttgtatgagtgttggagttcgtgtattgtacataagtatatgaggttcgggtgagtttgcatcaagtctcaactcttggcaaagagacaactttactcgagtctgtggctcgttatttggctatggtcacttgtagaggaactcaatttgagatgtttctgccgattgttggatcaaattatatatcatgatgtttcataatatttctgtttcctagactattaaagtgtatcaatg

SEQ ID NO: 23519 - DNA, 573 bp, Unknown; identical to SEQ ID NO: 1731
  misc_feature (1)..( 573): 2750-1469P.txt file - cDNA_ID_2143175; gDNA_ID_1620441; Annot_ID_157163

SEQ ID NO: 23520 - DNA, 3003 bp, Unknown
  misc_feature (1)..( 3003): 2750-1469P.txt file - cDNA_ID_2143213; gDNA_ID_1620441; Annot_ID_157177
gaagcagctttggttttcttgatgtccattttatgagtatatgtagtaactaaacttcacaatgtgaatttcttgtgagagagactagagaaggagaaagagagagagaaatgaatgttgatattttgatgagtgagaaatggataatgatagttttggtttttgccctaattaactccccaacggtccgttatataaccaacttcttctgatgagaaggagatgggttcacgtgatccccacgtggctctgccgccgtcttcgactctcttctcaccgccacgtgtgctttctcgtagatgctatggataaactttgcttttactacttttgtactctttcttctcttcttctattttgtcatttggataagttcttttaccttcttcttttcttcctttatacaatgaagatattaaactctcgtttttattattgatctttggcacattacactgacaacaatctctatcttcttcgttttctttaaattaaataattcgatcatgtgactcactatcgacttattctcgaaaatgtcgctttgattttattctaagacttgtaagtttgacttccattattatggagtatggactaaaggtttattcattgacatcctcaaatctcgaatattaaactttcattttaaaatcttttatatatcggaggattttgtaggaggataatggttattcgacctttttttggtttttgatgttataaataagaaaatgtctagtctattggtattgggtccgagaatgtcatttatatacggataatgttggatagtgaaacaaattttatgccgttgatgtggtttacaggaatgtaaaatgctatactatacatatgatcatttaacctatacaaaatataatggttcatctaagatcacaacagataaaaataaaaaattatttcaggtaaaagattgattaagagagtccaccattgtggggattaatttgtagaaacttctcatggaatctatttcccaccttattcttcgtcgacttatgatatagcacattcatttctttagaatatatatatatatatatataacctgatattgatattttggtctctctactaattaaccaataaagaatgtatatatttcatctttttaccggaaattccgacctcagccaaatatatatatctgcagattttttgacggtgaagtgaagctaaatcatatcaaaatagatctgataaattgatatattccaacaaaaaaagagaggtcgcaaagcaaagcaaagcaagctgaaatgaaacagtaatgaagcatattccacgtcaatctcttctttaattttgattgcgttttatcttctccaaatctagtaagattcgccgtataacaataataaaaaacattgggatataagaataaaaatcacttgcaattctaatttcggcggatagatttgatattccacccacatacatgcagacacatatatgccgacatcaagtgaacataaattttatcaaaaaagaagaagaacagaaatggctttcacatgttaacaaacagaaaaagaggacagaaataatgcatgcttagagtattcttatccactttgttggaccaacttcttatatgcttttatgtcgtatgttgtttaggtttcatcttaatgcagaaaatattagttatagctaacgaatttaaaagtgtttaacctattgtaggtttatattgttgtgaatccgatcattagtagtttacggttgcgaatccgatcatactgtcgacagattattaatgggagatgattctcgtgttaaatctccggttaaactatcgctagacgagttccaaatttatattattacctagaaaacaaattagataatattcggctccgatatattggggtcaaatgacttcaagggccgctgaagctaagaatcggaaaagtggtcagctaattaattcgaaggcagcaggagttaggaataaaaagtagataattaattcgaaggcagcaggagttaggaattgtaatgtcttctagagttcgaatagtttaaagtttagacgaatgattcgaatctatgtgaagttaatttatacacaaatattaattcttccactcctaaatctctcactcagtcactctatcatggatatcaaatcatggtgatctaaggatcggttctcgattcatgttttacaattgtgttaagcgtagtgattccactattcaacactaatatgtttctaaatctcacatgtgtagatagcaaatgaaactgaaattgagcttctaatcactatttaaaccaaaatgtaacgttttccctctattttgactcatcaaatcctaatactctttcaaatgtgttattttcattttgaaacctcttaaacaagaccaacaacacagtatatagtcgaataagtttgcacaaaatacgttgaggagctaattctagtaagttaataaaattttgtattttatcatactttcaactttaccgtacataataatacattaggaacctttttttaagaaaaaaaacgaaaaatactcataaacgttggaaatctaattatagactgtttagtagatgttgttcaaaaaaaaaaaaaaaaaaaaactgtttagtagatttataatattttgttttatttcatatttttaaacatttccatagtatgtagcaaaactatatttttttattcagaaaatattaatattcactgctctttttttttcttcaaaggaggaaaaagcctttatcatttggacggacaagcgctcgagaaactaatttaattcaaaaatactttttttttgtttttctgtcatttcgaatctgtctctaatctcatagggttcaaaatttggtttctgctgttctctcgagaaaaaagtacagttcccgcattgttcagattctctaagattcattcatcaatctgacttttcccgggaaaattcactgtctctgagtccaaacccgaatccagcgatgatg

SEQ ID NO: 23521 - DNA, 3003 bp, Unknown
  misc_feature (1)..( 3003): 2750-1469P.txt file - cDNA_ID_2143361; gDNA_ID_1620442; Annot_ID_157207
aaaaataaattttttttaaatgtaaaaaaaaaaattaatattttgttgaagaagttaaatataattctgcaatttgagagataacataagataaattttcacgtattagtaagtaaaagtgacaagttatgttttataaccaggtgatttttaaaaaatgaaatttgttttgatgcaatatcgtgtgaaaagtaagaaaactaatatatgcaataccatatttaaattgtgaaccttattaatttcacctaaaatgaaaattggaaaactttttcatgtatttgatagacttgtgagtttgaattgtataaatttccggcaagcaaaagcagctcgtgtaccaagttgtcggaaactttaattttgttagcatgcattggactaaaccaacgcaaatattttattttatttatcgtagactgaagacctaaagagtaaaatgaatgtgaaagtgacacgttgtgtggagtattttgtatctaactaggtgtgggaggtccggttatggaaagctaagaaaaccgagacaccggacaacaaaataatggtatcaacatcacgggttactctcttctgcggtttacctataccggaccatgttaaagatgctccagacgagctgaagaaagttatatccaaattataaattcaaattgtatctatctcattttgttaggaataagaacaattttagtttggttttattgtacgaaccaaacgttttaataaattgttgtaccaaacatgagatattataaggttataaaaattgacaagttattgtgggtttagtttgtagatcattttgaaatatagtattaatagactattttgttgaaacgtccaaatcgtatagatggggtaacaaaactaaactcctttatatgattcttttgcataaaattctgtctttgtaataactgaatcatacatacttttttagtttgatacgcataatataattaccacaactatgtagtgcatttaagatatctttcttcatattataaatgtgtatcaataccatttaaatcttcgtatacaaagaaaaaaaacaagatggatattagtttttcgatggagatattatttggttgagttctttcttcttgagacaacaacatccagtgtggagtctaaatgttccacaataccatccatttgtatacccgtggcttaagcaaatctgatcacatacgcttgtacactcggaccgataacacatggcgtcatgaacgtcaatagcgtttattttagctgtaaaagatatcataaaaatctattatatatgatagatcatcatttatgtttatatttagagagctctacattgagattcgatcacgatcaaacggtaaggttacttcacgataaactaacgaagatagtgtattttgctgaatgatgtaaattatattaaaaaaaaatataaggtatatatataaacaaacgaaggtaatatggtttagatcaagaaaataccctaatagaaatcaaaaagtttgtgtatatgttttatgaatttgtaaattgacttaccggccatcgcaaacaagagaacaattgttatggcagtcagtatatgtgaatgtttctggttctgcatttttttgttttgaggtgtcactagctaatagctattactttgttttctctttgtttttagatgtatccattgagattaaagtgctcttatataggggtttggttttcgcagataaaattaatcaatttagctggattttattctatacccacaaaataaatttataaaagctaagatataattttgatatgatggttcatgaaagtgtcaactttggttagatttaaacctgcataacgcattatgaaattgactatatatatattaagaaagagataattctcatttaatttttagtaaaataattactcaattttatattataccagaaacaaagtgggttcaaaaattattaaggctatatcatatgtaaatacaattaagaaacatttatgtaagaaaattagaaactgaaatttcatatcaagaattaacaaagaaaacattaataaaatttcttgttaccttaaatataccattttatttaaatgaacattaaatcatagtattttagatttaagaaaaaagaactacacagaaatttctttaataaatctaatatatatgaaaataaatagaaagcactactgaaagaagatccatataaattaaagatagtttggtcaatgccaatcatcattttgaaccaaatccacatttaaggaaaattgatgttattctttaacccgaaaacatgttcttgtctttgcacatgtgtctcgccctattttttatttcttcattcaacaagtcaaaatgaatctattttactacatgatctctataaacgaatgtcataaagattttatggccttcaaacttggtctcaacatcgatcatgtatatgattatctgattcatccatatagaagagggctaacccgccccttgtaccttgctttggccttaaaaaggttttcaagaatttactttctttcttatttgattttaactttgtaaatgtcacatttttccgttaattaattctttcgctgagtgacaaatatgttaatatgacatttatcatcaagatatatattttatcatatttttgatacatgactatcaaacaaacgtcacactattggtcagagattattcgacataatccataagaagttgtaaatatatcatcaagtgtgaataaatgtatataaatattattaaaaaaaaaaattagtagttgctttttcgcgattcgtgcgaatagattctgatgccaaatttggatattattaagagcacatgtttctccttgtgtcgtgtcttttatttaagagagaatcatcatctctcactctcatcttctagaagttaaaacatcacgccatcttccgaattcaaacgccgatgttctgtcgttttctgtctcacatattggaacgagcgtaaagatg

SEQ ID NO: 23522 - DNA, 3003 bp, Unknown
  misc_feature (1)..( 3003): 2750-1469P.txt file - cDNA_ID_2143376; gDNA_ID_1620442; Annot_ID_157212
gactcaggacataggtacgaagcttcttttatttagtatgtcacagttgaaagaatgtcttgtatctttttcggaatgcagttgtcattgttttcgccttacaaacacctgcactcacttgcttgtagatgattaagcttattttgtgactgtctctttgataattcctttgatgccaaactctttctcctactgttttttgctctgaatgttgtgttgcaaaatgcctatatttatgtgactatgatgaatgcttctctcatgcttttagcggatattgtttcacttctaaacatatgcactcacttgtagactgtttaagcttactttgtctatgagaatacttttgtttgtcttgcatagaaaagtactgttatctttacatttcacgataagagctagaacaagatacacagttagtgcttgttttgttgtttaaactgaggcttatgttcatgtcttgtacttgtagccaacctaacctacaaagaaattgctactgtaacaatttgaggatcttgtgtgaaaatacgggtggacttgtcaagccactctttcttttcttctcaatcgaacactattattatccaattatatactctctattttttatgattcaattcaagttagattccattatgcacagaaaattaaattgatcatatgtccaaagctctactgtcatttttgaattttgttgaaattttgaagggttaacttattttgtgccattgaccactatgatgcatttgaaagactttttttttgttgttgaacatacgtgattactagcttcataggaagaaataagtgtaacaaaatatatatatttgacgaatttttggtcctctactggtaattttgagttgtgttgtagaaatttgtggtgactcaaaactattgttttaaggctcattaagattcaatacaaatgaattagataattctataaggcccattaagattcaatgcaaattatttagataatttctaaaggcccactaagattcaatgaaaatctgcaagtcggagtagaagcagaagaaatcgactaatctcgccaatgtcgtctccagagaggaagaggaagaaacggtcgcttgaaccgtcaccggaatcgaccccaaacccgtcacttcccgatgatttgattgtgagcatcttagcccgagtctctagattgtactacccaattctctcgttagtctccaagagctctcgaaccctcgttacttcgccggagctatacaagactcgatctttcttcaaccgaacggagagttgtctctatgtatgcttagatttccctcctgaccctaacccacgttggtttacactctaccgaaaacctaaccaaaacatcaccgagaagacaaagaactcaagcgggtttgttttagccccaatcccaaatcaccattcacatagttcgagtatcgttgctattgggtctaacatctatgccattggtggatccattgagaatgcaccctcttctaaagtctcaattttagactgcaggtctcatacatggcacgaggcaccaagcatgaggatgaagcggaattatccagctgctaatgttgttgatgggaagatttatgtagcaggaggcttggaagagtttgattcatctaaatggatggaggttttcgatataaagactcaaacttgggagtttgtgttaagccctttagcggagagatttatatataggagcttggtgattgaaggagaaatctacatttttggggataaggttgtgacttacaagcctaaagaagatagatggggaggtgtaggagaacatcagagtatggatttgggattgttttttcattcttattgcgtgatagataatgtactgtattgttatcgtcctggtggaatcaaatggtatgaatcagagaaaagatcgtggaggaagttgaggggtttgaagggattgtctaagcttgctagtagctgtgttaagttagcggattatggtggaaagatggctcttttgtgggacaagtatatcccttgtagtgggaataagagtcattcgatttcgtgtgcggtggtttcccttgagagatgcaagaatcagggtattaggggaaaggttgagtggtttgatgatatgcttacggtacctagctcttataactttgtgggtgctcttgctgctactctttgatgatgattgccatacgaggcacacacatttgattgtctagctagcttacagataattgctttctatgttgtaataacttaatgatgggattcttcttaccatattatttcaaaatgcaactggcttcatttccttcttcatttttgttttcttgtcaagatcaaacaaagattattcagttatagcgtcttttgttgtctagaaatcactgaactagtagttagttattacaccttcaccggttgaaacaacaacttgatgggacagggaagtgagaatcttttttgccttctcggtcttagaaagaatgtacatttgcgatgagagtaagagcaagaatttaaaaaagaacaaagaggaaaagccgaagaaattgacattgtttttgcttataaacatttgcagtcacttgcttgttgattaagttgattttgaggttaattgacaactataacaaatcagaagatttaagttgcaattatgtgcgctaagctaaggcttttagactcttatcatcatgtagtaacatcaagccaagtgccaatacctttatatagatacttcctgaatacaacaaaattggacacaatgatctgagtttcatattatataatataaattaactaaaccgatttctcaaccacacatttgctaaaggctcaatataaattaattaaccctaaatccttcttcttcgaccttttatttggcgccaaacccgcagttacatgtttttatttcccgctcgagcaaattgatctgatccgagtctttcaagcggggagagaaagagagagattcgttagtacattgatctaatg

SEQ ID NO: 23523 - DNA, 3000 bp, Unknown; identical to SEQ ID NO: 1746
  misc_feature (1)..( 3000): 2750-1469P.txt file - cDNA_ID_2143390; gDNA_ID_1620442; Annot_ID_157216

SEQ ID NO: 23524 - DNA, 3000 bp, Unknown; identical to SEQ ID NO: 1757
  misc_feature (1)..( 3000): 2750-1469P.txt file - cDNA_ID_2143478; gDNA_ID_1620444; Annot_ID_157253

SEQ ID NO: 23525 - DNA, 3003 bp, Unknown
  misc_feature (1)..( 3003): 2750-1469P.txt file - cDNA_ID_2143501; gDNA_ID_1620444; Annot_ID_157259
ttatattccttcttctagccaatgcatcaaacagttccaaagcaaaatcctttgaagtcattcctacaataccaaattttcattcaatcagtacaaaaaaaaaacattctaatcacttttcaagattataacattagtctttacctatgcattcaccgaactttgtccgaagaagtagtccaccggtagtcgcggtaatctgattaaaccgcttctccacggcagaccaaccggcgccaccgtcggttttactaatgaacttaagtcccttcaacgcttgactcgcggcggatttagtccggtctaacttagccggtcgaggcggctttcttccaccaataccaccagaaacagatgtcaaacgcttaagctcgtgagaaacagacgccaaacgtttcaccaccgttgttttcttctcaagacggtttcgtttcagcaaagtaagctccggactctcttcaacgctagatccaccttccattttcaagctatgtacagagactgtatcgtcttgtacatctaccgtgaggtccacgtatggtgccgtacgtgttctctgactgttctcagcagtgaatctggagttccccggttttttatagatcggtggtaattgaccaccgctcattggtccgctgtttccggcttctgcatcagagtgatagcctcctgacacttcaaaactcactctagacattttttaacacactctacctgaaaattttctcgtcgccgctaaatttcaccgggatctcaaacaagagacacaaaatgatgaagaatttgttgtctactggttatggtcttatggaatctctcactacttttttagaggaaaattttgtaaacgcagagacaacatttttcccgagaaaatgagagaatttttccgggaaaatatttgatgttattcttctctctgaaagtaaacgatctctcaagtaatttttgataggagaatgagaaaatggattcgtataaatagtgaagagaagagacgagtaaaagaatttgaataaagaagagagacgtggtcggacttggcccaccaactttgtcatctatgatgcaaaatatttaacaaataacaactaattgaggttgtaacgtgcatttgtaatgcaatacattgagaaaaaaacaaatattatacataacaaagttgagtttttttcactagttgtttatttaagaattagaacaatagtccactgttttttaacaagtccatagcgaatgttggaaacttattttaaaaaattattaattggaagtctaaagaattacgaaaacaaattgtatttgattaaaacaaagtacaaattgcatttaaaaagaaatagtctatagaacatggatgatccttccatataaagtttgatcatgcacatagtatgacaataatcaaagagcggggatagctgtgaatctttagcagcgaaaacttcaaacatatatttcatgaatacaacaatgttataaaatgaatttcgtacgacataataaatgttatagtaattcttatgtttgtccaaaaaaaagaaagtaattcttaggttaaatatataaaaacatgacaaaagtgtaactattaaagatatttgatgtactacatatatataacaaattttatcaaagatgtacatagacaactatgttcttaaaactccacaaacattacggcagttagaatttaaatttatcttggaatattgtttgtatattattaacaaatgtaaattggtgtaggttttcagattttcataatgaaaacagttttaaattatggttacgagataattttgacgaatatgaatacatatatagaaaatgtttgggcctatatctatgaaaatgtttgggcctatctatatctatgaaaattgtatgagataccaacaaaataaaatatttaaagtagcaaaacattgtgttacttttctattatcttgtcttaaataaataaaaatcaattttttttttaagaagtaacacaatgtgaagaatacgtgtgtacttttttttttttggcgtaaataaaattagtaaattaagacaagattaatagaaaagtacacacgtattcttcccattgtacgttaaaaagctcgtgaattcacatgcatgaggacgatttgggtaaccaataagttgactatatttttgtatgtctttctatttttcttcacatggaaagaattttccaacgaaaagttgaaggggagacaattaggaacactaaattgtcaccattaggctcttaagttttaatttggcaaccaatttcattttctctattctgtatttttggattgggaccgttttatttgtttgtgtgtgtgcaacttgagctcttcttctgtaacacgcatgtgttgcgtttggtttttaatttatttgcctacttttgcgttttcaacgtttgttaccacatttgaactataaagtccaattccataccgatcctctacaaccatataaatgtgctacaacaaaagttaatctttgatcttgatcaactcaaagatgactatacatgattagttctcctaaaagctaatgttgtagagtgcaattgccgacaaacctccaagttttgtgtcaacttgaatttgtacttaattgcaatctttggaacgtgttcattcgaaaacgagaataaaaagaaaaaaacatgactacgtctataacaagtaaacaaaagacaacagtgaaaagaatcttatcaaaagttcaaaacgcaaacgtggctaaacctgtacccaaacagtcccataagaagccagaatcaaagtacactgtgtatataaatgagcccaacaataaccgaataaacaaaaacaaaaaaataacgttgccttgacgtgtcatcttactccatcccttccttttgcttcttctcctttacttccttttttttttctttccatcattttgtcacaaaccggaaaaaaaatctcaccggagaaaaaataaatctcaccgacgacgaattcgatcatg

SEQ ID NO: 23526 - DNA, 3003 bp, Unknown
  misc_feature (1)..( 3003): 2750-1469P.txt file - cDNA_ID_2143519; gDNA_ID_1620445; Annot_ID_157277
ctccaacatttgtgagagagggacccatcgtaaacatcacatcagattcttaagcttttcatttcttttgatatacaatttttggttttgttatttgtaataataataataaaaataataataaaatattatatttttggatctctatctcggccaccggagaattgttctgatttgcttccgcaatgcaattttgctggtttggtacagtttctgaaatctctctctaagcatatagcttctagatatctttgcgtcgatgatgctgttgtgtcatttggagttttttcggactgtgagtgtgcctgtagacagatggtgatttggttagaaaacgttcaacagaatcttgaactttggtgctcacgttgttgactttggtgctttacttatagtaaccatggtttggtatgtggtttactatggtcggatcctactggagacgtcaaagcctggggcatgaatgattgtggtgaatcatagacttttggagctgacaaagtcgcagagttttttgaaaaaaatgatatggaccttatctgccgtgcccaccaggatttaacttgagttatatttgtcattgagtttattctgaaaactgttcaaccttaaggtgagtatcttgactatctatatttagaccatcattattggtgattatattgatttttatgttaagaatgactcttatataagagccaaaactatccctaagagatggacgtgtgtcaatttttaagtgggtgaactatttatcagaagaaaaaaataaactttcgtgttctcttctcacttcctctcaaactttttgtcgactttctctctttctatcaacgagagccgatggcgataccatcgtcaagtaaagtacaaagcttttcgatcttattcgtatcctttaccggcgaggattgtctttttctcttcctgaattacactctctttttttaaaggatccatctttgatttgggtttcgttttttcttttcttttttggttttaagattcgaacaacattcaatagaaagaacttgttgtcacccccatcgagttgttttaatgtgtattaggtatagttaaaatccctaattaaagtctatgagttctcctagagattcactaagtagtttgctagttgagataacttcgcaaaatcttgtctttggttctgaaaaaagtggctgcttccacatggattctatccaagagttgtaggaatctgctaggtcttgtcgaccaactttgctttgatgattcgatggttgtgtatcccaacaaataagaagctttgattttcttttgattttgctctggtgcaaaacagaacaagcgattttgctggaacaatcgtgtgacctttttcttgtcaaacaccacatcagcttagacgtgtgttgattgttatccgactcatgcaatgcttgagtccgttcatttgcttatgttaaacgtatggaattttaagtaatatctttgactttctagaatgtgttcaatgtgtttttgttgttgaagacatcaactctctgtcttcactatgcttcaaaattacatgcgttcttcaacgtaattggatttggtgaattacatacactgtgattatgaatctttgttttgcatttgagaagttgttgatgttgattatgaactcttttttttttaagaaccccagtttaaatactaccattggacattgcctaaaattttaattcttacctaagctcttaacttcaaaattttcaaattcagtaatagaaatattgttaagagcctttgctaatatactaccaatattgttaagagcctttacatggctttcaaacaagtagaaattaaaaacttattttttcttctccccatgatgattaaaaactctctacaactttacatatattttttcgcaaaatcgtttttgataaatgaataatatcaatttttttctttcttttaaggtctattttacaaacaactattttctttttatcatcaccattaatgtgttcatacacgtcattcaattatttcattaactgcttcatcattaatagtactcaatatacagctactcactaaaaaaaaaaacatttcaacaattaaaaaacaattttttaattagcgatcattttggaactaatttgtgtttgaaacacggcaaaaatagtttggataatttgaagaagcaattcaacatttatcattataatctcaaagttccacaacacccccgcccccaaattttcttagtttatctcacttcttatttggttattaaaaataaatgaatgaataatacatatccaatttatttgttgagaatatttatttagtcatttatttaagaatttctatgatgttatttttattattattaaaatttatttttgttactatgttgcaacataattcaattttaacataatttatattcataaaaaatattaaataataataaaaattgacattcacaacttctacagtttttagttactaatcttaactgtaaaatttttgtaagttgaaacctctatagccaaaattaaccactcaaaccaataagtcccaacatccacattggttaattttttatgggtgtctttagtataaattagtaaaactgaagacatctttcttttcagatgtttaaaatgtctctaaaaatacacaaaactaatattaaagacactctttattttattatcattatttttattagttttatatttaaaatcatccttcaaaaattaaccaatgtgaatgctataacgaattatatattaaactcgattgtgcttgtcccagagaacaacttatttgattatctattcttaaaaagtaatgacgtcagctttcaatatttcacgttttttcaaagagaaaacatattatatttaggtaataaacaaagcctgatcattgatcaatgcatgggatctttttttgtattataaaaggctactctgtgtcatttgcatctctccactttgagcaacaatggcatcaatg

SEQ ID NO: 23527 - DNA, 3003 bp, Unknown
  misc_feature (1)..( 3003): 2750-1469P.txt file - cDNA_ID_2143537; gDNA_ID_1620445; Annot_ID_157282
attttctatgcaatatttattagttattattcataaatggtaaactttaataaaaataattaaatattattggtgaatattattggtttaaagttataagaaattgtaaattacaaaataatacattttaaatcaactttaatatgtttaccttaatatgtgtgtttttcctaaacaatcaaataaaaaggaacagaggaagtaagacttttatatctcgttgcttctaattcttaacattaaaaagatacgcccatcaactttcttattgaagtctagatagcttttaatatttttgaattgaaaagtaattgaaaacaatgaatataaaacattcacgcatcataatcatacgacaattagtcaaatttatgccatgatgaaactaccaaatccaaaaatttaaatttggaacccgtttggaaaaaaaacaatcatagaaaatatccaacggatcttagatttaggaattttgcacatcggataatacttgaacaaaacccgaaaatagtacagtaaaaaactcaaagctaagttaacttattaaccatttttatatggaaaaagttaaaaaaaatttacgtacttttaaatttggaacgtttaaatcctatgtaagaagataaaaaaatcgtaatgcttttgttaactttaaatttaaataagaaagtttggttaacaagccattttagtcatgacgttatgtaaactaacagaaaacctttacggtgttaaaatctcgttagtcttctttattatttctaaacaacatcatttatcgtatagagaaaacgacgtcattttgtcgatttaaaaaaacaaaaaccttaatccctaaatcgaaactcatttttccctaatcgatttctaatcctagaatctttatgtctctcttttgaaattccgattgaaatggttacaactcgtgggggggggggggaaggggggaaggttcgtcttcatcggtcacagagactaaatgaaacagcagccgtacaaaatgacgacacatgatgtgacagagcttgaactcatcaaaacatactgaaaggaagaagtctcgagctaatttcaacatagagatctttggggattgtgttttcgatttgggaaatttttagctttcagggattgttttttcgatgtggggattttgtctattttcatttatcaatacgacttcgtttagtgtacaataaaccgatgacgtttagccataacagaaacgactaacgggattttaacaccgtaaagtttttctgttaacctacttaacgacatgtctaaattggcttgtcaaccaacattgtcatttaaatttaaagttaacaaaaactttacgatttttttgttatcctcgcagttcatgatttaatcatcccaaatttgaaagttagtgatttttttgacattttccccatttttatatagccttaagtaattaagatattttcgagtatttttggatagctttttcttatcaagtttttcggttaattcaaatattttggagtactttcgaatacttatgagtagtttggatttctttttgaccaaattttccggatgacagatatttgaatgctcgcttgggttagcgggaagtctaagtaaagaaggaggcaagcaaatgaaattcggatatgttgtagagtatttttgatatttcctcatagttcttttaaccttaaacatataaaaaaaaacacaaaaaaatatctgaaagtttgaaccctatctgaaacaaacgtaaatattatagatacccaaacggggctatgagcctcacccaaaaacccgaatcgagtccaaaccccgaaccctagtgaaaagcatttgcagtaaaagattataaacatgaagtaataaattagttggaacttataatattgatttatatcaccagttccccacacgcaacgtggtttctttcatcaatctatatagtattataagtagaatgtgtactctctttccaaataaactaggaggattcaaaatagatgtggaggctaagacttggaccgaaggccggtgaggatactcgcttgttcaccaccaacaactaattaagccaggaggcagatttgggtgttgaataccaactcaggatctccacaagaaattgccgagatagagaacgctcgtcagaatttttcaaacaacatgtcacgtttcaaaacgatgcagatatatatgtaccttaaaaaatcctagatatacgcaacttgcaaacaaagcaataatttgttatcaaagctagttagtttttttttttttgtaattccatatgccttgtttttgagattaacaagaaaacgacttcttttttttcttaaattctactttccatttctctcaactctcggaatcacctatgctgattctactcgcacattgcatatagttcttaatcttaaactaggtacggcgaacaactttcctatagatgtctacttggcttataatatttttgtattgaaaaactaattagaaagatatgaatatcgttaagcaaatataaaacaattactaatacgtcaagaagtcaaagtgatgacaatgcgaaacgtagttgcttacgaaataaacgttaaggaataaaattatttgagaacttataatttatattcacacccgtttctcacatgcatcgtgtttattaacaacaatctatataatattcttttctacgtatttttgtggttgatgtttaaaatttttacaaaacaatttttttttttttaatttttgtttttctcaaaactaacacattgtttataatctattataactcaaacaaaccaataataaaatcatttacataatagaaatcatcaaaaataaaaataaaaattaattggtttgtattaaaatttgaaaacataatttaattgcaagaaaaaaaaattcctaaaacatcgactataaaaaatacgaagcgagtataaagtataatgtgtcctccttgtccaagtaaacttagagcaaccttacaaaatg

SEQ ID NO: 23528 - DNA, 3003 bp, Unknown
  misc_feature (1)..( 3003): 2750-1469P.txt file - cDNA_ID_2143560; gDNA_ID_1620445; Annot_ID_157288
tgagttccatgacttcatcgagattcttactgcggaaaactggtcgtcagaagattatttggaacaagctaataatgtgaaaattgataaacgaaagatcaaaaataagaatgtgattgatagttttatatcactaacaatgagtttaaaatagatccaaatgttttcatgacaacaattagattgataaaagaaaagacaaacaaaaacagttagattgactaatgaattggtttgtctctggaaatgcagcatcgcgtaacatattatattaattattatttttggatcaactaacatgttatattaattaaaacaaaattatatatatatataccagaatttctattaactatttcacttattcacttgtttgtttatgttgaatatttttctcataacatgaatggctttttcaaatctatatatacatttttcagccattttgtgaaataaatcttggagttggaacttatttacaatggctgccactggcttttaattattgtttttttcagcaataaattgattaacaaactaaaaacattccaaatatattccaatcccatatatcacgcagatttttccaaaatttgaactagattttggcaactatttaaaacaaaaatgtttgacaacccaaaagacaattgcaatcccttaaaatgagcaaaacgcaactaaatacatttattatcaattcactaaatcttatttctccaaaatttgaactagatttcgacaactatttaaaacaaagttttgtttgacaaactaaaacacaattgcaatcccgtaaaatatttattttaattataaatttaaattagcggggtaccgcggttttttcttacagaacgggtttgacggaacgggtttggaaggacgttacttaataacaattgtaaactataaaataaaaatattttatagataaatataatttgcaaaattttatatatactaatttaaaaaaataaattgtcggttaaaatctagttttactattatattctaaacaaagcgatattcactgattttcaaaacttttccggatattcattttttctagagaaaagtggctcacgaatattggtgtttcgcaaaatatctataacacaatcctactatgtcgtgaaagattaaaagaagttttaacatacgtttatgtatgatatattatatgtacttttgtaaaatatatatatatatatatatatatatatatgtacttttgttttatagatttggaataagataatcaactctatttctcttttggtagttcttaaacatgatatgctaattcagattacaacttctattatatgtacgtacatatatacacatcgatgtatattaattttgttagtaaatagaatgttgaaagtcttataatattttaaaacagaaataatacatagaatgattatgaagagatagtggagaccttgaagtttttaaccgacaaaattttgcaaatcaaaatatcaaaaggaagaatgctttcctaaaaaagaatgattactggtcaaattagtcggcaaccggtaagtaagcaaacaatcgggaacgtgttactgttacagtgttaccataacgtgtaggttgggtaacacaaaggtaactgtgaattggcgggaacaaaaaaaaaacttttgtcgtaaaaaaaacaacaacaaaaaagttaactttgaattcttaggacatgttaagaaagccttcataacatatttgtttagttctcaaataatgtccgtaattataggaaaataaactttctggtttttatcaatcatcaaaatagaacacaacatagctctttaacacatagttgtaagaaagatagtgctccgaatcttcatagatttcataatctatacagtgttgactgtttgagaatatgaaaggatatgcatcaaaatagtgaaactctaaacaccaaaggtcaaaggaaaagacttgaaaccaaaaacaaagagttatatacactgcgagaagctgatcgagttaacttcgtcgctggcgatggaaccttttactcatgtcaccaaaaatcatgcaacaaggacgttttctaacgattgcatgtatattgttttgatttgaattgttaacgttaggcatttcaaacatatatattatcttctaattttctgatagcatacttattacgttgttatatagtataattattcaataaactatatcttcagtatattctaaacactgttttataatgtgaaatatgattatttttgttgtttataatatgattttctaagatatgtatttcttactatacaccattaattggatgatttatgtaattatcatgcaatttgtagcttgacgtttatagagcctaattttcaatcttcgaaaacttatatatacttctaattgctagcttctgcaaactcgattctgattttacgtaacatatgctaatttatgaacactgactgtcgagaatgattttatattttctttctatatacatatttaaacaaaaagttttttgaccgacaaaattttgcaaatgaaatatctaaatgaataatgctttcaatataaatatgatttatggtcaaaatagccggaaagtataaaacaatccatagggcactcatagttgtatgttaccatttacgagtaggtggccctgattctaaattaacaaacatatacttaagctctttataaaaaacgcgacataccaaccaaccaattataaacataagtgtttctcgtattaattttttcttatgccggcatacaaaccaagtaatggagttatatatcttggtttcactttctaacaatcaatatactatcaaataatgaatatacatattatcacttgtcagccttattagtagacccacacaaattccttttcatttccaacagctatatatactaacgtcctttaccttcattttcacatcaccaatccatctaagatactataactactctttccaaaagcaattttaaatg

SEQ ID NO: 23529 - DNA, 3000 bp, Unknown; identical to SEQ ID NO: 1766
  misc_feature (1)..( 3000): 2750-1469P.txt file - cDNA_ID_2143584; gDNA_ID_1620446; Annot_ID_157299

SEQ ID NO: 23530 - DNA, 3000 bp, Unknown; identical to SEQ ID NO: 1774
  misc_feature (1)..( 3000): 2750-1469P.txt file - cDNA_ID_2143588; gDNA_ID_1620446; Annot_ID_157300

SEQ ID NO: 23531 - DNA, 3000 bp, Unknown; identical to SEQ ID NO: 1773
  misc_feature (1)..( 3000): 2750-1469P.txt file - cDNA_ID_2143603; gDNA_ID_1620446; Annot_ID_157304

SEQ ID NO: 23532 - DNA, 3000 bp, Unknown; identical to SEQ ID NO: 1769
  misc_feature (1)..( 3000): 2750-1469P.txt file - cDNA_ID_2143607; gDNA_ID_1620446; Annot_ID_157306

SEQ ID NO: 23533 - DNA, 3000 bp, Unknown
  misc_feature (1)..( 3000): 2750-1469P.txt file - cDNA_ID_2143615; gDNA_ID_1620446; Annot_ID_157308
tcttgtgtcaataacggcttgttctacagcttccgttacttcgatcattttgcgattaaatactagatcatttctgcatttcaagattcgccataataaccaaaatgggagtagactttgaaatttgacaataacatcacctatttacttatctcttcaactatataacaactatactacatcaataaaaagaagtcgattagaatgcttgtgtttttgatgtactttagcacataagataagacttaattccctaattttaatgtattttttctttggggggcaaaataccttgtgttcattcattcaaacggataaaacattacaaagctgaagggttttgccaaattaaggcttgatacaacaagtctaataacgtaacatagtgcaaaaatagatagttcgacaaaatatccaaaagaactcggagacgggagcaatatagcaccaagtcaaattccggtttgatgtacatgcaggaaaagcatatagattacataacctttttcactgtctccatttgcgatgaaatgtttttcgtctgcagatatccactgggactaggttattcatcatttcaagcatctgattcgcataaacatttgcaacccaagcgataccaaaagtaggtcctttggtgcgaagaatatcctcgcaactatgcatgtatataatatataggtgtgtttaaccatatatatagaacaaaacatccattgtatctgtgaacttagaatccacattggtgggctcttctgctcgttcaaaccacttttttaaactccaaaaaaaaaaaaagttccaatcagaccaaaacacagtttaatgttgaattgttgaccatgcaatcaaacattacacaagatatctatctgtaactgttttgcatttaagaagaagttgttctgaacaatttaaaagagagaatcaaacgacaaattatttatccaaagattcaagaaggaacaacaacagtttgcatcatgttcttgaattcgaaaaagtcaacgcgaccatcatgattactatcaacagagacaatcatcttctccacttgttcaatctctcctgcttcaggtaatccaagcttcttcaaaaccttttgcaattccacagcggagataaaaccatctccgtcttcatcgaacacattaaaagcttcttcaagatctgattccggagacccatcacagcaacttccttctcctccaaagaaagattcgtctaaggttttgtggagtgcagcaaagtcatcgaaccggagtccggttttgtccggtttgatgaaagaatcaactgttgacttgagatcggagaaatcagcgtcgagaccgagtcttgagagtgcttgacttagttcttcgacggttatgaatccatcgttatttttgtcgaataggtcaaagactcggtggagacgaagagcgtttagacttggacttcgtagtctgaaggaagaagattgtcttgagagtttcttcttctcgttattgatctccattgttactcttcttcttagtttgttcttggtggctctgtttgatatagtcggagacttgagaatcacgaggcagagactttactctattattatataatcaaagacttggaataacgaggcggagactaaatagataatatacaatatgactaaaataaggtatgggcacaagtacgcattgttcggcaattactcgttactagactcgtatctgtctcgaaaatttaagtaccctctagagataaagcggataacaagtcggttaattttattatttctaagcccaagtcaagtatcaagtattacaatatttgttgatatttgccaagttacttgcttcgttttgatatttgtcccgttattcgttatttgtatttgtgatttgttgttacaatgttacttaatgcttacttatttctcttttgaattttgatttgataatgtatagattttgatccaaaataatatctatgaatgttttgtaatataaatgagattgttgatttgtttctactaaggtactttgcaagtaacaagccgagttttgttatcttccaaataacaagctaggttaagttacttgcaagtaacaaaattttggacaggtatttgttatagcaagtacttactcaaacaagtcaaatatcaaacttcaatttcaattacttgttcgggtcaagacgagttataaatacctgaaaaatagcaagtatatgccttgcacctacgcataactatataacagaagcacataatatttttttactatgagcacaaaatttttaaaatgtccctttccataaaccagtaactttttttggctggaactagttatttcgaattagttaacatatcgaaaatcaataactttataagccagtgttcaaaaaatgctctagatacttattgggctgtgatccaatgtctatcacttaaaacatctaattgaaaattagacgattttaaattttgagcgattaaaatgtttacaacatgcataaaacattgtaaatatgttattagttattagttattacatatacaaattatacaaatacatgatttagaaaaataaaaatatcaaatcataaacaaaatttagacaacatctgaacatttaaaaacatgtatatgaaagtaaaatttataaatttaaatcagtgtagttagaaattgaaaaagtatactcaaacaaaacctatacaatttggatagtccgagaccaataataacaaagccactaaacccgaaaagcccaataacaacaaatgtcgtcttctcttcacagcccattcgtttccattggtcacttccattgccaccacaacaaccaaaaccatatctcgccgccgccgtcgacgacgacgacacttgcttcaccaccgtatcgctatcaacagaggaaagagataagaagcgtgttaactctttcttctaattccatggatatttgtggcgttgattccgaagggaaagagtttaatagcgtacaagagatg

SEQ ID NO: 23534 - DNA, 3000 bp, Unknown; identical to SEQ ID NO: 1772
  misc_feature (1)..( 3000): 2750-1469P.txt file - cDNA_ID_2143641; gDNA_ID_1620446; Annot_ID_157315

SEQ ID NO: 23535 - DNA, 3003 bp, Unknown
  misc_feature (1)..( 3003): 2750-1469P.txt file - cDNA_ID_2143645; gDNA_ID_1620446; Annot_ID_157316
cttttaccgaggcttcgaatcggagttgtaaatataacatcaagaatgttgtgaccatcactggtaactataggaaagtctcctccaagagggccttcattttcaacagaagctcttctccacaccttttccaccaagtaaaatacaatgactcaaacaaggcttgacacaatcgatagaaccaaaagcccgagaaagcatttatgaaagaagcagattcacacctctgcatcgcctagatacaagtcatctatctcctcagctatggccaaccaattaagctgcaatcaaagttcaaggaataaaagttttgaatcatatcaccaagggattaaaacgaagttcatcagtagaaatttacttacagattgaactaaaacagggatagaaccttcaagaccggctttgtattgttcttcctttatcatgaagactgcctcatcagctacttttacaatagactgtattgtaaaatctctcttttgtcagcccaaagctaagcaatgagtattcaaagactgcaaaaagtacacgaaactgcatacaccttttgtttcagaatatagtcatcttcctgtgaacttctccgccgtccaataactgcaataagcgtattctcttctacagcatcagcatcatgaaatgcaaaatcaatctacaaaagtgtcacactgcaaacattacccctagatgcagaaatagatcaaaccgctttagaaaacacagagaagcagctacctgaacaccatcccggtaatattccaaggggattccatactttgctgcttcactcgcacttcgagcagacctgaaaaagggtcaggacaaatcatcatgaagcctatcaaaactcaactcgtaacataaaagattgaatatagagagatcaacaactgaacaaacaaaaagattgatactttatttggagtcatagaagataaccagcagcagaatcagaatcaaaagactcacattggtacaccaacaacaaaatcattatcgaagaactaatgaatagggaaattcaacaactgaacaaacaaaagattgattttttattggattcatagtagataaacatcagagagagaagcaaaagacttacattggtacaccaacaacattatgtaaagaaccagaaccaagttgttgacccaaataacgtatagcaaaatctgaagcttctccagatcctaaaccaataatcatcccactctttacataattatccacctgaaaacattaccagacaaaagttttgtaatcaagtatcaatctttcttcaattttatgaattttcaacacaatttcaaacaatacccatttgaaattgagtttcaaggattcaattttcccgatttaacccttacagtgtgatgagctgctctgagaagaggagaaacctccggagaaagactggcgcaaactggaaaacgtttgaaattacgacggcgcgtgaaaaccacggacgacgagagtgaaaatggagttgatgctgtcgcagtaaccattttttttgtgtgggaagaacgatttgagtcactgagtcgtgactcggtggtttttaccgctcttatctcccgatcagttttgtggtgcatgtggagtacgaactacgacgatattacacgaccattttctttttggagaattacgaaaataggctaaattatatatattttgttccaaaaaaaatgataaaatatatattaaatatttattttcatataattttataattttaaagcaacacataaattactaagttccaaatattatttttgaatttttaaacctaaattttaaattctaactatatccttaaattttattttatggtctttgagctaatccgtttttttttaatctaatgttaaattatattagaaaaaaaacatcggtttttacaacaagtacgacaaaatttgaatttgagaaaaaactgaaatttgaaaaattaaataaatttttaacttctagaggcaaaccacatttagagtcctctatgatatctcctatctcctaaagtctgataaaggaaagagtgtttcaggtttgcttatcaatccaacgaattagtcgagctgtctgtcgtattagaattctccccatgtcttctaccattttgttctcgccaaatggtgtagactgacactacatatcacatttgtgacgtattaaaactatatatcacatttatgattacgataaacagtacctatcaattttacgatacagttctctgcaacattaaaatccacaatggacggttatgcatatacgatatattttgatgaaaatgtttttctcaaacggttctacaaatacgacattctctagatgaacatgttctccatgaaaacgaataactctacgtgccacattctacaacctttcattaagtatacatccactaattggcaagaatctacactttttgggaatcaaaaccctatcttgtatcattttggatatcttattagtattgacgatccaacgaggaaaaaaataaataattgaaagaaaacaaaaaggagagtcatttaagtttgatcgcacttatgagtgttccttgcttcctttctcctctactttaagcacatgtgggaaccaaattcttcgtaaccactcaatttggctcacaatttttcaatatccaataaaaaacagtttcatatattttctcgtgagattattcagttcttcctaatatctatctatctctatattacatatatacaatattatataaatacgcactcttctttcaccgacctccttacaccaaaaaggtgtcaattccacttgttcaccatgaatatgatttaatgggttcttcttcttttgcagctttctttcttttccttaaattatcattgttttaggtggggttttaagtgctttcatgactcattcattctctgtataaaacctagtggaaagtgttaaatcaaaaacccttttttcccactttcttaatttagaagggagacgaaaaaaatg

SEQ ID NO: 23536 - DNA, 3003 bp, Unknown
  misc_feature (1)..( 3003): 2750-1469P.txt file - cDNA_ID_2143659; gDNA_ID_1620446; Annot_ID_157319
ataacgtggctgagaaggcaagtaatctcagccctaagagtattttgcagctcttaccgctcgtagcagccaatgtaagctttgaaaccgccattgtttgaagatgaaaatggtcaaattgtttttgttttgcaatgtgtagagtgtttgtgtctttatatatattgagtatttgagtgttagtgattggtcttttgtctgaccatctaacttttggagggttaattttaggttttggtggttgtgaagattcagtgaaaacgttagatttgaaccttttttttttttttttaaaatgttttgtggcaagttaacttgctcttgggacagtctcatctacccaaaacttaaaccagtttgactttttgacattttgtggaaatataaactcaattagctgattgcgtttactgtatatctttttaatgaacctactaccactttctatattttaagaaaaaacatgttacttaaatgctaaaaaaagcaatattattttttgaaaaaacttcatttaaataaaatatgatgtgaattttcaatttttttttttcaaataaatgcaaacttaaaggctaaaattgcagttgaaaccatgtgaatcttatgtgattttaatgaactagttggaactttttgcttgccaactcggataagttcttttttgtcttgttttattattatttttaaaaattttaatcccaaaaagtgtaaatcttctgtaaatcttctgtaaacacacaaacacaaaaccggaaattgaaagtgaaagcagtctatatagaagaaaagtttctgcattgagttgatttgtaaagtttagagatttaaatgaaaaccagagttctaaactgagaccggttaaagtcaacacagatgaataacatgttggatatgataaaacattatatcaaatgtgaaaagtgctgtgtaagctcaagagtctaaattcaataaaagagataaaatccatatgtttataaacacatttttttttttttttgtgcgaaatgtttataaacacattaaaacaaagatttttaagaaataccaatatttgtggttctgaaaaaggaaccctgaggttttgagacttaattatgaacagatgctttgtaggtgttacgtaaacatgagaagaatacaaacacaacaaaataggaagaaatcaatcatttttcacacatatatccgataagttctttcgattagtttttagtttttatcggttgttactaccacgacattgctcaccttaagtgttctatatcactccccacagttcttattcgaatgaataatactttagtacaagatatgctaagcaatacactcaatacataccagtttctcactctcgtccacggacaagggattctctacaacgactgttttggtttgagaaaataatgaatagagtctaataatgaatagagtctaagtagtcaatattttcttactaatgttactcgtctcatgaaggtggttgtggactctcttttaattttagtaactgctcattcgatcaaaacataagaaactgcaagtttattgaatacttaataaaaatttgaaagacgtttgtataaagacaaatactattagtaccaccataactcatttcttcccctataaataacaactgatctttgtattgttaatcactcaacaacaaacacaagaaagaatcataaattggaatacttcaaacatcttttttcttttatcatggcaatcaaaaacgtgatttttcttctatcgattgtatgcgttgcaatgtctgcaaatgctcaattacctcaatttccggcaccgtttccttttccatttccattcctacccattcccggtgtactggtataacaaaatgtttatcatcctttatgaatattgcagggtgtatcgcagagttttcacaatctatactcactggaaagtttggcaacataggccctgtttgttgcaaagcaattttggaagctgaaaccaactgtattccgcaacttccattcaatccattttttcctcctctgctaaaggaacaatgttcaaaaaccgttggcgcaatttctcatacgagaaagtagaattcaaaaaccaataatgtaatcgttgctcttttttcaaaattagaaaaataaggttaggtttacgatttgtattcaaaattttcaaacatctaataatagcattataaaaaaataggcacatttttgtgaacagtcatgaaatagttcaaagtgctagccatctacatattgaaaaaagaagcaattcttatgcaaattctaacaatattgctattttgatactcactaagtggatattcacattaaaaatagttgagcatcgttctgtaatattcgtggtatgattacaagatctatctatgtaattaaactgaaaacggagcagatatccgcttttaaaaaattgtagtgtgtgattattttttatttttttacgaataataatttttaatatttgttttgcatcatagaattacatatatccagacttttaaaatcaaaatgaaacagataacaaattgaagcgaatttaacagataatttgtctcatccctaatgtaatctacatttccatcttctatttacacaatgagattttagatgataaaaaaaataaaactaaccagagtttttgtaggttcatacaatatacaaaaacaaaaacaaatctgaaaacaattaaaattaagaaataggtttttttttttgttggacacaaaaattaagaaatggataaaaagaaggaatattaggaagatgtggacttctgtaacggctagttccaaagtaccgttctttttttggttttaattattgtattaaggcacgctctgacacattcacactcacacatagcgagaagaaaagaaaaaaaaaaactcaaaacttttgcttctactcaattctctgatttagggttttttcttgactttacactatctcgatttgagaagtgagaagagaaatcgccatg

SEQ ID NO: 23537 - DNA, 1665 bp, Unknown; identical to SEQ ID NO: 1775
  misc_feature (1)..( 1665): 2750-1469P.txt file - cDNA_ID_2143670; gDNA_ID_1620447; Annot_ID_157325

SEQ ID NO: 23538 - DNA, 3003 bp, Unknown
  misc_feature (1)..( 3003): 2750-1469P.txt file - cDNA_ID_2143695; gDNA_ID_1620447; Annot_ID_157333
tggttagattcatactaacttcgtaaatgtgaggggcaagtcatgattttcgaaaaagactcataacagaaaaaagaaaagattcggtaacttagacgagcattggtataatgatgatgtataagtataacactatatggtatatacgaaatgattcggaaacttatgcttggaggacattgtttctcttgcatagcttacataacctatatgaagtcgtggaaacaaaaaatatcacaaaacatctactgatctagaaatgctgaattgtcatatatatgtagttgcttctattattccaatgaatctattaggacatgtgctggatttccctaaagttggaccaataaggacacgcttttgtattttagacctcatgataactataaattctgatgcgtagtaaaacaccaaattaaagtggataattgtgtacttaattatgccctttttagtaccgatatgtggtcattgtaccattgttgattgattcaaagaagacaaattatttgaagttccaaaaaacaaataccgtctttttttgtttgttgattttaaacaggaaaagagaaaaacatgttatttcgattcatgtttgttacatattgcgtatgtacttaattatgccctttttataattttatttggtggtcctaaatttttgcttggacgttagtgatgggtctctttcacgagtctcctcaatgattgatgagatttacctctttcacaaattgtccatggaccctattttttttagttattcagaaaaaaaaaactgagaaggctaatattgagattatatgtttagttgtagttgacgactcaaactttgatgattctaaactatatatttttcgatttcacacgaacacgaagaagggaatgaattttttgatacaattcgacgatctacgttttgatggtgatatatataaagctgtttcacaagaattcactattctctaaggagcatccacattgtataactaacatatgtgtcttcccacactaattcaattattaaaatgtgaaagttgtttttaaatagagactcccttcccaaaatgttttaattgagacacattaagacattttgagagtgatatcatttaaaaacatccaaacattttaataattatatttttaaaggaagacacaaacattcagatgtgcaatgtggatggtctaaagaccttatagtgtatttcgattttaatcagaatctcaaactagtatgtactttttttttttagtgtgtcaatacttgatttcattcattcaaagacaaatgaaaaacatagtacaaggattcaaatatccaaagttttgtaaatgaaagtggaaaaacattcataaatgcaatataaagattgtaaagataattccacttttgcttcacaagcacttgaaggcaatatagcttgatagcttcttggcgcaagcggactcatggtgagtcgcgggcacatccacgagtacttggagaagtgagagattattcacggtcgagatctcaaactagtgctagatctctagctagttttacacatgcgacactcgtgacttgtgagttcattaaccaaagcttccaagcaaccaaagtgaatttacgggagctcaatctcttcatcatttgaagccctctaactctcccagtgtgaccaaattgaccgtttgcaaaaaagcaaattcttaattgggttgttcacgatattaaaattgcatcctcacatgcaaaacaaataaaatcacgaaatttcgttaattgttttccacaaaatcactcttcaccgtcaacatctacacaactaacaagatctcttccattatccaaaggatctcttatatcaacgagatgattaggacaacatatatagaggaactccatacacaattaggtaaacttatacaacaacatttaaaaaataacttttttttttttttgtgggcatgcacacacacacgcacacgtatgacttaaatctcatgtaactgtaaagactaatgtggagccctcctcgaaatctcttgcggattttcgctttttttcatgagaattaggaaaattctgactcatatgaaagcaattacgtcattcttgtctttataaaattgattaacaaaacaaaatataaaaaataacgagagtttcaagacctcatattccaatgcatttagtgcatttaggtaggttccaggtagacagcttatttaatcgtcattattttgctaatcaacttttttatacgatactttcaagaaagaaaataatagaataacattagatacaaacaaattaacgaaagtgagagagtatcagatgatcatgtggagaagtttgttttcggtatctgtcgaatcttccttctttccattttttcttgtcaacatttattatttatttttgtttggtcggccatttgtgtccaaaaataaaaatacgaaaaaacaagtatttttcactttgctcaagaccatctctgcacatgaagttatgaactaagtgagaccagaagaacttctttcgatcgatttctacagtgattctgtttgctcaagactacaactttgtgtactttctctttcaacgagctgtgtatcgtgtacttcatggtgtgttcctctgcttctgattgagattgaatctcctgtggtttttcagttgctccggtgatcggctccggtggattgaaatttcaaagcttttcctaatttcttggagtctacagatttcaaagtttctgggttactaccaaagtagaatctcagtttttgtctaagctaatcagatttctgcgattctgattgttaactaatccaagaacgatcgatgggggtttaaaggttagttttttaaacttgtagaatcaaggaatgtgattttgttactgggtttaccaaattttaaaacttttttgcattgtggatattacagttgaatttgggtctagaggaggaacttgttttgtttttgtgaagaatcagactttaaaagaaatg

SEQ ID NO: 23539 - DNA, 3003 bp, Unknown
  misc_feature (1)..( 3003): 2750-1469P.txt file - cDNA_ID_2143699; gDNA_ID_1620447; Annot_ID_157334
tctaaggaactaactaaattcaattttgcaggggcatgagccgtttgtttcatatgaaggccttgaacagttgcatcgcttcatctttataatggcagttactcatgtaacttatagctgcttgaccatgctccttgcaatcgtcaaggtagtatctttcaacagctgaagttttcttttgaatttgaatgttaataacagtgtattttgtgtgtttatagtgtgcgtttttatctgttttgatatgggaagaacctctgttactaacaattttgtttgatctgcttctctatgcagattcatagttggaggatatgggaagatgtagctcgtctagatagacacgattgcttaactggtgagcactaaatggttatcttgttcttccaagtatggcacgaaagattccatctgctcctctatttaactaagagcacaagtgaagtgctgttacaagtagcattatagtttacttatttgatgggttgtatatctatcaagtggtaaacgatcgattatttgtgtggcagcggtggcacgtgaaaaaatattccgaaggcaaacaacgtttgtccagtatcatacatcagcacctctggccaagaatagaattcttatatgggtggtaagattcttagctctcttctctagaaaatatggaaaacaattacaaatattgaataatgggtggtatgtttttcacctccttgcagacatgtttcttccggcaattcggacgttctgttgatcgttctgactatcttactctccgcaaaggattcattgtggtgggtgatactatatgccgtatgatcattagctttttccactctcattttcaactatttatgaatgacaataatgatacaactacttatagttggtactgtttccttttcttctttaatgagcagaatcaccacctcacattaaagtacgattttcacagctacatgattcgttctatggaagaagagttccaaaggatcgttggtgtgaggtgagatacctcatcccatagaaacatagtgtgggatatccacttagcttatatctatcaggttctgagttcttaaaatcactaatcattttggataaatggatgcattagttattgactgaacaacttttgcttcaatgctcttctgcagtgggccgctttggggtttcgtagttgctttcatgctctttaacataaaaggtatgatcagttgatcactaaaccaaaagacagatgatcattctgttttcctttagttcaattgtgaaaaatattcatatttataagatttttagttttaaatctggcctcttgttactgcaggatcaaatctttacttctggatagcgattattcctgtaaccgtaagaactacattttcacagcattctcgctttcttgtattgtgtttgtaaacatcacaacttagtaaaactttcattctcattttatcagcttgttcttctggttggtgctaagttgcaacacgtaatagcaactttggcattggagaatgccgggttaaccgagtatccttccggagtaaagctgagacctcgagatgaacttttctggttcaataaaccagaactactcttgtcccttatccatttcattctgtttcaggtttgcaaaatcttaactaaccaccattgcaccgaaccaatatttctcggtcttggtaaaactaacagctacttgatttgcatttccaacagaattcttttgaactggcttcgttcttctggttctgggtatgacaaatgaaccatatattcttttaatctttcgcaaactttcgattcgggtttggaacttacaatgcatttgttattacttttcttcagtggcagtttgggtacagctcttgcttccttaagaaccattaccttgtttacttcagacttcttttagggtaactaaaccttcgtttttcgtctcgatttagactgttgtgcatctgcctcatagtgtaatgtaattcattcctctttgtaggtttgctggacagtttctatgcagctacagtacactgccactatatgcactagtcactcaggtaatttatcgagctttcgacttttggcagcttccgtaaactcctaggaggataacgaaatattgttttgattccagatgggaacgaactataaagcggctcttatacctcagagaataagagagacgattcgcggttggggtaaagcaacgagaaggaaaagaaggcacgggttatatggcgatgattcaacagttagaacagaaacaagcacaattgcatcacttgaagaatatgatcatcaagtgcttgacgttactgaaacttctttcgaacaacaacggaaacaacaagaacaaggtactactgagcttgagttgcaaccaatccaacctcgtaatgattgtgtacccaatgatacttcaagtagagtcggaacacctcttcttcgaccttggctctccatttcttcaccaacaacgaccatagagttgagatcagaacctatggaaacactctcgagatcgtcttccttgccaagtgagaagagagtctgaatataaataagttcgtaggagtaacagtagaaaacaagtatgtctcgatgaacatagattgaaaacttacatcaatcaagtgttagcaacactaatatttgtatgtgctctacaaaaaaattatattgcaatattgagaaacatttaaatttgttagaaccaaaaccaaatcttaccttttgtttaagctaagatttataaatcatcatggagataaaaagaggtataataagaaataaaacttttctacattggttaaaaatttggaaaaagaattactttaaattattttactcataattttgtttttccatttttctaaattaattaattaattattttgacctttgtttgggttctctgtttccgacataacttttaagttttgtagctcctcctcgacggcttcgaaaccctaaaccccaaagtttaagctgccgtcaatg

SEQ ID NO: 23540 - DNA, 3000 bp, Unknown; identical to SEQ ID NO: 1790
  misc_feature (1)..( 3000): 2750-1469P.txt file - cDNA_ID_2143893; gDNA_ID_1620448; Annot_ID_157369

SEQ ID NO: 23541 - DNA, 3000 bp, Unknown; identical to SEQ ID NO: 1781
  misc_feature (1)..( 3000): 2750-1469P.txt file - cDNA_ID_2143901; gDNA_ID_1620448; Annot_ID_157372

SEQ ID NO: 23542 - DNA, 3000 bp, Unknown; identical to SEQ ID NO: 1784
  misc_feature (1)..( 3000): 2750-1469P.txt file - cDNA_ID_2143929; gDNA_ID_1620448; Annot_ID_157382

SEQ ID NO: 23543 - DNA, 3000 bp, Unknown; identical to SEQ ID NO: 1803
  misc_feature (1)..( 3000): 2750-1469P.txt file - cDNA_ID_2144020; gDNA_ID_1620450; Annot_ID_157459

SEQ ID NO: 23544 - DNA, 1219 bp, Unknown; identical to SEQ ID NO: 1804
  misc_feature (1)..( 1219): 2750-1469P.txt file - cDNA_ID_2144028; gDNA_ID_1620450; Annot_ID_157462

SEQ ID NO: 23545 - DNA, 3003 bp, Unknown
  misc_feature (1)..( 3003): 2750-1469P.txt file - cDNA_ID_2144097; gDNA_ID_1621151; Annot_ID_173245
gaggacaagagccggtacatctgattccatcttcggttttgacggtgaacttaagctcctcgagagatttcaaacaagctcatgggattcatcagtggtggagggaagataacaagtttgagactaaagtttaccagtacaaatgatttgtatcagtttttttttaaatggatttaaccggtattaggcttttactttccggtttagacggttcaatgtatcgcaatcataaataagtgtctctctatagtcggtatatataaaccggaaataggcgtctacgttctaatttagccggttcaatgtgttgtaatcttatatatagtctcttgatcaataagacgacgacgtttcactttatctctgtaaaacctcgcagagcatctgcacattttcccgcgcactttctcaatgtcgatcaagcttctcgttcttgttttctctcttctgataatcttcacgagacccaaattgatcgccgatcatcacttaactacaagaatctcgccgatttatccttcgatttctacgtttcagccttcgattccgccgtttttacctccatcgccgtcgcgcagagcacaatctccgacggtgaagccgtctttgccatttgtaccggcgttgttcgttttcggagattcctcagtcgatagcggaaccaataactttcttggaaccttagcgagagcagatcggcttccctacggtcgcgatttcgatacgcatcaaccaacgggaaggttttgcaatggaagaatcccagttgattatctaggttacaattcttccccagtttctggatattgattatagtcccagttgattcttagaagtgtaagcgaaaatgttgacttcttgtgttcgattctttatacaattgagaggaacaaattcattgaggaaatgttgaatcattcgttttttgttgtccattgaaaatcttgtgaacagctgatcgtttaggcttaccattcgttcctagctatcttggacaaactgggactgttgaagacatgtttcaaggagtaaactatgcatcagctggtgctggaatcatcttatcaagtggatctgaattggtaatactcagtttttcagagtcttttgagttcattttctgtataccatctttcagctttttcaatcctgtgggggaatttttgttgttgcagggccagcgggtttcatttgcgatgcaagttgagcagtttgttgatacgtttcagcagatgatactgagtattggggagaaagcttcggaacgtttagtgtcaaactcggttttctacatatcgattggagtgaatgattacatacatttctacatcagaaacatctccaatgtgcagaatctctatactccatggaattttaatcagttcttggcttctaatatgagacaggagctcaaggttagacctctaatcaatctttatacgttttctcttggtaaagagtttataggggacagacaagtatgattctgagttagtatagttagtataagtgagacatcttgattagtacacaaaacgttgcctttatgaagatcaaatcacaacccttttttctgttttggatctctggtttgtatagttgtagagagcataaagctcattaagctgcatattgatagcctaaacatgattgagttatagtagttgcctcttcatttagctgcatattgatggcctaataagagaagtattatgtttgtttcacagaccttgtacaatgtcaaggtgaggaggatggtggtgatgggactgccacctattggctgtgcaccatactacatgtggaaatacagaagccagaacggagaatgtgcagaagaagtgaacagcatgatcatggaatccaactttgtcatgagatacactgtagataaactcaaccgtgagcttccaggggcatccattatctactgtgacgtgttccaaagcgctatggacattctcaggaaccaccaacactacggtaagcaccacttctatgtcaattctcaattcacaaaaagactgtgactggtaacaagtaacaacatagcattataatcccatagcagtatcttggaactcaaacatagtcttctgagagtgatatatagagttttctgatcatcttcaagtgtgaaagtaacttgtcaagagtcttgttgaatcttagttgtgtgtgtattgtggtgtggacaggttttaatgagacgacagatgcgtgttgtgggctagggaggtacaaaggatggcttccatgcatctcgccggagatggcttgctctgacgcctccggtcacctctggtgggaccagtttcatcctacagacgccgttaacgccattctagccgacaatgtatggaatggtcgccacgtggacatgtgttaccctactaacctagaaactatgcttcattcttaaatcagctgagaggataaaaatgtacataaaaaacatagtaaattgtaaatgaactttgcaattttgatgtttggtccatggtacataaaggaaaactataggtcttttatgctaaagaaagaaagtacggggttagagaagaaaaaggataaatgttttacaaagttgggctcaatgtatttacgtaaatggcccacatgaaacagaaagttaagagattcgacccataaaaagcacgtgtggtttataaatggaaaatttcatcttcagggagacgaagacataatttcaattcttttctcatcaaagtttctaaaacaaaaatcttggcctaaagaggtgacgtcatctccaccctctcgtaatttttccaattttgcccttggaagctgcttcgccttttttttcaatttcatcaagggttctgagatttttttctctcagcttcttcgtaggtttttgatccgaggtaggtaggctttgggtttacaaaaatttcgcctcgattttttgttctcacgcgtcgttcttgttacaggaaatcgatttcatctctgatcatctttgtgacgaaggaaatg

SEQ ID NO: 23546 - DNA, 3003 bp, Unknown
  misc_feature (1)..( 3003): 2750-1469P.txt file - cDNA_ID_2144243; gDNA_ID_1591323; Annot_ID_150845
aacttaatactattatttataggctaattagtaattgctcatgtagtcatgttactacttactactattatagtagtattgtttattaccgtgatgccaacaggcaacaaccataatcaagtctcttaaaataattttgtgatctataatactaataagataattgaatataccgtatgttcatcttcagataaaggtaaggtcaaatggagtgctacacgtcaagacaataagaattaaatttgactctgtagatccggaaaacaaaatgaaagaaagagtaagaacttttttgtggatttttctttttgattacaaatttgtaataattaatttttttgggggaatggaagatagagaaaggaagagcattaagaaaataggagaacatatggaaagttacaataaatacttggtacaaaagttgcagaaaataagtaagaatatgatccagaaaagattagaggaagaaaagattcttccaacgtagattcaaattattcaatattatacaaagggtactttggaaaatccacaataaccacataagaaaacatgcatcctcatctttcgactttctcactttttggtgattggtatcttttttttcttcgaaccttccgtgtttgatttatcgccctcttgttcttttgtcccttttatattgctggtcctaatctgatgaagaaaattaatcaagaaattagaatgatttttctttaaatcaggatctttacagttaatgactgattatttctataccgttttggcgtagccttgctgggccggatacccacgaactgaatgatgagtacaagatatgttaatttccttcaaggttaaattagttaattacatgaatctcaaataaccaaaactcctatatatatacacacctggtgcaccagaggaagaatccatagttgagaaataactaaacaaggaattgtgagaagagtagattcgttaatgataagaagcttggttttgttttgaagatgatgctcgatcttcctatatatatatatatataattttctacttttttttccttagagacacgactcataattggtttgcaattttgcatacaaagtcaaaccacacttgtttattcataaaaatatagatttatgagaaagtgtacctaccatatacaaaccaagaacttaacgtgttgagattatactcgccaataatctaaaatgatgtaatactctacttaatagtataagtttactacaaacgtgtacccggattatcatatatgattgttttttagtaaatttgttatcttcaattgattattggggggcaaggtctcctgtaaatataacaaataaaacacgatatagagtggctcttaaactcttaagttagaaatagaaaaataataaagtgaaagactattaggtgagtagatgagagagtagaatggaaaatgtcggataacataaagaagaggaggtatagtcactccatgccgatgaaggatggtcaacgatgtatatgttaagttaagaggcatataaggtgaaataagtaaaaatgaaagtgttaagtagacgaaggcgtgacctagaagtggtctttggatgtgaccgaaataggtcggaagtacgtatgagtgaaaactaaaggaggttttgcgagcgaagataaagaaaggtgtttatgctctctagaataatcatgaactagtaactaagtgaaagtttggatccccttctcgttaaaaaaagagttgtaccacgttggcttagtatattggtagacaaatccggatcatattcagatgcatcgacttgtgcatgtactatgcactcgtgtagttatcacctaccacctttgtctttatctccctataaataaactagtgaatcccgagatgtaaggtgatatcatctctataccgtttgcagtgcaaaatgcggcgggtcagactatcactatgtggagcaaatatgatatatcaaccaactaacccctcatataactagagagatcttaaccggaaaaaatgatccgcagtttcatacaaaaagctctatagtttgttctttaagcagattaaagccattgtaagtcaatagcttttgattaagatttcaataaaaagagcaatttatattcctactttacttaaatgaattatttgtggaactttagtatctacggaagtgacgatgggacaatgaagtatggtgacgtatgacgattgttttggttagattgcaagcacacgtaacggaacaatccaaaatgatccaaaaatttaacaaaaataaatgtcagccaatgataatttattatattattcttaggttattattattgaaaaaactttaaaattcataatcttcctaaaattcacttaaatttatccaaatttaaaatccttcaaactaatccttaaattatttgtagctagccaaccaactacattagttaaatttaaatgcattgcaagctcacatgtatcaattatatataatgacatgttgtcaacatcacattaaaaacaaaaatattatgttttctgcgtagaaaaaaaaagctttgtggttaattttttttaatatcattttttatttcaataaatattttatggataaattaaaaatatgttaactccattagacttaacactaataacagctaaacacaaaaattgtaacatcttttgcaattcattgtaatgtttgcaattagtgggccttcttttgagccttcttatgaaccgaatatttgcctatttgggctttaaaacatattgggccgataaaaaagagctacaaaataaacagctaaacaatttttgatttaccatagttttttagtttttacccgacccggaaacaaaatccggattttttcctccgacccccccaatagatctgactgaaatcaaaattttccgactctttctttctctcacactagtctttcattttcctcctcaactctgggcttgcttcgttctatgtttctccactgctaatg

SEQ ID NO: 23547 - DNA, 3000 bp, Unknown; identical to SEQ ID NO: 5141
  misc_feature (1)..( 3000): 2750-1469P.txt file - cDNA_ID_2144243; gDNA_ID_1620766; Annot_ID_167343

SEQ ID NO: 23548 - DNA, 3003 bp, Unknown
  misc_feature (1)..( 3003): 2750-1469P.txt file - cDNA_ID_2144254; gDNA_ID_1620766; Annot_ID_167347
caaatagttcacaaatttaagaaatacaaacagcttgaccgaaaaaacgtaaagcaaaatagtacaatatggatcctgatcttttgacttgctcacttctttccaatcatgttctttcctttggttgttttctctcgctgcgttgttgttccatctacgttattaactattgtcgttttctctctcgtcactggttttgtcccttttaaattgcttttctgaagctgatgaaggaaaaataaacaagaaattagacaagacacttccaaaaaaaacccagcatcgagtcactagatcataaaacgtttatttatctaagtatatgattatatacccctttcaacgcggtccgacctgcatagataaacaagacatgttagtttcatacaaggtagtacttagttaatcatatataagttatttcagctatcttaattattcatcatgtacaaattagcccgaacgtacgtaccttcttcgcctgcagaattactggatgaagaatccatagatggaaacaactaaacaagagatcagagatatccgtgaatacgaagcttgttttttttattttatttttattttttaatgttcttaatttcaaatatatagagagaaaaattattattcttgttctcttagggacgacgccttgtaattggtctgctcacaaagcaaccgcacttgtgttttttgattcattgaatataatttatgagtgactaactaaatatttagtaaagaaagtgggaaaataatagtcaacaaattgaagcgttaaccttgccataaaatcgtcttttcattcaaaaagtgagggattaaattacataagaaaattacaaaacttttatttcataggccagaagtctagaaggtacgtaggccaatattctagtttgttcatcataggctcatcgcgataaactccatatgattaactgcaacactatttgttatgaatttccaaataatgtattttaattttgagctaggtttcatatgaaatcagaataacaaaatagtagtacgaagtacgaaaaagcaattttaaaaaacagctaaaaacataacaaaatagcagtaagaaaaagtggaaccaaaaagctgaaagtatcaaagccgtgttgctaatcaaacccaaaaacaaataatccacccttaccaaaaagacaaaacttgatagtattaattcacaaccatttatcaccaaaagtggggaaaaaccaacgagcatccttgaaaagttttgtcgaggaagtagttagatgttcaaactcttggaccacataatcgcttccgatttggtaaacgcaaatacggtcagcgttataaccatcgcgtagactaatcccacaacatctatgatactgatcattactaaaatatatgcaatctctcataactccatctttggccggaaccgtaattcctaaatccaaaagcaatgcctcgtcccctatagacttgattagtactgtaaattctgatgattttggatccatcttattgacagtgaagacgcatttagcctctggagaactatccattttaccacctacaatgatcaaaacttctccagacaaagtcacagcaagattgctgaaatacttcatatgaaatctatttacacacacagacgatccgaaacttgcacattccatttctactggagaaacaccaccggagaaatcaaaaacagtgagacattgatgtgcactaatcatgtaaagcttgctttctttaaacaccatatcaacacagccttgatgctttattggttgaagaactttccagctattgttgtcatctcctctcttgtgatgatatgctacataactagaaagattacaaaacacaaagtaatctctgcttttgtcatctacccacagaaccgctttgtctatttctatatggctaccgctaatgggtctcttgaatcgcatataccgttctccatcgattgattcgagagacggaagaagaatcctctctcgagtaaaaagattcaaaagatgaaaatcagctctatggtcgaacataaggaaccaactaccggaactcgctaaacaacgactcgtagacatatcaaaccctaaatctctgattatgtaggttttgttttcatgaggatcaaacaacttacatgaaccgttgttttcgacatttttgtttggaaaaagaatgatccatggagttgttggatttgttactccgatgactgatttcgaagcaacataccatgttgaagaaacgcatctcgctcgatgaaaatcaacgaagctcaagcgctccaagattaatctaactaggtccacgatataggccgcttcgaatcgtccttccatattttttccgtcggaatcgctcatctccttcttttgtgctatttcacgattttcaatcttagggtttgtgctcagagacgtgggggagaagatgagtcaataaagttaatgaggctattgggccattatgtaaaataggcccatatattaatgggtttcgttggattagaaatcttaacttgtaggaaaaaaaaaattcacgccggcaaaagaaaagaaaaaaaaaaccttcgccgtcgtttgcttagtcttcttcgctctatcccaacactcgatcaaataatcccagtgagcttcttccattccaaggtacgaatcgataaagtcatcaaacctataccttttcaggatttaatggtaattagtcaggatctaaatcgtttcttcgaatttgatttcggtgatctagaaccctaatttggtcgggaattttcaaatcaattgatttccctgccctaatttaatttgatgattgttctgtttgcctatgaataagtttgatttcaatggcaaacaaaaaaaagagagacattgatttgaatatttttacttaggtgcattgattctgcagattgtgttaatgtgtgtcactcttaatcttctgtcttatgtttttctcagttgataaggaatttgaagaagcctttgtttaatg

SEQ ID NO: 23549 - DNA, 3000 bp, Unknown; identical to SEQ ID NO: 18620
  misc_feature (1)..( 3000): 2750-1469P.txt file - cDNA_ID_2144327; gDNA_ID_2926151; Annot_ID_198073

SEQ ID NO: 23550 - DNA, 3003 bp, Unknown; identical to SEQ ID NO: 18619
  misc_feature (1)..( 3003): 2750-1469P.txt file - cDNA_ID_2144327; gDNA_ID_1621158; Annot_ID_173609

SEQ ID NO: 23551 - DNA, 3000 bp, Unknown
  misc_feature (1)..( 3000): 2750-1469P.txt file - cDNA_ID_2144337; gDNA_ID_2926151; Annot_ID_139307
aagaatataaaattacaaaaatatctttactaaaatttactaacaatttaaaaacatttctatttaaaacaaaaattagcttctttttttgttgtcgatatcaaaaaaattggttcacggtttttttttctttttcacgaattatattgatactagataaggcccgcctaaataggcgggtgtatgatataaatttatttaaatattaacagtaatatttaaactttatatagtaaatagtaatcaacacactttttctaatatttaatgtagtaatttttgtattacataaaattttaatcatacacattcaattttacttatattttaactatctatttcatcataataaactattttgttatttataatataaaaactacattcggacactctgtgaaaacgacatcccgtttgtatcctctaacaatgtcggacttacaactgttggacaaacatcaaataaatataaaccgagcagtaattaaaacgcatagtttgctaatccatttactatgcgattagctttactatacacatgagtaactcggactatgcagtccctatacactccatcttattaatgatatttgaattttaaatagtaacgtaactctcatactttttcagtatgtaattttgtatttttttaaaccaaatttcaatcttacaaattcgattttgcaatacaatttaaatacctattttatcataataaaatatataatttaatgatatacactccatcttattgttagtttttttatataatttaattatatacactccatcttattgttagttttacattttagataagaaaattgtaagttaaatatttagatataaatatattaattagtatatataaatatcttttttttttagtttcctattttcttttaggaaaaagtaaaaaaaaatcaaaaacatgtcaaaatctaagatcgttcaaataaccacgtgtcatgatctcgtgagttagtaactttcaaaactgtactttatataataagatttgaatttcaaatagtaacgtaactctcatactttttcagtatgtaatttagtatttctttaaaccaaatttcaatcttacaaattcgattttgcaatacaatttaaatacctattttaccataataaaatatataatttaatgatatacactccatcttgttgttagttttttatataatttaattatatacactccatcttattgttagttttacattttagttaagaaaattgtaagttaaatatttagatataaacatattaattagtatatataaatatctttgttttttagtttcctattttcttttaggaaaaagtaaaaaaaaaatcaaacatatgtcaaaatctaagatcgtttaaataaccacgtgtcatgatctcgtgagttagtaactttcaaaactgtactttatataataagattagattggaaacgttacaatacacatgagaaaataaaagtttaaacttcaagaagacaccatgctcgacccataacctacgacaagataaggaaggaattttccgataatacattgtaaaaaccaaacaaatcttgtctcgagactaaacgaagctctcgaagctcaccataaagacttcccgcacaacaaattatgaagaggggcttcttcataacttatggcaataacaagatagtggaacttggccttctcaataaatgcttctttttcaatgagtgcctttgtcaagggtcttccggatgaaccgtaagataatcgagaaccacttagacgttttaacgccacaacgatcaataaattaagcaaaccatcatctgctacacgatgagagaaaactcaaatataatcaaagtgctcaaccccaaactaacaaagattaacttagtcgggaagagaagattagcccaaacaagggagacggaagtccaaacgagggagacaattaaacctaatcctctgatgttaccatatctcacagagacgaactgatcagagcaacaagtcgacacaaaagaggaatacatgagagacattggagataccgagatatcgaggaggcgatccaatgttgcacagatgcagctttgggagaaaagaaacgagccgtcaagagagaagcaaaagcctccaaagtccgtcaagactcagcgaagagaaccacccgacaaagacgacgttgtgactccactctgtgaccaccgaacaagaacgatgacccaagaacacccttgaccaacagatcctatagatctgagtaccaagacccaacctcattaaatctgccccacaacacccactattccaaaatgtagagcctcgatgcttccacaaacaaagaatacaaagacaagaaatgaaaaactatgcagagaaacaaagaaggtgactgacgctggtgctatttgagcctccacgcgctggtcactttgtgttaaagcaggaagacgagagaaaaaaatattattttaggtcaaccttgtcgatttttgcgatacttagagcttcgatttttagggttaacggttcacctctgctatattttttttatcagaattcaactccaacaaactaaatcactttccgtgataaagaaaagaaaagtgcaaaaatttggattttgttgatccaaaataaaatacaaagaactgaaatcttaaaatcatatactaaactagttgttatttgtaaatttcttataaccctttcttacatttttaaattaccctacatataactttttcttacatttttaaaatatcctacaattatctaactaaacacccaaaaatatttttaccgttttatgttatcaacttatcatcgtgtccgacaaaaaaaaaaaaacttatcatcgtgctcctttacatttttcgtgacctaaaactgctacgacatcgttttagtgacttacttgctaaaaccctttttaactttctttcaagctaaagacctgcacaaactctctctcgaattcttttgtttcgaagccatg

SEQ ID NO: 23552 - DNA, 3000 bp, Unknown; identical to SEQ ID NO: 7302
  misc_feature (1)..( 3000): 2750-1469P.txt file - cDNA_ID_2144432; gDNA_ID_1621138; Annot_ID_172737

SEQ ID NO: 23553 - DNA, 3003 bp, Unknown
  misc_feature (1)..( 3003): 2750-1469P.txt file - cDNA_ID_2144432; gDNA_ID_1620713; Annot_ID_165537
tggtcgggctcagcctggcggaaaaaattgttatgggtctaaggcccataaagtggcccagaaataaactcgtcgtatttacacacgttgtcgtttctcttatcttctagaaaactgtatcccgtttttgttcttgtactctacacaaacagacaacttcaaattactcaacaccacgtcgtgaaaatccgatctacgtctctgtctctctccaatctctctgcgccacagaattgtgcgatttacgaaaatctctgaaacctccgatcgttaacggcgaccgccgattttcccggtaaaaatgaacgacggagatgtatcgaggcagatccagcagatggtgagatttatccgccaagaagcggaagagaaagcaaacgagatctcggtttctgctgaagaagtatgatctttagtgtttctgtttccatttatcagatcttatgatatgaatctctaattcaatcgtaagcggtttatctgattgttatcgatttggtttatttgaataatcgtaggaattcaacattgagaaactccagcttgttgaggcggagaagaagaagatcaggcaagattatgagaagaaggagaagcaagctgatgttcgcaagaagatgtgagttttctgatttcaatttttttgatcttggttaagttttaagttagatcgcttgttctggattacaatatctctgaactttgaaaaaattagaagtttatgatttatagatttgaagttttgacttgattgatttcaaacttgtaattttcttcattgatgaataagaaacatagtctggtttagtctaatcggcaaaactgaagactaatttagcaattagtctgatgtaagattatggtgtagtagtgtactgtgttgatctagctttcaaattctctaatattgttagttctctgtgaaaattatgttgatcttgttcatttactgtgttatcgtgtattactttgccagaaaataactgtcatacatgttttttcagtgattactctatgcagctaaatgcatcaaggatcaaagttcttcaagcgcaagacgatattgtcaatgccatgaaagaccaagcagctaaggatcttctgaacgttagtcgcgatgagtatgcctacaaacagctcctcaaggatctaattgttcaggttggtacttaaaacaaatccctgatgcattcaaataaatatttgatatttggaacttttttttgtatatcctactggagattatgtaatcgtgtcggatggcaatctttttttgtgtgttttgatccgttctgctgatgtcattttgcatttcgaataccttttggtctgttaaagattctctcttgaattgttgcagtgtttgcttcggttgaaagaaccttctgtgttgttgcgttgtcgtgaagaggacttgggtttagtggaagctgtacttgatgacgcaaaggaggaatatgctggtaaagcaaaggttcatgccccagaggttgctgttgacacaaaaatattccttccccctcctcctaaatctaatgatcctcatggtctccactggtaaaatttcatgtttctcatcattactttacatttaaatttttataaaagaacattatcagtgtttagatccggtttgatagtgtattttgaacatgtaatagctctggaggtgttgtgttagcttctcgtgatgggaaaatcgtgtgcgagaacacacttgatgcgcgtcttgatgtggcattccgtatgaaactcccagtggtatgaaaaacaaattctctaccgcatagattacttgttatgatccatcactcactgtctaggtttacttttttactttggttctctgattcactcattgttgttaacagatccgtaagtcgttgttcggccaagttactgcctgatgaaagaaaggaaaagagaaaagagattattcaaaccggtttgcgtttggttatttacctattttgggagagatttctctttgttgtgattctttgtattttgcaaaatcttactttggtgccaaacccatcgaacgcttctttttttcgaattcctttttttcattcctcctcgaatgtgtgttatcatggctatacaaataaataaaatgaaagacttcttttctttttcttcactttttctattcaatgtctatgctttatactagtggtttttcgtcatcatagataaacacttaattcataaaaagacccttgaatttttattataaggttagcaatttatccaacacgatcctgaaaatcgtccatcctagtatttttttcgtctaaacacctttaattgcggagttttgataagtttttaacagaaaaaaactcgaataagatatttttttggtttgggctaaaattgttatagacttggcccttgggttttatcccaaatacattttaggtatcacaaacaagaaaaacatagaagtaaaaaactagaagttttttgcgcttttgatctttgtccttttttctacaagttttttctccagactaatctcctcacgattgtctgaagacaagagtctacaagaccggagattcaccgttcgacaataatttccgtacctttcaaggttagatgttcttgcgcttaatttgacttgtgttctttttgtgaattttggatgcgcgcacaaggtgtttgttcatttgcctagacaaagtaaaattgatttagttattcttctcattcatcttctatagtatttgtacttgagccaatcattattcatctttggtgcaatctgaatctgacccatttgagctgttttgtctccttgttcaaattttgtgtgaatgtgtgtaaagaacgcagaatctaatagaagcttctctttagggtttgggttgttaggacatgcgtttcatcctctcaaattttgattttgtttcttttaatgaactcaagggttagtttgatgcttatcaaattgagggtttttgttttggatgcagagactgatttgacatatgaatg

SEQ ID NO: 23554 - DNA, 3003 bp, Unknown; identical to SEQ ID NO: 23553
  misc_feature (1)..( 3003): 2750-1469P.txt file - cDNA_ID_2144432; gDNA_ID_2926152; Annot_ID_198138

SEQ ID NO: 23555 - DNA, 3000 bp, Unknown; identical to SEQ ID NO: 7305
  misc_feature (1)..( 3000): 2750-1469P.txt file - cDNA_ID_2144447; gDNA_ID_1621138; Annot_ID_172745

SEQ ID NO: 23556 - DNA, 3003 bp, Unknown
  misc_feature (1)..( 3003): 2750-1469P.txt file - cDNA_ID_2144553; gDNA_ID_1621179; Annot_ID_174246
atcaagtagctggaagtaaattgggagatattcttatctttgtcatgtaacatttctttcaggataaatggagaggaataccgacgagattgaataacattccacattcgagggatatcagggcttatttttatgaagatgtgctgcaagccacaattagatctatcaaggatggtaacacccgtcttcgggtgaggctaatccacacaatctatttgcaatgtcgcatgttatgtcatctttattttgcaattcctaaagcagctgcttgacgggactgatactgttacaaatgaataggtggacattaatatccctgagctaaatccggaaatggtcagttattcatttcactaactgttttatacgatttctaaagcttcataagttgtaccaaaaagcaagctattgtgataaataggatgtttaccggataggaaccttgatggaacttgttcaagctttagctttatcattcgctgacgatggaaaaagagtgaaggtatacatggtttggaagacttaagtgatgtcacatgaatacagtttcacaaatcttgttcattcagcttttttcctcttccaggtttgtgttcagggatcaatgggggaaggtgcacttgctgggatgccattgcagttggcaggcactcgaaagattttagaatatatggactggggtgatgatgaaactttgggaactttcgtcaagcttggtgcaattggtaaatatccaaaaccaaatacttttcaaagatgtattgacaaaaccatgtttaacactagaaatactcagatacctcttgactttggtgtcttctggctttagtaactagagaatctctcaacttacaaaaactgcaccatcaacagaatattgttgtgtcaataatcaaacttgtgatgcataataaagttggatacattgaattacacattattctgctctttgattatgtgtttgcaatgacaggtggtaaagaagttgatgaagaagatgacatgttcatcttagtggctccacaaaatgccgttggaaactgtattatagatgtgaggagctaggaatgcttgaattcgttattcatttgaacttatcgacctcattttatagaatataccggattcgtttgttaggatctacaagcgatgactactgctgctgggaaaaggccagttgtacttatcaatcctcgcctcaaggtacattttctgcttgcacttttttatatagagacaatgggtaacaatgtgatctatattgtgagttacatgtttcatataccttattatttcaggacttgcccgcttcgagtggcataatgcaagtaagcacacaaagtgattctttacccatccaataagaagattatgttgcttataatttccttggtgtctcagacaatgggcagggagcaaaggctggaatatgctttgacgtttgacaactgctatgtattccggcttctctattatttgggaacacaatacccgattatgggcgctctaaggtacagttgttgggttatgaagtagagaaacaactatcaatgtcaattcattctgaatgtttgacctgaatttggtcaggatgtcttatccataccggtatgagctttataagagagtgaacgaggaaaatggaaaggagaaatatgtcttgctagcaacgtacgctgaaagaccaacccctgaacaaatcgacgatgccttctctggaaaatcgcggtaaattgtttccatggtccttcttaacacattgggcttatgataattttgaacaaaaactgagaatgtcatttcacatcagggatcaaagcaagaaggcgtcaggaatctggtaatgagcactacatagttatttaaatgaggatttttgtgtgtgtgtgtaaagctaaatgtgagggatacttgcagggggttcttgagtagcgtgttttcgtaatggaactaggaagctgaagttgtggaacattcattaaatgctcatctatcagttaccaaacagagagagagtgatgctgctactttttgttcataattttctccttttattatgtctcagattgttgattatcttactttggggcaaataaaactgaaaactgtgattattttattacgtagtgtcacataaccaaaaagtaacctcactctcgtacattttaaagcctaagtcatgaatggccgagaatattgttcactagttactgcaacggcatttataggtcatctcataagtggccttctaataattttgtttttcatcagtttttttaaccacattattttgaatattttgaattattgtattgtgaattgtaactagataaaaattgtttctatgtctatggttggtcaatcaatttcttgcacttagaaatactgattaataggtccaaatagatcaaaattaatattgattgacccgtcttgcaatcagtttcttaaattttaatttttcttattaagataaaaatgtatagtcttagaagaaaaacaaaattagtaaaatgttttaattattttggggttttgctgagggctccgcctctcccatagattgatacacactttttttttttgggttaaatatacacaccctttacatactagaaagtaatttgattatgtcaaaggttacataatcaactaaagcgtattagtgaatttaataaattcttacttttagtaattaattatccctccgtgtcgacttgctcgaaaatgcatgttaaatggctaaatgtttattttaatgcagagtctgaaaatggcaaaacaaaaacattcacttgacgtggatggttttgattggagagcataaattcgtcgcagactaggctcagaatcaatgaacccaccaaactaacaaactccataattgaaacaaacaaagaaaaaagtggattctcaaaattgaatgaagcaacgaacgattcaacatcaaatctagctgaattattgtttcgcgttgattgattgatccggagaaaggcgatg

SEQ ID NO: 23557 - DNA, 3000 bp, Unknown; identical to SEQ ID NO: 5359
  misc_feature (1)..( 3000): 2750-1469P.txt file - cDNA_ID_2144735; gDNA_ID_1620782; Annot_ID_167991

SEQ ID NO: 23558 - DNA, 3000 bp, Unknown
  misc_feature (1)..( 3000): 2750-1469P.txt file - cDNA_ID_2144792; gDNA_ID_1620782; Annot_ID_168011
tcacagatgaaattgaccctaaatgggctacttttatccaatctattctagttccgcaaactcggaaagcatctttatttgcaacaactcaataagcttgccgtaaagatgtcgagcgtgcttttggagttttgcaagctcgatttgccattgtaaaaaatccagctcttatttgggataaggtaaaaataggatacattacgcgagcgtgtataatacttcacaatatgatagtagaagacgaacgagatggataaactcactttgatctatcttaattcgtacaaacggaatcaacaagaagttcacaagtagatttcacatattctacatatatgccatcaaatgtcgagaaattgtcctttctaagtggttgggcaatgggaaacctcattagattacatttaaaatgatttatgactttaactactccatctgttcctaattacttgatcttttagaaaacaaaattgtttgaaaaaggttgattcttttgtttttctataaactatttattagttcttattgatgaatttttaaacttcaagacaaataattgaatttcattggtatagaattatagaaattgtaaatcataaaaattaatacattaataatcagttttaatatattttcttaatttgtgtgtttttctaaaaaatcaattaaaaaggaacagatggagtacattgtttgtgtttatttgttaggggttagggtatagtaatttacatttagaccaagctaaatataaggttgggtttaaaaaataggagttaggttatagtgttgtataattagacgaagttaaaaatatgttagggtttagtattatacatttagactaatggaatcactaatttgggtgtaggggctagggtttaaggtttagaggtctcatgaatataaaggggtgctaagtaatatataagcttttttattttaagagagtaaggtttactatgttttagcgcaccagaagataagagatcgtgttcttgtatgtaggaaatctcaggtgacaagttgaactagtttaagctttatgtaaaaccaattaagagagttgcaagttctttataagatttctaacaaatgtataagctcattgttgttgaattttggggaactgaacttgagtttatgaggaatttcatttggtatcagaacgagcatcttaaccaaattgtctcttaacaacagatgaagatcttgcagaaaggatagactaacccaaaaaaaatataattgtataacgtccaatcattcttgaaaaagctaactatagtcactggaaggtgaagatgcgagcactcatttgtggccttagagagcatgcatggactacaacaaatctaaaatgggattctcctattgtgaagactaaagatggaaaaactacattgaaacaagatgagaaagtgcacactagactggtttgctctcatggaagtatttgtggcggtaacgtctaaagattatttgaattttaaattgtaaataaaaataaaaatcctaagataaaactcttaatgcatatttgcattgtagctttaaaatttatgatattacttatatttcttttgtttacccttttaaaattacaaattcgtatgtaaaccttcgaagttttatcttgtttttcttctaccttatgttttgacacttttctttcatgttttaaatttttttgtttgattcactcataaacattgaacaaattttagtatttttaaaagaaatgaagattttttttagttttttaaattttttttaattacttattatttaaagttatattttgatcatgtaaaaagtatttttggatccacaacataggcagatccaaagaagattaaaggaggtcatctggtcctcctaaaattttatatttgtattatacccctgtaaaattcatgatattatttatatttttttttacccttttaaaattacaagttcccatgtaaattttttaagttttatcgtgtttttcttactttgtgttttgactttattacttacatgtttttaagttggttcaaccatacatattttggtatttttaatgaaatgaagattttttaagtttttaattacttattatgttaagttatattttgattatgtaaaatgtatttatgggtctgccgcataggcagaccaaaaaaaagattaaatgaggtcagctgatctccctaaaattcaacatttgcattataactttaaaggttattgtattattttgtatttcttcaattttgatctcattgaaattacaaattcgtttacaaaccttttttgtcttttgatgtcgtttatggtatatttgaataatgtggtagaattagtctttgatcttaaagatttggtctcgaagaatgcatatatataaattgcaggtttatatgacatcgtttttgtagatatatttatctaaatgaaaaataaatgttggaaattttttatttttttcgatgatttcactcagatgatcaagagttggatgctctagattttattttgacccggagttttacgaacttgaggaaatagaaaaccggtaatgacctatatatatagtacactccacctcttatgtttgggctgctacgaattcaagatgttctggttccgatgattgagggataataaaattttgagatatttgtcctctgaggcactttttcaaaaccattaacgtgatacaacactttaaaaagacaaggcactttgtccaatcaaagttaccattataccctaaaactgttttttatctataaatcaaaccaaattcgtattccctaaaccaaatttggtttacgtacacggcgactttacagttaccatcaaagtttattttcataattctataagaaatataaatccaataaaaaatcttaaattacagtttctcgactccggatctttattctaaaaacgccttcttcctcgttctccactctcaccaacaacttttgatttcagatctaaacgatg

SEQ ID NO: 23559 - DNA, 3000 bp, Unknown; identical to SEQ ID NO: 7926
  misc_feature (1)..( 3000): 2750-1469P.txt file - cDNA_ID_2144837; gDNA_ID_1621174; Annot_ID_174092

SEQ ID NO: 23560 - DNA, 3003 bp, Unknown; identical to SEQ ID NO: 17554
  misc_feature (1)..( 3003): 2750-1469P.txt file - cDNA_ID_2144864; gDNA_ID_1621174; Annot_ID_174101

SEQ ID NO: 23561 - DNA, 3003 bp, Unknown
  misc_feature (1)..( 3003): 2750-1469P.txt file - cDNA_ID_2144868; gDNA_ID_1621174; Annot_ID_174104
aattctccagattcttccgtcaatctttgaggtaatcaattttctcttaaatttcccaacattttttctgggtttatttcataatcaaagcttttgtcttcaatttatttgttatcgagggctaaaaaaactttgatttatgatcgtttctcttgttttgatgaaatgtatttttattttgttaatttcactacttttgcattcttttgtctgatttttatcttgtctgattattgttttgtctgatttttatcttgtctgattattgttaatgtgtttaagttgtgttttttttttgttttcaatatgaaacttataaattcattagtgtttttgatgatagaattaaaattaaaaactttgaaaaatgtttctcttagtttggtagagaaatggatcaacaaggacaatcatcagctatgaactatggttcaaacccatatcaaaccaacgccatgaccactacaccaaccggttcagaccatccagcttaccatcagatccaccagcaacaacaacaacagctcactcaacagcttcaatctttctgggagactcaattcaaagagattgagaaaaccactgatttcaagaaccatagccttccattggcaagaatcaagaaaatcatgaaagctgatgaagatgtgcgtatgatctcggccgaggcgcctgttgtgttcgccagggcctgcgagatgtttattctggagcttacgttaaggtcttggaaccatactgaggagaacaagagaaggacgttgcagaagaatgatatcgcggctgcggtgactagaactgatatttttgattttcttgtggatattgttcctcgggaggatcttcgtgatgaagtcttgggtggtgttggtgctgaagctgctacagctgcgggttatccgtatggatacttgcctcctggaacagctccaattgggaacccgggaatggttatgggtaacccgggcgcgtatccgccgaacccgtatatgggtcagccaatgtggcaacaaccaggacctgagcagcaggatcctgacaattagcttggcctaataaactgtgagttcttggtttagatttgtgctttatcgttacatggacacaaaacttgatttgattgttcttgtttgttttccgcagagccgtctaattcgaagctctccccggtggatctactcaagaagaagaatgttaatagaaaactattgcgacataaaaagtttggtgtagtagaataatttctgttttatgatccatggatttatctattgttattcagtttggtttatcttgtcatcaaactgttttcggtcaatgtaacaaattcataaactgagaattgaacttacaaaaggctagattactacttataaagttcaaagctacagtgatattgtaaactaaccagtccttacacatagttttcaaaatggcttagctcgagtttaaatagtccgtacttatccctacccataaccaaaaccaaaaaccgacgcttcctatatcactaccaaacgtttacacagtttgtttctgcaagtttttcattacgactccttcaagaattccatctgttccaaagttgccagaaaactcgtgtggatggacaggaccggggaggcggaacgagacagaaaagttaccgggagggcagagactccgcgtttgcatttcaaacacatgagaataccgtttaactcgcttcccgcctgttgtagtgactcctctaactagtaccttcccattgtcttctacttcacagctaaaatatcctgcaatatctcacactcatcaaatcaagaaactggtttagtgggatgagagatcttctagataaagcaaaaagtaactcactttcatctcttttcacaccaggaagcgatacacggaagagataagcgtcatcacattcaccaatgtccatcagtcccaccattagtccaccatgagcttcagatttcacctcaggttttgcagcaacatcactttcttcaccgctagtgcaagtacccgcattatcctctttcacaggttccacgctctcatcaatctcaaccttaacctcattagctgcaacaacgccgttacttttagttacatcaacactaaggctcaaagcaaagctatccaatcccgtaagccgcttaaaccgcgcaacacattcttctctcatacaagaagtatctggatcattaatgaacacaatgctccggataaacttaaacttatgcctaacatgggtttcagggtgcaattttcgcggaaaaagatccacgaaaagagggtaatccctgttcgaatcattgcgtttcgcattgaaatattcacgtaactttttcggcttcatgactagagacggatcaacatttctaataatgtgataatacacacgttctagctcagctctcttcataagtgagccacttaactcatctaccacaacattcttcaacgcttgaatctgaaaagctgattgctttggacgatgatgttgttttcttaaatctggtccaaagtaagttcctatgatgaaatgtaagagaaacaacttgtcttcttcaatatccaatgaaattaacacactttcttcttgttcttgagagttttcagctactaaaggagacacgatctcaggcattgtatcactcatatcctaaacacacaacacaacatcaaaagtttgattctttatgagtgtttatacaaaaagattgaaactttaatagaaaatttgaaaaatactggacatgcaataagaaattataaccaaattggataaaaattggacacatttcgtatcaaaatgggtgggaaaaaacgaaactttttaaggagatttaagaaattgaagcaaatagaaacataatttgttgataaataaacgaaattgagataaaatgttactaaccaggagtgtaaatttagggttgctgcttagtgaatttcgttgtctctcatcagagaaacagaaagcgacttgggaaaaaaactcaagacatg

SEQ ID NO: 23562 - DNA, 3003 bp, Unknown
  misc_feature (1)..( 3003): 2750-1469P.txt file - cDNA_ID_2144897; gDNA_ID_1620664; Annot_ID_163864
tctttgatcgaaagaaatttgcctattacaaatagagtagaaaataaatgatatgacgatttatttaagcttttttaaagattaatattaacgaccaaaataatatatataccacgattatgatttttattaaccttttattttgtaaaaaaaatacactgttaaaattttaacttattcaagtttttgtggaagtctactattgactgccgagggatcaatatagcccagtgctatcggttagaccgatcaatcttggcactcatgtatatgagaatgtttcctttattagttaaaatattgttattttaactatgaaattctggttgttactttggttttggaagccaataccctatactacagcggtaaaaacttgaaagtgtcagaatgtaatcgaaatttacatgaattcaactccaaaaaaccggtggaagaactactacaagcaaattaaccaacaacaaatctaacatgtaccttgaataatcattacacaacaacattgccttgcctgaattaaccttaatcctggagaaatcaaaatcccagaggaactacgccaagaaaaagctcctgaatcagagtaaagccagcctaccagttatggaatcaaccaactcctttggtcctgcacaagaaaagtaatgaacatgttgaggaacaacatcttagctaaaaccgaatttcaaaaaattattgtctctaccaggtccaactgcaagaactgttcttgatccagccgcaacctgttaaaggaagagttttagtttccagagaaacttgttagcgtactactaccacagaaaattcacaaataattttcattcaagagcagtcttttcgtgtttcaataggtcggatggtgtttatgtcttctatagttctaactatttgattagtagaaacttttagattttcttttgaataggaggagctctgattatactttcagcctcaataattgatcaagcacgacaaacctcagttcttccagcatcagctacaacaaaagtcgggaggccaacgctctcagcagcctctgtgatcttattcctgtgagcagaaaagataaatgtagctttcaaatttattgaagacaacttattaacatttgtagtaaagtaataatatgtcttgaagtgcgttttgtttgtatcccccaagattttcacctgcttacatttcttgctgtttttgcaagtgacgactatctttggctgcccattttcctcccatcgccgcagaaggtatcggtcactgaaagaattaagatgaaaacaaaaaaaaacataaaccccggactgatgcatcatacaaagcaaacaactcatttcagacgaaattacctctgcatcaactctgcatacatgccggtggcagcatctgcgaatattaaaaagaaagtcattttacttccagtgttcaaatttcaaacacatttcataagacacttacgtgcacactgtgacgcaattttgcccgttctcatcttcaagtcttgcctaactaccagtacctgtgatcagaacaagctcaaattagttacacaaatgttctgattttaacttgtaatctaaaaatctgacatcattgaaaactcatcaccatccttgtatagattatgcaagtctcttttatgaagctaaaatttcaatcatttgatgggtttggaacataaatcagcttgcattatcactaggttttgttataaggatttaagttataatattttactccaaaccaataaaatctaggggcagagacaagagactatcgttacactagatgatagacaaaccattttaagctcttggtccttgccattgcctggtacagaactctgcttctggaccttgctggataaaagtctgctccttttcactggggaggtcacttgctgtgataaatccaatatcatacctatgatgaatcctatcacaacccctggtatgagattctctgctctaaaactcacagatatcgacttcttttcttgtctctgatcatattcaccggaaaaaaaaaaacaatgatacatttttaactgtccaacaagaatgctggtttagtaagctacaagaaaatttcagaacatgaccgaaacaaccgagtaaataagctcgtttgttgcagtctcagtaagattttagagacaaaaacatgataaattctcgtttgggtggtgagaactgagaggcaaacattcaaatttacaccacaaatctctcaattttatttgccaaatcaaccatagacatacatataagaaacttgtgcactataaagccaaacacttacacttaaagcaaagtacactattaagaaagaatcagactttgactctttgagcttaactgatcttacatcaataaccaaaagaagaaagagctcagaatttgtaatttgtttagtttcaagttttccaattcactagccaactgatgccattcggaagttttgatcaaactagactcaattcctcagcccgagataaattttgacaaaaaagaagcaacaaaactaagaacaaattatcaacagaaaagacggaaaataagtcgaaatcaataccatagcttgaggctgcgaagagtttcgagacgaaggccacatgatacgcttctggagattctccaaggcgacagaggaacaaagctaagcctttaaaatcgaatgcccatgagtatgatgaagaagggagataagagcagccttagtaaccgtaaacgtcagggtgttcatatctctgattacaaaacgacgcgttgtttggggcttaatgtacattctggaaaaatacatggtccaattagaaaagttttaacagtatatagctactaatgtaattactatagaatatctctcgaacacacggtgcgttttactgtcgtcgctcctttttgttggtctgtttccacttcagttcttctccctccggaaaagctacaaccccaatctaaaaccctaacggccatttctaccatcggagctccgaaaatg

SEQ ID NO: 23563 - DNA, 3003 bp, Unknown; identical to SEQ ID NO: 23562
  misc_feature (1)..( 3003): 2750-1469P.txt file - cDNA_ID_2144897; gDNA_ID_2926203; Annot_ID_201988

SEQ ID NO: 23564 - DNA, 3000 bp, Unknown; identical to SEQ ID NO: 3771
  misc_feature (1)..( 3000): 2750-1469P.txt file - cDNA_ID_2144903; gDNA_ID_1620664; Annot_ID_163867

SEQ ID NO: 23565 - DNA, 3000 bp, Unknown; identical to SEQ ID NO: 3771
  misc_feature (1)..( 3000): 2750-1469P.txt file - cDNA_ID_2144903; gDNA_ID_2926203; Annot_ID_201991

SEQ ID NO: 23566 - DNA, 3003 bp, Unknown; identical to SEQ ID NO: 19451
  misc_feature (1)..( 3003): 2750-1469P.txt file - cDNA_ID_2144907; gDNA_ID_1620664; Annot_ID_163868

SEQ ID NO: 23567 - DNA, 3003 bp, Unknown; identical to SEQ ID NO: 19451
  misc_feature (1)..( 3003): 2750-1469P.txt file - cDNA_ID_2144907; gDNA_ID_2926203; Annot_ID_201992

SEQ ID NO: 23568 - DNA, 3003 bp, Unknown
  misc_feature (1)..( 3003): 2750-1469P.txt file - cDNA_ID_2145183; gDNA_ID_1621184; Annot_ID_174379
ccactgaaatgggtccccaaaggtctatatgtaataactcaaaagttgaattacaaatattgtttgaagactgaaaagacaacttcttctgcttagccaaatgacaaatgtgacaataagcagatcctttattcttgtgtttagtagtcctcaaaatgtctgaaatagcatccagtcttgagtaagctggatgtcccatcctcatgtgccataaactaacatccaccaccgcattaacagagactgaatccaatggaggtgtagtatccaacacatagaggttgccaatgcgtctacctctgccaattctcaggtccttggtaagatcctgtatttcacaacatgacggatcaaagatcactcttgaaccaatatctgaagtcaaactactgatgctgatcagattcaaacgaaactcagggagaaataaaacatttcgaagaagaatgttttcatttatctgtactgaacccactccactgattttaacacgtgatcctgttgggagattcacataactcaccacagaatgatccaaagaaacaaataggctcttatcatggcaaacatgatgagttgcaccagagtctatcacccaagtttcagtggaaagagtatgttgggatacattcaatataccaacaaagtagtatgtagagttagagaatgagataccagtgtaatcaataggagaacgtgaaattccagcatctgaagaagaagcagttggttgtgacttcagttgagaactgaacaaggctatgaagttctgaagttgatcattggagagattaccaagcagaccatctagagtagcctgagttggaaccatcggaggcaataaagagacctgagcagcaaccggttgaggtttggtacccttctctggtagtttgcctttaaaaccaggagggtaaccatgctttttgtaacatttctctgcaatatgtcccaccttgttgcagaatgaacagattggacgccctttattaggtccattctgaacatagcaaatcttaggagtcaaagcagtagaagatatcttagagacctgaaaagcagcaggaggagaaacattggtagagaaacctttctgactgtaatcctggtcaagaatattgtaaacttcaaccagagaaggcaaggctttctttgcaatgatctgtctcctgactatagagtaggactcattcaaacctgccaagaatttgacagttttagctctctctgccttctgttgcagacgaagaactttaccacaagtacaaggatcatcaggttcctctgtactgtccaacaaatcccaaagaatacgcaactgagtatagtactcagatagagaaagagaaccctggcgaaaatcctggatctcctgtgtcagattgtacgtacgaggaagattagtcatatgaaaacgtccataaatgtcacgccagatatctgtagcatcattcatgcgtagaatgctacgataaatctgcggagacacagagttcaacaaccatgatttcaccatactattacatctggaccaaaggcgaaagttcccatccgattcaagtggacgaggcaaagaaccatcaacaaaaccaatcttattcttagcatctaacgagatccgcaacgctgcactccaatcatcatagttagtctcatctaagcggatagagacgagattcaaacctggatgatcaccactgtgcataaaaaacggagactgagtcggatccatggaatctgaagtcacaacagctcgcgatgcgccagcagagagcagatctacagctggaggagagatcggaggagagactgtgagaccagtggatcgcgacgatttccatggaacggagcttatcgacgcctttgaacgagtggatttccgagttactcgagcaacagccaccatctttacagaaaaacgagtagtgaacaagaaaaaaacgagatcggagaagaagaaatctgatcggaaacaacaaaaacttagctcgttggctctgataccatattacaagataaggattgagctgagctagggagaaaacttgttaagattttcgattcttatttcttaaagagtaaagtgtacaacaatttccttatatacaattggtctaacttaaccagtcaattaaaccggagaataatctattctaactaaatcggatggtatatatactccaagagagttgttattatacctcaagagcgtaaaggtttagaacgaacacaagattcttgagctgcgaaggctgaatgaagaggtggacaaagagattgctctgagtaagtcatgtgcagcgaagattgttcaacagcttgaaaatgtgaagcatcacagttgcagataagtaagttgttgtctcagagataggcaagcaaagaaaatggtgtaacttgaaggtgctgagaaagtgactgcagaaaaagagagcacaaagagttaacggcgattccattatctgcaacattaaacaaagataaaaaaaagaagaaattttcacagaagtggacgaaaaaagatttgccctcaccgtttgtcaaagtgagaactggttttcacggtttctcttttcattcaatttcggaccaaattaccctgggaaaacttaataatggcacaaaccaaaccgtgcaacagttcgtatcggttcagttgacggcgtaaaccaaaccctacagcagttggttttggtttagttgatgcggttcagttttgaaaaagacaaaaaaaaaaaaaactgaaacgaagaaacccgagaaaacgaaaaagagaagagagtaacggagagatttgagagagaatcagaaagcgaaacgaaattcagtatccattgcttcaaaattcgacataacttcgaattgttgggtagttgaattgagccactgaactcccacatccggggaagtgaaagttactgtttttcccggcgaagccaagagaaagttactttttattccggcgaaatttgaacctccggcgagatagcatctttagctatg

SEQ ID NO: 23569 - DNA, 3003 bp, Unknown; identical to SEQ ID NO: 18254
  misc_feature (1)..( 3003): 2750-1469P.txt file - cDNA_ID_2145226; gDNA_ID_1621118; Annot_ID_171941

SEQ ID NO: 23570 - DNA, 3000 bp, Unknown
  misc_feature (1)..( 3000): 2750-1469P.txt file - cDNA_ID_2145226; gDNA_ID_2926161; Annot_ID_139715
gctttgccgttttcatcgattaaagagagagaggcttcgttcgccgtccgtcgtaaaaatggggttcaagaggaagaaagatgatggtgatggtgaggaaatggaatctgatgttcgtggaaagtctactttcagtgggggtgagaagaggaatgtgatacttccttcgatgattaagaacaaagataagagatcaaaagtgtatgcgaagcagaagcatgagaagaaattggagaagcagaagaagattagagctcgtgatgctgctgagaaacgagctttagagcttggagaagaggtaacgatctggagaagcttttttagggattttttaaaggtgtttatgaatttgagatattaagtttggtgtgtgttattcgtttgtagcctccacaaaagatgattccgaagacgattgagaatacaagagaatctgatgaaactgtttgcagacctgacgatgaagaagtatgtttagatttaaagtttgattcatctcaatttttgaattcaattcattgtcgtgttgctaatttagtgtaattgagtttgtagttgtttgcggatattgatgctgatgagtttaatccagttctgagacgtgagattgcacctaaggtcttgctcacaacatgtcgtttcaattccactgtaagtcttttttttttggtaccattgtttcataagagattctacagatttgtttgtggttttctgattcaagtaatgttgttggattgcagagaggacctgctttaatatctgagttgctttcggtgataccaaactctcattatcaaaagagaggaacctatgatttgaagaaggtgttgttataagtttcatagcttccttgtttctctataaagttagtctttttgcaactatataaccttgttagatatggttctgcagattgtagaatacgcaacgaagaaagattttacatctcttattgttgttcatacaaatcgtagagaacctggttagttttcactgagtttcaagttttgtgctctctactgtatatgctttgtttcaagcttttgctatttcatatgtagatgcgcttcttatcatcggtttgccaaatggtcctactgctcatttcaaattgtcaaatcttgttctaaggaaggatattaaggtatgtaagctaaccattactcttctctacatcgagtgtagattagtgatcactgaattggatgttaaatgtaactgcagaatcacggaaatcctacaagccatcaaccagaactggttttgaataactttacaacgcgtttagggaatcgtgttgggaggtatagttttcatagtgttgttgacttggttttatggtctctttgaatttcttgctgatgttagatttttccttttttcagattttttcaatcactcttccctccggatcctaatttccgtggtaggagagttgtaacattccacaaccagcgtgactttatatttttcagacatcaccggtacataacttcaccttttcttcttcgagttgcttttgctccattctccaataaaactttttattgaacaaatttcaacactatccagttacatatttgagacaaaggaaagcaagagtgataaaggaaaagaagagacaataaaacctcgtcttcaggtcagttttgaccatgttgaatcaaaaagtaatcaacattatcaatgtttgtatcattaaactttggatttttaggaatgcggtcctcgattcacgcttaagctagttactctacagcatggaacttttgacaccaaaggtggagaatttgaatgggttcataaggtaaaatcaccagaaatggacacgagcagcttcattgctgttctttagagtttttgatgatttttaattttattttctgatgtgttttttttttgtatttcattacagcctgaaatggacacgagcaggagaaggttcttcttataaattctgctgtcttccgagtttcaccaagttttgtgtttattttgcattttcgaattttccctacctccgtccaaaattgtatgtctttaaaacttctcatttcttttttcaatatagccatgagccatcgaaacaatcgtaagagtacttgtttcaacaatataggccctcgttttttactaagctatatatagttggttaaacttatgattgtttggtttggtatatatcgacatcgagcatttgaatctacagcagtaatattggattttgtttagtagttaagtggacctttatgttgcataattaatagttttacgatcatcagttcatcaccataataataggattagatttgaggatgtgaatggttacggtggttgagacggataaatccgtttgcgaattagaccgtttttgatttaccatttataaattagagtatgtaagattatagattaagaaaaataaaagaaaatcgtcgcggatcaattatagaccgtttttaccgccgtaagcattcaaatcctgaacatctctaatgataatgtaataggattgacaaaaacaaatctaaaaattaattacgattatttaggtgtagtatagaacgtaattacgtatatgtatgttactatgttgtcaattatgtcggctataatattccagaaagatccttcggaaaggaaaaaaaaaaactgaaacttcggttcgaagttcaaacaatttttcttactgccacgtgttacttcatacacaattaaaatatttttttgtccctctcatttgtcaacgtttaggggaaaaacattaatatacttttactgcattccgccacaaatatctttctttctttttttatggttcttcttcaccccaactgtattagtactgttcgtctttcagaaaaaacaataatagatagaggaaaaaagaaagaaacagagaagtgagaaaaagcccttaaaactcaaacactaaaaaattttcagtgtcgattcaaaaagttttgttatttgatctgtttctgtgtaaaaaaaatg

SEQ ID NO: 23571 - DNA, 3000 bp, Unknown; identical to SEQ ID NO: 23570
  misc_feature (1)..( 3000): 2750-1469P.txt file - cDNA_ID_2145226; gDNA_ID_2926161; Annot_ID_198770

SEQ ID NO: 23572 - DNA, 446 bp, Unknown; identical to SEQ ID NO: 6958
  misc_feature (1)..( 446): 2750-1469P.txt file - cDNA_ID_2145292; gDNA_ID_1621118; Annot_ID_171964

SEQ ID NO: 23573 - DNA, 3003 bp, Unknown
  misc_feature (1)..( 3003): 2750-1469P.txt file - cDNA_ID_2145292; gDNA_ID_2926161; Annot_ID_139705
aggaagacgaagaacaagagaagtaaatacaattcgaaacgttttagagtatgtgaagatggaactaaagagtaaagacacacacaaaaattgctttgtatatcctttttttttttggatagttgttaaggttatatgccactatcgtataatttttgttagaactaaacgaatatatcataagtaaagtttgaggaataatttgccgtttacaggaactcacactgtgtgacacatcacacatggctacgtgaaagattctctcaaaagacactcacctcctgtcaagagatctctacagctagaagcttctctcaaaggtcataatcaaacaaccgtattagaagattcaaatggcatcttaaccttttttgtaccatatccacattgccaacatttagttctcgatcaccatcaagaggtcccaataatctagtacaatacagctgaatggcttgagctgaagaaggtatctgattcgaatcatggttagataaaacctacaagtaccttgttatttagcacattaattgaaagtaatatatattctcaccgtaaatgatcactacattgagtgatcattggtttactttctaaaagttttagattatttatcaatattgtttcatttatttcgtttttcttacaacaaataacagattaattagacgaaaccattttctactattcagctctccaaagaatgacctggtcccattttcttaattgactgtcgaagtgccaacgaaaacacaccacactaatgtcttttatctatcgatgtttatttgaaaaacataatactgtatttattttctcacttagaggcgttcagagtctccctctccactactggaagtcagagattgtgggagtgaatagtttatggataaaaatttttctcaaatcaaatacgtttttcagttgtgcgatctatgatatattttggtgggagtgaataggttttggatatgacagatacacattttactcgtgggtggggtatttagcttacacttatatagacatgataactatacagtacatggcatttcactggatttgggaaatttactgttaaatcatattaatggtttgctctattacgtgagttttaccttctgaatattatagttggagacaaaactttaatgcttttaaaagtataattgggaaaatcttttttcttgcaaaattaaaacattttatttggcaggtggcaacaagtttattgtcaattagcttcaggatgtgtgataacaaaaaaacttcaaatgtagccttgccataagcttcaccgcttatggttttcgttgatgatttaatcctcgaatgtctatgctttcatgttttttacaaaaatttctcggaccaattaaatcctaaactttcattttttgaaatgatatttacagttcttatattcaaaaaaaaaatcaactatgtgaccagtggaagaaacattattcatgtgttatttgaatgtctttcaatataaagttgggtaatttgttttgatgcaagtagtagtaaagtttattttttatttttttattatgtggttaatctggaagtatggaaccaaaaaaaaaaaaaaataaggaggtcatctgaaaccatcggagtttggttgataaaacttttctaaaaaaaactgtattttttatagtttattatgacattacgaacatattttaattttaattttttgctgtttggctccaattgggcttataaaatctggtatttacgaaaaaggaaatctaattatcttatcatcagtaagcttacatattaataaatcttaaacagaaaagaatttggtgtacttgtcaatttacaatgtgtcgtataccttataagtttatagagatagtgaaagtatgttttaaattataattttgcttctttttgggggaaatattaattcaattgttcggtacaaaggcaactttgctttcatttgatgaaatgattgggttttatccatttctttaatttttgttaaaatgattacactgaactcgtaattaacaacgtgagcaaaacaacaatttttaattcgattagtgctacatatatagtcgataaatataataagaaaagttgacgacaaactcagttatggaccggggtgggtagcttattagtgaagctgttgtgttataaacttatagtactgttttaaatttagaagagtatttgtatgagatttagttgtataagaaaagaaaaaactaattttcatattattaatttaattttatgtctttaattaccattatttagtcgtgacttaaataaatctaacatattgagaaattaattataattttttgacaccactaaactttactgagtagtggtgttagttttatatttcctagtatttagttgtatttttttttttgtagtttgacatacccgtatatcatttacctaatagttaatatctttagaaatatatactattagcatgcccccgcatagtttataacaaatatatagttaataacttaatacatatagaaacatcattcatatgtggtatatacatcatcacagttacatataaatatatatatatatatatatattactaatcccttccaccgagaaaaacagtatattctatacctacaatttcaaaaaacaaatgtttcatataactttacttaatagttttttttttttttctgttaaagaactttacttagtagttctataatttgtttcatagttaaaaaagaattcaatacctactcgttctttaaatattttcattgttttttgttgttttagaaagaaatgggctccaactcaacatccatgttatttataaatatatccacctctagtcttaatatttcactactcaaacaagtttctgaagaagagacagagagagaaggatagagtaaaagctaagagagagagcgagactgagagagaaagaaagagatatcattttggttattaagtaattaacttatactaatcatg

SEQ ID NO: 23574 - DNA, 3003 bp, Unknown; identical to SEQ ID NO: 23573
  misc_feature (1)..( 3003): 2750-1469P.txt file - cDNA_ID_2145292; gDNA_ID_2926161; Annot_ID_198753

SEQ ID NO: 23575 - DNA, 3000 bp, Unknown; identical to SEQ ID NO: 3722
  misc_feature (1)..( 3000): 2750-1469P.txt file - cDNA_ID_2145352; gDNA_ID_2926149; Annot_ID_197907

SEQ ID NO: 23576 - DNA, 3000 bp, Unknown; identical to SEQ ID NO: 1834
  misc_feature (1)..( 3000): 2750-1469P.txt file - cDNA_ID_2145412; gDNA_ID_1620454; Annot_ID_157598

SEQ ID NO: 23577 - DNA, 3003 bp, Unknown
  misc_feature (1)..( 3003): 2750-1469P.txt file - cDNA_ID_2145422; gDNA_ID_1620454; Annot_ID_157601
aacattgcctgtgatgcacattctgggaactaaccgatctaagagagattttaaggcttgctggtgaacccttcttcaatgcttgaatggtagctgagatccaaccatctgcttcttgagtggcctctctctcctaagcaacacatatgatggtagagtgcgttgtcaaaggtaaatcagtcaactcaggatcgcaagtcaacatctctatatataaatgaaaagcttacaagtgcagatataatttcttcgactgttctccttgagaaacacctatcaataacatctaacctgcgcaacaaacggggagataaaaaataactgtcctctgcacttttataaattttcaattaaagatcagatgagaaatgagttctgtaaagagcgattgaaaacctgacagcaatacgaaattgaaattatagaaaaaatgtgttataatcatggtcaataaccgagaaaatgtaatcaggtaaaaccatactagtagaaagagtaaaagagataaaaatcatatagacttgcctgcggtaagcactctgctgtttcaggcgcggatgctgggtgtatgcatcgagaattgttgaggcaaaagttggatcatttgaattaattctgcaaagatctgcttctaatgcagtcaacctctgtggaaaggagtaaacctaactaagtagcaatccttggtgaagcagatagtgcttgacactagtagctatacaatatctgatgtgtaaagtcaattcagaatgtcttacgaaatagacgcacgcaaaggaagttcataccgttgaaggcacaaaatgagttgcaaggccacaagcaagcatttcagcaccatctaatctagctcctgtgaggccaacatactcccctgaacaaaaaagacaagaaagcattttcaaactttggtggctttaagaagatgcaaaaaaaggaaatatagcttctgttaccaaaaaaaccagggagccttgacaagaagtaggaggcgcctacatctggaaagagccccagagctgtctcaggcatggcaaaaaccttggagaaagtcgaaagatatgagcatattttggagcgacctatttgtcatccatggacatgtttaaggaaagattaccgtgttctcagttgcaatacgaaatcgaccatggacggatacaccagctccgcctcccatgacgataccattcaagattgaaacctatacgaattgatgagtttatccactcgggagtgattttacaaaaacaaaacgaaattatagcgagacctgagctttgctatatgtggccataacatagttgagcatgtattcagatgagaagtaattggcaccgagtctccagttacctagtcaacgaacgaagatagagaaagagtgtataaaagctgaaagtaagaaacagaaaagaatgggtggtaaaccttgattgatgtcacgaacaacagctgcaacatcgccaccagcacaaaaggctctcccatgaccctgtggcaaagttattcagtactaaatgtgtgtaagcggaagagataaggataatgattacctttaggatgacaagtttcacactagggtcctcctcaaatgcaaggaacagttgcagcaatcgagagatctacagaaaaaaatgagtctaagccaatacagtacgcatgtacaagaagggaaatattcgataccatgtggaaggacagagcattcagctgctttggtctgtttagtgtcaagattctaacactcgatttctcttccaccaaaacctgtgatcatattattaattcagagagcgaagaattgatcgtcgtagattcggattaaagacgcaagaaagagacctgagactgagaggccatctcgactgccatctttcttactggtcagattcgcctttgtatctccggagagaggagcagcaatgggatcagaaattaccactaatggctaacaaaatcttcacccgcttagtttaggaagttgatattgggccttatagtaatctgttggttttaataatgggctttattttgttaatagagcaaatggaactttgcttttcaaactcaatttcaaagccctcttgcaacatgcttgatgaatgagaagattatatgtttttatcgagtacgttagacatgtgttttttttgttaggaagctagttttccaactaaccaacacctccctctagcataaaatgacacgtgggcaccagatcaatcattaaaaaagtcttcaaaaattctcaacaaccacttctaaaagtcagacatgaaagccctcgcctctcgatatatagataatttgcatatacatgaaaactcaacaatctgacgcatatgcaacagagttgaaagatggaaagagcaaggatacgatggccgagtggaagaggaattaggctgaggcagaagacaaagagactgcgtgcgagagtgagaagctttttcaggcttctcaggagctggtgctgcagaaggcctccgctggtcagagaagacggtcttgattacacatctatacgtcgctctaactctttctacgccgatgcaattgcagactgcattgacttcatcaaccgctcctccgcttgacagcttctcattctcttccaataattctttcttccattttgtaaaatccaatgtttctgtatatgcaaccaattcgaattctttgtattattttatttttttgacgagtcgatgcatctttaagaagtgggcttataatgggcctgatgatactacatccttagaaaccacattagtttaaatcagatctgacaactgcagtggttcatacccttaaagattaaaggcccgttgaaaacccattaagtatttcacatcatattctgggccagatgaacaatctgacagctatacaagtccattcccttatccaaaggcccgttaaaagcccacgtaaaatgaatgtgtcagatccttccttgctcgattcaacgcgtccgagtctcagacactccccggcgagatg

SEQ ID NO: 23578 - DNA, 3000 bp, Unknown; identical to SEQ ID NO: 1826
  misc_feature (1)..( 3000): 2750-1469P.txt file - cDNA_ID_2145511; gDNA_ID_1620453; Annot_ID_157555

SEQ ID NO: 23579 - DNA, 3003 bp, Unknown
  misc_feature (1)..( 3003): 2750-1469P.txt file - cDNA_ID_2145580; gDNA_ID_1620453; Annot_ID_157574
ggtaatacgagacaagttagttcggtgtacatatcaaattaattgaggtgcacgatatctataattaatgcaggatagttacagcgagtttacatctattttattatactactaaattttgaatattttgttcaaaaaggtgcgaaataaaaataattatgccaagttgataaaattatgattgctatgttctgaatgatgaaataagcattatgagaaattggtagaacgtgttactttacaatattacatgtgttttgctatagagactatagtaacatggtcttttttaaaatgtcaataaattcaacctgaaccaccgaatatggaaggctcgccggacgagaagagaaaaaaatattgtcggatactgccggagcccaacttgtaaggttgaatttactggaaacaaaaacgttgtagggtcgaggaaagctaagagagtgacgactataggtaggtatctattgtttgtagttttagacttttattaggattttacagatgactacacttcaaaattatgaatttaaatttcgatggtttacacaaaaagttatttatctgatccgagaaaaaaaaacagaacaaaatccttttttccagtaaatctaaaaagatgactactattttcagtattttagtgaaagaaatttatatcactttttttttttataaacgatattgactgatctgatcaactctgataaaaatgtattaaaatgattcagtctccccaaaaaatcaacataatccgtgtctcaagttttcaaatgtgttacgagtaatatcttggatcatcaaatcgcctattactaattaccaaatgaattgtttgcgtatttggtcgaaactcatacttttcatacaaatatgttttttttttgtttcttaggtggattgaacatgtattagttcctttcaacatttcttcaattctcaaccactagtagaccacaaatgtgtaggcactttttaaacttaaaattgatctatttttgttgagccttttgtacatatgggcatattttgacataaaaactagaatagaagtatattctacttggacttataagcttgggtactgtttggtccgcaaaatgacgatttcgccttcaaatttgttgatgataatccaattcgttttttccgtcatgagaccaacaaccctcaccgtctccatcgactgcaattctctccgtcgtgataatcaaatttgtttattaacaccgactctacattccatcaaaatcattattttcgactccatcaatatcgtttccttatgcttcgatgattcacacaacgtttatacgaccaacctttttcgatgaatccaatagaactaattaaacaagttttgatgtaagatatctaagctctaagagatgatgttatagaacccaaattctctaattatagatgcggatcgaatcatcttaaccgtaaaagataatgtctaaagaactcagaacaatcatgtatgcaataactgaaaagtatatgattgtgaatcatgagcaaatcttaagtcattttcgtcaaaattatatctcaagacccaattaaaattttaaagaagaaaaaataataaaggcaaattaatattttagaaaaaacaaaaatatccgtctttataatcactcgagaatatggctaaattcataatagaccatactttattatggtttttctataattaatcctaattttattagttgcatgaaattttggaaatcttataaaatacaataacttttggtccataatatattgtaatattgtgtatagttttttagtcaatgattgtttctaattatactgatttattaccaatttacactgccacttttggttagttgcatgaaaattttggaaggctagaaaaaataaattttcgcgcaacaaaatcatactcctttgtttatagttatggtgatggaaatcaaatacgtaccagacctttgtttatagttaaggaaaaaagaattaaagtcttcaaactctaatttgctggtcaaatccaaatttggcgtgacatgtgcccgtaattaaaaattaattgcgtaattaaatactaactttctaattagctgcatcatcgagacgaataattgagtgtattggtcaattgaatacgacaaaaattatttaaatagtcggtaaaatacccatagaaattgactaatccgtcacctcccccggataatacagttttaacatttggttttctaattcaaactaacatttaaattccctaaaaacctttacacgacctattgccatctaatccaaaactaaaagtactagttttttttttctcaactcaattataataaataagaggaaaaaacaccaaacaacaaaacaaaaacatatcatataaaaaatcataaatttttaagaggcaaagtaggtcagaattcttattaaaaaaaaaattaaccagctaatgaattaacataacactctctaaaaacgagtaagacaaatttggacaatacaatattttaaattaaaagaaaaagaaacaaatgattgtaagaatttgtaactttagaaaaatatagtacaacatcttcaacctccacaatttaataaaaaggatgaagcatatgatttagaaaaattattaaaattagttagaatctcttcggtttctcaacgtttgttttgtattttttgtgttcctctattattatttttgtattgttcacttaatttcttgttttccaataatctattttgttttacatgtctttttagaaatggtaaacaattaaagtaaaaaagagacagaggtggctcgaggcagaaaagtctacaatatatccatcctcggaaaaataaagaagataaaatcagttccgtatctatataagaaaatagacaaaagtcacaaaacctcatcagagctgtccgaattctccaagtctctcatcatcacacccactccaacaaactttctacgagagaaaaaaacaaaaagaaaaacaaacaatg

SEQ ID NO: 23580 - DNA, 953 bp, Unknown; identical to SEQ ID NO: 1848
  misc_feature (1)..( 953): 2750-1469P.txt file - cDNA_ID_2145696; gDNA_ID_1620457; Annot_ID_157657

SEQ ID NO: 23581 - DNA, 3000 bp, Unknown; identical to SEQ ID NO: 1851
  misc_feature (1)..( 3000): 2750-1469P.txt file - cDNA_ID_2145707; gDNA_ID_1620457; Annot_ID_157660

SEQ ID NO: 23582 - DNA, 1612 bp, Unknown; identical to SEQ ID NO: 1850
  misc_feature (1)..( 1612): 2750-1469P.txt file - cDNA_ID_2145723; gDNA_ID_1620457; Annot_ID_157663

SEQ ID NO: 23583 - DNA, 3000 bp, Unknown; identical to SEQ ID NO: 1841
  misc_feature (1)..( 3000): 2750-1469P.txt file - cDNA_ID_2145738; gDNA_ID_1620455; Annot_ID_157607

SEQ ID NO: 23584 - DNA, 3003 bp, Unknown
  misc_feature (1)..( 3003): 2750-1469P.txt file - cDNA_ID_2145740; gDNA_ID_1620455; Annot_ID_157608
ggttaaagtagaagaagaagatgtagaagaaaagtggttaacgttaatatatattacaaatatgcaagttagaggtttattgttacttttcggctttatacaaaaactaccgttgagatttaacttaacggtatcggaggagagatcacatgatggcttaaaacatgccggagatactttttccgaccaatctctttatcttctacaactgtaaattcctccatctccggattaattcaagacatttttgtttaaaattttatgtgaagtaataactttttaatagaacaaaatgcaacataacgttcacattcttctcaatcaaaattgagcaaagctaaatttgcagagaggaaaaaataagatggaatattttgattgtttattgcttattgtatttgtttgctttatgttgagttggtttagtcctaatttcataaaaaaaaaaccatagaacctattgataacatattacagtttgggacaagcttaagctgcacgatactgaatccaaagaaatgtctattataaatagttgttgctagggcactagggttttgtacatcgttttggcgagcctggtatatttgatgagcctggtctattgggtggccctcttccatgtgcatgcggtgaacaacttccacctacctcagccttgatctctgtgatcaccttttgatcccaaaccccttctcctattaatgaaacaaacagcactttcaatagttagagtaaaaaacatttttctatattttagttaaatcaatccaaatcaaacaaacattgtattaaaaaccagttaacatatctagtgggagaaaaattataaggatttcagtttttttctcttttcttcatatgctaagaaattgtaatattaaactgcaaaaaggaaattaaatggtttaaactttattttctttgagttttctattatttgagagatattttgctaaagatggaatctgaaaccaaaatcgagatcaaagtaaatatggagtaacaatggacccccattcatttttaaatccaaaaactgaaccaaacttaaactgggcatatataaaaacttactggcttcgtatggtactcgagcctctgctgtgtttgatagtccagtgagcaacagaaaactcaaagtcagtaagcaaaccacaacgttatacatttttttatagtatggtcgtttttttttttccggtacgtagttttaaaaggatgagtttttgaaatgtgaattcatgaatatatgtagagaaatgaactcacgtaatcacgttgcgatgataatttcaatgatttttcttttgtaataaagataaggttacgcggatactcctttttttctttgtggaaaatgcgtaattgactcttgaaatgtatcaagtcctcttatggagaacaacgtatttgactacttcccaataccggtatcattagtggaagaatcagaattaaggtaatggtttacttgttattttcttcatattgtatataacgttttcttgtgtggtcaaatgtaataacaatccccttttttcattcatgtctatgagtttgttagattgagtgaactttattacgcttatctctattatgaatcttggttaggtttgttgactctgaaacattgtttaattcaggcctacataatgaacttgtattttttcttttagttacatttttcttgttgccgtttcctaccaaaagaactttccacaaaatgttttcaaaatggatgggttttgataaagggttttgtgcaaaacaaattcttcaactcaccaatttttgcaaagaaaccatatataattaatttgcgcttgtagctcgagcaactcttccaatttcgattgtgaatgaagcatcaagcaaactctacatgagtggtaacatagtccaaacctgacgcggataaataacattgaaaaatcaaagttcacccacctccacttgattacaatatgtaggacataaagtgtctttcgttagactttgtcaagctaagtttgctctgccactcataagctattggaaaggcatccaccataaaaatttaaggagtttttttggactccttgatgctttccaatttgcttagaaaagatttggaaattaaggtttttctacatactcacaaagtcacaattgttttaaaaaaattaatttatcattgttgactttgaaaaagtgaatgtgacgagaataaatagaacaagatgagctaggaaaacaattaagagatttaaaaagatgttaaaagtgttatattggtaaaaatcaaatcctctatcgtctccaccaatcaaccccacaaatcttcatccatcttgaaatgaacattaacaatgttgatttttatcaacggtttgcaactgcatgcagttgtggaattgccaaatagtgccatggaaaatatgtgcataaattaatttcaagccatacttggtttgaataagcatgattatattacatatgcgtttacaaatttttgaataaaatctgcaaaattcgaacccccatatcaaatcttgaatatcccaaagtataattcagtagaaaacggagatttactttgtaaatcataaagatattctgacagtacataattattatatatttaagtcggattaacgatgtttagcttcatttttcaagaattctaacatgaaaaattggatatatataggtctcagattcttacatgtgaattgtgaaatattgtgagttggagaagcgtgcttttgttcaaccgtgcgctttacgtaaaggtatgtcattggtgcatgggagcctttaattttttactgtaaaaatatctcaagtgacccgtgaatctaaagattataaagattacatatatagagaaggctcgtttgtctttaatatacataaactagcaatatttgaatattcatggcatgaccccattattgctatataaaaagagccaagtgtccaattcctgatttcagatgaagtaaaagacaaccaaatatg

SEQ ID NO: 23585 - DNA, 3000 bp, Unknown; identical to SEQ ID NO: 1837
  misc_feature (1)..( 3000): 2750-1469P.txt file - cDNA_ID_2145786; gDNA_ID_1620455; Annot_ID_157624

SEQ ID NO: 23586 - DNA, 3000 bp, Unknown; identical to SEQ ID NO: 1854
  misc_feature (1)..( 3000): 2750-1469P.txt file - cDNA_ID_2145889; gDNA_ID_1620458; Annot_ID_157683

SEQ ID NO: 23587 - DNA, 3000 bp, Unknown; identical to SEQ ID NO: 1853
  misc_feature (1)..( 3000): 2750-1469P.txt file - cDNA_ID_2145892; gDNA_ID_1620458; Annot_ID_157684

SEQ ID NO: 23588 - DNA, 3003 bp, Unknown
  misc_feature (1)..( 3003): 2750-1469P.txt file - cDNA_ID_2145912; gDNA_ID_1620459; Annot_ID_157694
atcaaaggatctcaatttctttagtcaacaggtgttccttctcttcttcctcgattcggaggtagagaagaaaaatggcagctccggcgatcctaaacggcggcgatgcgacggagagagaaacacgaatggctcactctgcaatgacattggttcaggtcataaatggaggataccatgtggttacgaaagtagctcttaacgttggtgtaaatcagctcgttttttgtgtctttcgcgatcttcttgctctctccattctcgcacctctcgcttttttccgtgaaaggtccctttttatcttcttctcaaaatctctctgtttctttatccttttgcttgaattgctaaagtctctgaagtctctgtttctgattgttttgatgagtttatatgcggcaaaatcagacaaatagtttgatctctctggaattggaattagggttgtttttctttgttaattctggttctattgtttaatgatggattgcaattttgtgtgacttggatttgtcttttgataaagatttgctcttttaatttcttgtagaacgatcagacctcctatgaatagaagcatcttcttttcactcttctttcttggtttagcagggtaaagtaatcagcttgtatctctttatcttttgaatcatgctaatgaaagattctaataacaacattcaatctcaatcttgataggatatttgggaaccagttactatttcttatgggtttatcttacacgaatccaacttatgctgctgctatacaaccatcaatccctgtctttacatttctcttggctgtcttgatggggtgagtatgagtttcctcaacattactgtaaaatgtgaaaatttgtaatataaagtttcaatcttttgatggtcttcttctttgtatacagtacagaaaaagtgaacttgttgaaagtcgagggccaaacgaaagttggaggtactcttgtttgtgtttcgggtgctatagcgatggctttgtttcgtggtccagccttgtttggaggtaaagatgcagcagattcagtgaaaagtgtaattattgatagaagtcaaccagagcttaatgggtggttagtctctagttttcttggtcttgggtttgatcaatggcacattggagttttatgtttgattggaaactgtatgtgtatggctgcttttctcgctgtccaagcaccggttttgaagaagtatcctgcctacctttcggttgctgcgtattcatacttcttcggtgcatcaataatgatcacaacagctatcttgtttgttagagagcctaaagattggagcttaacacaatctgaggttcttgctgttatattcgcagtaagttttcacaaccgagatgtaatatgtttatttgggtgtgtttgtgttttggagcttgagctcaaatcatttgaacttgaactcaaaaagattggaactcgattctgtacatacggattcatcttactagtttgtgtttaattgttttcttttcggtttttattcctcagggagtgtttgcctcagctctaaactatggactcttgacttggtccaataaaattcttggagctgctttggtttccctatacaatcctcttcagcctgcaacatcggcctttttatcgacaattttcctcggcagcccgatctatcttggaaggtttttaaattttatgcactcttctttgtatctttgattcatccagacacatacaaacctttctgtcttcttgtattggatcatataaacaccttggtttttgttctctccgcagcgttttgggtggaatcctcatcatttgcgggctttatatggttacttgggcatcttacagagagcaacaaacaacatcagctgggaatgagattgcttcttctagtgatgtaagaatctcggaacctttcatttacagagatgagactggtaaataaataagaaaaggtaaagaaaggatacttgtaccgttgtacgtagttaatatcagacaaaaacttgacaaatcatacaattttttcgagttcaaacattgattctttaaacggtaaataattcaaaataattacttcgcctcttttttggtaatgcaagttcaactatggaaacaaatctctatttttattttaagaattggttgtttcaatacgttttttagttgggtgacaaagaagcgtatattttaaattcaatcttagataaaaggaatcaagaacacttaaaaagtcattgtacctaaagacaagcacgattaacaaaaaggaaaacattatatatgtcaacggacatgttacatacttacatgtcagtgtgatataagctgggaagaagacaacaaaagttttagcaacatattatcttgaatttgtgaagatagtgtctattccataattccaacagagtggtatgtctttgcgacatacacacatagacgagctcatgagaatcaagaatcaatatatattatctatatctaacatattccacgcatttcgagtaaccaagatagatgttttagtagttattgccaaactatgtgtgtgcataaagtattaacaagtaggtactgacctagtaaaaaaatgaaaggtataacttataagtttcttacgagtacttagatcactcatgacatcattgtccaagtggaaaccattaatagcaaataaacaaaaatcattgacttattgaagtacgaaattattgactttctcccatttcatcatcaataatggtaacaatttctaatttgtgtggatagtatcttatacgtcatgacaactcttgggaatggtaatttaaccatagaagagattcaatttctttttctaagtttattagattcctttgtttgctaaatcaagattctttcaagttgaagattctttctaatagtatatacaagagggaagaatctttcaactatcactccctacaaattccatgagaaaattcacttttccaatcaaaacgtaaagaagaagaggaagaatg

SEQ ID NO: 23589 - DNA, 3003 bp, Unknown
  misc_feature (1)..( 3003): 2750-1469P.txt file - cDNA_ID_2145935; gDNA_ID_1620459; Annot_ID_157701
gcattttccggcggattatcgctcttcgtcgaacctttagatcgcttattcaccgatttcctcctggattcacgttcgttatccgtggatgactcatcgtgaatctgttctggctccaagatctgaccataaccgacgcgaatcttacctccggtgagcgagctaggagcgaaaggaccgacgaggaaagagagggaaagccataatagtagcgatttggcaggttcagattcgaagtagaagaaggagagagataatatgatgagggagattgagacggagattgaaatgaaaagcttgttagggattctagcttcttcttcttcctccgccgtgtgagaagaagaaggacgagattggaaaacgaatctaggcctgtcttcgtcgaaaaaatccattgttgctctgttgcactgtagaagaagctgaaacaataaataaaacttagaaaaaaaaatctcagaaataagtgtttttgggcttttgaaagtccatatacgaagatttttgggtattgtaaagcccatatatattaaaatttagcatatgacaaaattggttatacgaattttaattagttaattttagagtaagcaaacccttaattaattaaattttagtggaaagcgtgtacactcgagatcgcagatagagatagtaggactcagagaagattgtgccactaatcatgctcttgagcctttctgttcaacaacgaagcaattgcagagaaatcacacgtttgtgtacgacattttttttttttaacgtcgatttattggttagttttatattgcaactatattataaaatgaaaatattgttgacggaaaaatggaaattttaggagccagaaaaaagggaaggaaacaataattcactattacgaaaatatataaacttgtacgaaaagtcaaggaaaccatttatcacctgttacaacttggaatggaaagcggagaatatattaggcaaaggctagagaagttaaataaaggataaaagcttacggttcagattggagatgacggcatttatgaaatatcgacggtttatctgtggataattactgtaggttgagatgcaggagattcgagcttagcaccaacagacactaccataataaatagcttaataatatattcctttttagctgagatattataaagtagggtttaatttgttattatcacgagaaccacacaaatacgcggcaaagagagagaaagatagagagagagagagagagagagagagaaagcggtggagtcgtgataagggagaagctctggatacagtctcttcccgtcgtcggagacggagtttatgcctattggctcctgaggtaaaatcgagatcgcctttttttattttgtttctcgtgttttgactgatgcgcttttgattctctcttcgtttgtttgctttgagtatatttttattattggagtcgcgtttctgagaactttggatttgaacgtatacggattggtttttttattgaattttagggttacgcttttttgtgggtttttttttttttttatgttatcgtttcggtttgtgaatttcttcgttcattcagatctgagataaattgagtctatggttggttggtttttatggtaaaacttcagcagagttgaaattaggtactagaattttagatatgatgatagtttctcagagattatgaattgggatctttctgtacctctttgcagtttggtttcttagggttttgaccttcgccagtattggatttggatttcattgttaatatgcctttgtgtaagacatgttctagataacattatttgtacgataccttgaattgcctgttttcgttgcatttctaatgtctttatatactgcttttgtgctcattatcaggttagattaagcttcgtatttagtggattttcttcttttgagatatggaacaagattacatctgctcagggtgctaccagtatcgagttttttcattgcaagaagcactcgattggcggtttcttgtgcactcagatttccttatcggctctttcgtgaactgcacctagtggtcagaccttctgcgatctttacggaaggtgtgatgcaaatttctgattcaggtatgggtttctgaataaatctgttgacacttgcatcgtagctttcacaagatactttgaatagatgatattcctcagtgtaagaattgttattttggtttctgacatattttggtttctgtgtggtaaaggtagaatttattttcagtatctaaataagcaaatattggatttatcaattttctctaagcctttttagagtatgaacgcaatatgcaaatttagaaaaaaggaaaaaagtgctatcaagaataggaaaattcgaaaaggaatattagatgataagttttggaaaaacacgtcaaatactccatacttatagatggcttatatgactatagttcttctttgaaattggaacatgattgttcgtatggtatctttgttttctgcagggctgatgtttgcaagttatcctaccttcacacagtcctagagtgtcatctaaatctgttccctgcactcaaaaactagttggtccttcttccatatcctgttcttatgagagcttgttgaagaaggatgaatcagttttttttcaagttatgacttttcttagctgtgtcttttcctcgagtctctgaaccccttgagtgaaatgttgtgagcataagtttcgtccagctacccagaacattactttttgttagtgcgtcttccaattctcagtatgttttgtctttttctcttagcgtctttcttttgccttgttggtcaacccattgatgttcaaacttcaaagtaaataagggtcagtctacccagcgggagaatcattgatcttgctgccatacgaacaactggaagattaaagtgatagacatatttcagaagttctttacagagaaatacttaaggggatactttgcttcacctagaggcgatg

SEQ ID NO: 23590 - DNA, 3003 bp, Unknown
  misc_feature (1)..( 3003): 2750-1469P.txt file - cDNA_ID_2145941; gDNA_ID_1620459; Annot_ID_157704
cttattctgtgatacttgtagataaagaagctatggaggaataagaaatgtattatgattaactgagaagtctacaatgtctacatctacaagtgcagagactcggagatggtacgagtaaaggacatctgataaaactgcagatttaagagaaggtacacaaggaactctcttattttttcagaccctgaattcaagaaacattgtgttgtactgaagaaactatatttggagattctggattattgattgattgatactacagagagacaagatcaaaccagtacaaaacaagaaacaaacaagcttgacgacacaatagaaaagggctcttcaatcttctaaagtctacagaggtttagttttactctcttctgaattggggttgtcgactgagtcggtttttccatctttagaaccgttctggttagcctttccatcgtcaaacaacatgggatcaagctcagccaacagtctagcagccagaggaagaccacgagacttgttcatcagctcatctatacatttcttgtcgttccttggagactctttctctctcttctggatcattgcttcatatatcttccaaacactgttagaatcagatagcggccaaagacgatggatctcatgtttctgaacaacaaggttcttcgccagattctcatctctggtcgtgtatatgaccctcccaccagaccctttagggaatccatctgaaagatactttccccatttttcaccctcgttgagtttcgcatcgagtttctcgtcccagttatcgatctcctggacatcatcaaacacaatcagatacttcttccacctcagattcaagtgaagtgcatagagcagagcagagatctccttctctttagccgtctctccatcaatttctccagcttcctgcctgtttgaaacttcttctactacttctctatggatggattcgaacattgactcttcaactccaagacccttcaagatcgtcttcaacacacatatcttcccatcaagtccctccttagattcattgctatgcatagatacccaaatcctcggggcataagcattcctcacatcataatcattgaagatctgctggcataatgctgtcttcccaacaccgtattctccgacaaccacaagactcttgaacagcttgtaagacttttgatccaacaagaagtgttgcaatgatttgatctcattctcgaaaccatagatatcatgacctggaagtccagaatcagtttccacacgatcctccacctgttttgtttcgtcaccagttgtccctagccattcgttgtatctatcagcgaaccgatttgtgaagtcaactctgcctacacttgttaatccgcgcgatgaatcttcttgagtcatttccaagcaaaagctggaacaaaaaaaagatttgcaggtgaaatcaaactaagttttggtttttcttcttttccccagaaaaagaaaatgaagcaacagaagaagaatacaggggagagaaaaaacaaaaggaagaaaaaaagggaaaaaaaaaacactactaatttttttatttttttttcgccaaattggagggaaaaaaaaggattttaatgttgttagccctttttgatgcaatcaatttttgaaaaaccatcacttcttctcactaccccttatcttgttattctttatttctttattaaattttacatataacaaattctaaaatcaaccaatcaaattcattatctctcatctccccataaccaccaaaatctactaaaatgcttaataaactcatttttcttcttcttcctacgatttgctccctaaaaacgtttttcactttctttctttttcttcttctgcatacactatttaagttcactattaaatctgcaaagacaaaaaatgggatcatatacacatatctcttctcccctccgtgttcttcttcacgcactattaaagatatttgtttacttcttcttatccatcatacttttaggcaaataggtaagatatgacgttggtgacgaatatacttggttgaattcgtagattaaatgctgtttttttgtagacaaatttggagatttcagatttggaacaactgaaacaaatgtgtacaactatgttaaacaaatacgaaaatttaaaacccaattaacaaactttaaaaatgcatacatggtggtaatgaaacaactcaacaagtttttaacaaaaaaaatcatatttttctaaattactgaaattcttatcacgaaagcccatattcatacactaacaaccttatacttccatagttactttgtatatttgaacaaaaaaattaatattttaaactacttgtatttttatatatagaaatataccgatacaaagtaatgttaaatttatgagacaatactattggttccaccagtaaaaattaatttaaagttgataacaactaaatttactaaattctcgatattgtacaactatgagtaaaaatgtgcaattgagcacaactgtacaactatgagcaaatttgtgatgttatttaattattatttttcaaaataacgaggccacatcagatatttgtagatattcttgatatttcatttttttatatttttatcaaaacacttagattcatattaaaaactttatttttcaaaacacttttttttaacaacattcttagattcatagttttgtggtaaattttttgataaaaatatttagattgataaaaaaattcggtgattttttggatattgcataattaggacaccatgtgattaaataaattgaatttcgtttttttggcccaatgacatagttgtacacgagtgtaccagttgtacctaaaaacttagattcatacatgacacaaactctaaaataatcaaatatgtttcaacaaagagctaaagaagcaatctcattatctacacaaactcacacagtctcattatctaaagcaaataggtaaagaaacatattccaccagctgagatg

SEQ ID NO: 23591 - DNA, 3000 bp, Unknown
  misc_feature (1)..( 3000): 2750-1469P.txt file - cDNA_ID_2145945; gDNA_ID_1620459; Annot_ID_157705
ataaacttcgtgtggcttctaatggctcacttcggactaacagatcagttccagatcaacaaaggagatgccagagccaaactcatcataggcaagtgagagtgaggaagaacaacattccccgtaatctaaattcgttctgcttttgtatttctttctactttcttctgctcaaaacaatgaactcttcttttctgcataaagatgtgacatttgtaagctttttgtgatgaaaattatcccatttatcctttttatattccaacaagagtcatgacatgtatgagattgccttgaagatcattctagctgattccagattacacaattccaaaaacctgcgaaagacaagtgaactatctcaatgtaccttaaacaatgaagtaaatgtgaattctgatcaaaactcaagaaatctgcgagggaagaaatcttttggccgccattgaaaccaatagcacacacgatgactgtgagagaagaagccgcatagcctaaatatgagagaagaagccgcatagactaaattgaaatcactctaattgatcctcgatacgactgaagaatgaagaaaccacacacaatcaaatccactgaaatcaaacctcatcgatacttaaagagcttcaatttcagactgattctagggttggaacaatcgctctcccttcgattcgatttcaatttcaatccacattttaagtgggtttcgctgcatataaatttttcttttttttatttttcttgagctgttctacttaaacgacgctttttttctggtccgaattgggccggcctgctaacaaccgcacgttacaaatcgaagctcatatctgctttacaaagcccaacgttttaacggaccggacgcggtcatttaacttaagtagtatttgtgaaagtatcacgtatgttcagaaataaagtactgtatttgtgttatttggtttggaagtacagttcatgtataaatttatggttgtttgtaacgaggtcgtaacaataatgattaaggggtttagggagaacggagtaacttctttattaatgacgaacggaaagatagtaattaacagaacggaaaaccgtaagtacagaacggagaaccgaaagtacaggtcggaaaacagatattgatggtcggaaaaccagaaaatacagaacggaaaaccagaaagtaagagataaagagctaggcagcaattctctcttaaattctctgagtggtgacttaggttctggacccctcttcttagtagtgtctcctcttatttataggcaaggagctgatctagggttctcttagtctctcttgcgatttctccgttttgcccttctgaatttatcgggctgggccaagccgtgatgggccgagctgtgatgggccgagcagtcattctgatgggccgttgttctgatgggccgttcatccttgttaggagctttcttgacttgttctatttgtgtttgggccgaattgggcatggaaggcaaagcccgtatcccacaatggtgttttaaaccgaaacattaaactaaagtattaaactgaaattgaaagctaaaaacatgaatctcaaactcaagatccttctataacaatatcaaatttcatcgtcaacattgattggaaagtaggtaacgtccaatctttagcaaattcttcgtccgcctctacatatatatcacataaaagtaacataatcaatacatgatttatgattttgtaagagtaaaaattatgaaaactatttacttaccattttcatatgcttcaaaacattttatccaaatgcggcaccatattagaagacggcttttatacttgttcaaaactgaagatccaatacttaaagagaattcagaagctactattgtgattgaaatacgaagaaggtcgcaagcaatggaaaccaattctccattgcgttgagtatttctttccaatatttcaaaatatccaaactctaagaagtcttcatatctaatgtcggatcatctagttacattttcaaagaagactttccactactaccaacattttcttagtggaaaatgaaaaaacagtaagtcatgaacatttaaaaccaaatctgcatagttcccagccactatagaacacgcagctcagctaagcaaaggaggataactcatcaggtttgtttggctattgatggtccatatgagactagcagatcaattccagatcaaccaaggagatcccagagccaaactcattattgcaagtgatcatcatcgaataagcaacgaaagtagaaacaacattagtttcccacactaaaccaaaaaaaaaaaaaacattagtttccaacattttcctctactgtgtttatttatttattattatttcatcttgaactgtttgttgctttcatatcattgccagcaatcatctatacttgaatactcatctgcattgtattactcatgtctttcttctgtcactgatacattcattttatgtgagcttgactgattcctctgattcaaaagatcattcaaaatcagtaaaccaatagaagaaatcgaataagaatatatataagctctctcaatgtctttgaatccaccattaatgaaagagtaccaaaaacaccaaattcatctaaaatatataatgaacctcaaaatcaaattgtttatttagtgacaagaaaacgagctagggggaaattttgttttcttgatttactaaataatgactcgactgaaagactaatccgggacactctttaaaataacataagtcgctccgaaaacaaagaaaagaaaagacaagttgctgagtcgtctttctcactcccaggtaaaagaaaagaaaaacaacaacaacatcaatggcttcccaaaaacattgcccaaaccccaaagttctcaagtaaatctgagaaagaaaagaacatctcatgatctgaataacaaagagcgagagacagagagagaggctttatctcttttcctcaagtgagagcaaaaatg

SEQ ID NO: 23592 - DNA, 3000 bp, Unknown; identical to SEQ ID NO: 1859
  misc_feature (1)..( 3000): 2750-1469P.txt file - cDNA_ID_2145953; gDNA_ID_1620459; Annot_ID_157707

SEQ ID NO: 23593 - DNA, 3003 bp, Unknown
  misc_feature (1)..( 3003): 2750-1469P.txt file - cDNA_ID_2146030; gDNA_ID_1620460; Annot_ID_157737
aaaattcttatcttatgcaattgagaaagaaaaatctatagtttattttttctcacacattattcttacaattaaacttttgtatattcaagaagtggacttgtgaccatataataatcaagagaaactattgtactagtgtccccatgtatagaaaacctactgttttagtacttgctatttgagcaaatagacataactttttacaggttaaatccaagtttgaaatcaatctcatcgttaaaaaggtgaagatcacacaaagaaaacgtcaaatggatcatactgggcccattttgcagaccaagagaaagtgagagagagttgtcctctcgttatcaagtaacagtagaccaccactaaaccgcccaatagcttataatcaaaatagaaaggtctaataacagaaacaaatgaaaaagccttgttccatggactgcctacccgaattgattgattcgactagtttttcttcttctttgattaagacctccgtaagaaaaatggtactactaaagccactcgctaccaaaactaaaccattccagactgtaactggaccaatatttctaaactgtaaccagactctaaacatataaactaattaagaactataaccattaaccgtaaaaataaatttactacagtaaaaaattatactaatttcagctatgatggaatttcagctcttaagagttgtggaaatcaagtaaaattaaaatcataataatattcttcatccttatttttgtttcacatgcatgctgtccaatctgttattagcatttgaaagcctaaaattctatatacagtacaataaatctaattaattttcattactaataaaatgcttcatatatactcttgtatttataaatcatccgttatcgttactatacctttatacatcatcctacattcatacctaagctagcaaagcaaactactaaaagggtcgtcaacgacaagttatttgctagttggtgcatactacacacggctacggcaacattaagtaacacattaagaggtgttttcttaatgtagtatggtaattatatttatttcgaaacttggattagatataaaggtacagttagtgaaaatatttggttagcgggttgaattaaccggatataggagtcatatatacaactgtgaaaaaaggataaatacaaaaagggaagatgtttttccgacacacaagctaattaagtgcatcgagaggagagcaattgtaaaatgaatgttttgtttgtttttgtacggtggagagaagaacgaaaagatgatcaggtaaaaaatgaaacttggaaatcatgcaaagccacacctctcccttcaacacattcttacgtgtcgtcttctcttcactccatatctcctttttattaccaacaaatatatttcaatcccatttatatgtacgttctcgtagacttatctctatataccccctttaatttgtttgctcttagcctttactttatagttttatatcatatcaatcgacatggcgaatgtggatcgtgatcggcgtgtgcatgtagaccgtactgacaaacgtgttcatcagccaaactacgaagatgatgtcggttttggtggctatggcggttatggtgctggttctgattataagagtcgcggcccctccactaaccaagtatttttgtggtctctttagtttttcttgtgttttcctatgatcacgctctccaaactatttgaagattttctgtaaattcattttaaacagaaagataaataaaatagtgaagaaccataggaatcgtacgttacgttaattatttccttttagttcttaagtcctaattaggattcctttaaaagatgcaacaatctaattgttcacaaaatgagtaaagtttgaaacagatttttatacaccacttgcatatgtttatcatggtgatgcatgcatggatcatatctagagatttatggttggatatatatttaacattttgatattagcttttaaaaaggtctgaataaacaacacttgttagataaactcgatataatcaatacatgcagatcttggcacttatagcaggagttcccattggtggcacactgctaaccctagctggactcactctagccggttcggtgatcggcttgctagtctccatacccctcttcctcctcttcagtccggtgatagtcccggcggctctcactattgggcttgctgtgacgggaatcttggcttctggtttgtttgggttgacgggtctgagctcggtctcgtgggtcctcaactacctccgtgggacgagtgatacagtgccagagcaattggactacgctaaacggcgtatggctgatgcggtaggctatgctggtatgaagggaaaagagatgggtcagtatgtgcaagataaggctcatgaggctcgtgagactgagttcatgactgagacccatgagccgggtaaggccaggagaggctcataagctaatataaattgcgggagtcagttggaaacgcgataaatgtagttttacttttatgtcccagtttctttcctcttttaagaatatctttgtctatatatgtgttcgttcgttttgtcttgtccaaataaaaatccttgttagtgaaataagaaatgaaataaatatgttttcttttttgagataaccagaaatctcatactattttctattgtaacgagttttcttgtattaaatttagaagaatatacaaaactaaataattaaatcgaatcaaaataaatcacaatcttagactcctagtacggacttgaattaataattttgattctctgagttcttgaattaataattttgggtcggttcggtttctctattatcttattgggccaaatcggacggcccattatctagctccggcttatcggacttcctcttccccggcgctgtaaattccaagtccctccgttcacgtctccaaactagccgttgccttctctctctccagccaaagcgatg

SEQ ID NO: 23594 - DNA, 3000 bp, Unknown; identical to SEQ ID NO: 1870
  misc_feature (1)..( 3000): 2750-1469P.txt file - cDNA_ID_2146040; gDNA_ID_1620460; Annot_ID_157740

SEQ ID NO: 23595 - DNA, 3003 bp, Unknown
  misc_feature (1)..( 3003): 2750-1469P.txt file - cDNA_ID_2146136; gDNA_ID_1620461; Annot_ID_157767
cttatatagccagctatcgtgaaatgaacaacacaattaaacaatctgaactacaaatttcacattaacatcactgaccatgaacatcaaagaatcccagttttcaaaatgaaacgaaactcaagccatagagagagagaacataccacaatcttctcattgagagtgtcccgttcctcaaaagtcttgtcaagagtaattttaccgagctcactacgcattgtagtctgagccaactgcataacagcatagatcggattctcaacgccataagaagccaacttaggatccacaatctgcaaaaaaatttcaagacaatgacatatcaacaaaagcaaacaggaaactgtatacaaaactggaatctgaaacgaagataataaccttaacgtagagaacaccatcgatgtggatgctaacgttatcctttgtaatcgcagtctgattaccaataggaatcgcttcttcctttagagaatgaacataagcgatacgatccacaaacggaacaaggaagtgaatccccgccggcaaagtcgtgtggaatttaccaaaccgctcaatcacacaagctttcctctccggcacgattcggattccccagttagacggcggattaatgtggtagctacaaaaaaataatttcagcgaagatccgtttaagcctaaccgatcaaatccataaggtttctactaaaaaaatctgaagtcaaatcgaaatttcaaaatgcgtttaacgaaaactaaaatacctgttgaaatcactgctgggagatgagaagctacgggcgccgaaaagttgttgcggaggagtaccggcggaggaggattggtggagaagcctggaagtgaaggattttgacggcgaaggtttattgatttggtagctacaaaacaaaacgaaatcaatcgtaagcttcctatacaaaatctgaagtcaaatccgttcaaatttcacagaatgtatttacgaaatcgtaaagcttaaaaaaagacctggtgagaggacttccggtagagctgaagttgcggacggtggatgcggcggcgagagatgataagatcttcggaacagctgcggaaagcatagggagaaacctcacggcggcggtgtaaccggatcttgaaagcgcgagctgattcatcgttgaaagctgtgtaactaactctgagaacgtggagaagaggaaatccagagaaaaacctcttaaatctttttttttttgaactatagtttaatcggttgacttatataataatcaaaatttacttgaagaagaggttttaaaaaaaaacttggggaagagtcaaacagaggtttttgtttttcttgcttatcacgaatttgtataggctaataaaaaccctaagacttgatgaataaacctgtgttatgttgtctaataataaggttacgacatgtgttaattataagataagtatgtcacatgtgtttcctccttgggaaaatggtaacatatgtttttgtaagatcttgcattggttcatataacatacagtaatataaaatcatatgatttgaagaatcttattacattaaagcttccgtttctagatgagtttaacaatcttactttccctttttaaaatgtgttcaacattttggtaatttagaagggaaagaaagttatgttcgaacgttagttagttaccataattacagttattttacgaacataacgaaatttacgaatccaaaatctgtagacgcacaattagtcacacaatcatgtttgagtctggcttgaaaggaaagattgtataaaatgttttgtccccaggccaaaatgatgtatggacttttaaagcccaaacttcctcagttacaaactctttttttttttttttttaatatgtttaaaactgtttttaatacaattcgaagaagaattcaaactagttttgacgtgaagtttcaaggaatatcaatacaaacaccatataaactgacatttttaatactgagtataacgttatgtgattgatttcaaatctttaaattcgcataattattctattattagtaataacatacatgcataaaattcgcgacatcaagaacatcattgttctgaatatcaagaatatgcattgaccgcgacatcagaaacatcatcacatcgagaaagaagaacggtcatttccgcaaattaatgacactttggctgcgttaaattctaccaaaagcttctctcagattttactgaattctttgctttaattttgatttttgccaaaacttcaattgtttaggtttagtgtaagaaaagaaagtgattgttattcaattgcttgctttacaatgaacggctgtacaacgtatttgtacacatgacttaaccccaaaaccctagacgagacttaccgaccaagtaagttctaagtcggctaagcccaatatacaaacgcagcccactagtactacttatctccaatatttagcaagtctgtaaaacctaataatgatatttatatgcgtagaaaaaaagaaaaaaaatccatataccaaaaaacacttttgaacaaatccaaaagtttacatgatgacttgtgttgagatgtgatatatataagcctaccaaccaaatgcaaagacaagaaagaatccaaagataaattcacgaccaaccaaaccaactaaccaataatcactgattttcaattccattatataaattccaaccccgaaagaaacatccattggacttttatttgtcaaaacacgttttcacacggacttaacagaaaacttataaactactaaaatttataaattcatctaaatccgattttaaagaaaaacacgtgaccctctcgcagacgcagaagtaaaacgccaaaacaaaacgccattttttgtcgattcttcgtcgtcctcctttgaaattcacaccaatttgtctctcttcctagagaaacaaaagattattcgaaactcgggaaagtatcatccggtcaccggaaaattgattatttccgatg

SEQ ID NO: 23596 - DNA, 3003 bp, Unknown
  misc_feature (1)..( 3003): 2750-1469P.txt file - cDNA_ID_2146145; gDNA_ID_1620461; Annot_ID_157768
cgatgatgcatttttgggtgtttattgtgcagtttgatgagcaaaaggatcaagtagcagtggagcaggttcttcgggtcatttttattgatgcggaccgcccaagtgctgtaagctattcatgctgataagaccacatacagtctaaattctatagtttgaacatttcataaggagaattacgatgtaatgaatcaggcattggagaaactgaaacgtcaattggatgaagctgaagctgcagttgaagcaagaaagaagcctcccccagagacagggcctcgagttgtcggggagggtcttgtcatagacgaatgggtaacatataattataagatctttggtccgtttattgttgttccttctttctcccatatattcaccaaagtttgtgtcatctatcagaaggagagaagagagaagtaccttgctcggcaacaagtcgaatccgtagattctttgtcctaaacgcagagagcaatgtggacttgttctgcagatcatgtacataatttattatccctcgattatgtatttatctctagacgattactttgtggttcttgtatgtctctgtttgttgtgtgattcatgccggttttttctccttcatcaaattttgtttcggtcgtttttagttgatctagaatcgaaccagagtttgttcagtatttagttacaaatgaaaaatcctgttataccattcgttaaacgtttcttagaaatgagtcattaaggttagaataagaatgatggttttgtggacaattataaagtttccccaaccatgatcaatttgattggaacatttcacaaaccaaagtacaaatttgttttggatgataggctaccattttctgatatgtcaattgtcaccatgtttatttttagttttaaagtggtttttttattttgatcagactctaaactaaaggtccacaagagtgacctataaaagactgatacccactaatacaaaaaaaagacttatacccaagtactgagattgatgtgttgctacttttgctccttgcattcagaaactacgatattctctactggcccaaataattagtggacttacgtaactgagtactttgaggacacaattatagaaaacgttattgcatttagtttcagctggttaagctagtctgtcatataatctttcttcttactgtaatgaaaacaataataataactttactaattttctactaataattatgagattaactgaataagaatagccgccaaagagaacgagaaataattaagaatattttggtcttaaaactttgaaaacacgtaactcttaaccattttttcgtctttgtacgctgaaatctaagtcagaagattcaatgtaagtatatttaactagcattcgaaatatgatcatatttgtttgtaaatggtatactttatagacaatcaaatcacttgtatgaaatgagaatatgagatataagtaagattcacgtggtatataaaatttggaacaaattatgcttaattagaagcacacaaaaatctaaagttagatatgttttatttcgttattagaatatttttattcggaaaaaaggggaaataaaatcgactcgtggagattatgaaggaacaaagacaactagaggtgtcttttgatttccatgtcgctttatgaaagctttcggccaaattgcacaatcaacaaattcgacaatccttatctctctctctctcttttttaacctcaaatttagtcttatcaaaggacataagaatatatttttgtatcaaacttgaaaacatcacttaaaataaaacaaaataaattattaaaatatcactaaaatgaagaagagagataacttatatatacttttaccaaatatatatctaatgtaagattctgaaattgagtcatttttatctcagcaaaatcatttcataacccgggcgaataaagtgtgtgtttagtattacgtgcttgaaacgtaactagatcattaagctaagacttgtagaacacgtacatgcatcataattcataaatgattagtttaagaataatcaacatatggttaataaattggtaaaacaatattagaaaaaagagaaaaactaccgtttaaggtagttttccattatttgcaaagcatatatacaatatatcatttcatttcattatggaacataagtgttcaatactcgtcttaacacaatttaagaagaagaaaaaaagactaacaaatgaaaagcttagtgactgtgtcactgtctcttaacccgtcactaatctgttgcaacttctttaatcctataacaaagaaactgtttttaatccgaaaacttcaactatataaaccggcacaaaaaaaccgtcatcaatcaaaacaaattacttaaacaaagatctcgacaacaacgtctacaacgcataattatgtccatgcattgttttttccttttcacaaaaagataacaataaactaaaataaaaactttactattacaacaaatcgtatctcaatttcatgaagagatggccgaaaggaataaaaacatggacccacccgcccatcgaatcgtgcgttacgcgaaagcaaaatattcattaccattaaaaacaatatttatcaacccctttttaaaaatgtaacgaacaaattcaggaaataaaatatttatattcctaatacaaagtgcttcaccaccataaacacacattcactacatgcacaagcacgtatatatataaatgttcatgaaggaagaagctttaacagagagaacaactaaaatagcctaagcctcaaatttaatcgctatttagtttctaattttgggttaaaagaaattcgggtttcaattaattcgaaagagcggtcacgacgtttcttagagaatcgtcttcttcatcttcttcgtgaactttttgttttctcctttttttgattttcaccgccggagatttttgtatttttccgattattcgccggcggtttagagataatg

SEQ ID NO: 23597 - DNA, 3000 bp, Unknown
  misc_feature (1)..( 3000): 2750-1469P.txt file - cDNA_ID_2146174; gDNA_ID_1620462; Annot_ID_157788
gtaatcatcccccgcagctgcaaacgaccgttctggtgaatgtgaacgcccttggaaattactccgatcacgatgctgactctcccttagacgagatgatacaatggctaaagcgtttttcactgcatttagttcacctacaatctgaaagaaccaacattataaatgcatttcccataggtagaaaacaccaaagaaagcttaaacataacaaataatgaccaagctaactacataagagtgattcaactcttgtcaacaacctcaacctcacaatcacacatttaaattatctagcatttcaataaactgactacatttcatatcaaaatctcaacaagattcaccatttcaaatatgttctcaaaatagcaatttttcagacctgaacaatctcttcagagagtgaaacacaacgaggtaagttactttctcttggaagaatccgaatatgagtcttagtttcaatcctcatctgctcaataatcttcccacctttacccaacaaacaaccaacatgcatcctagaaaccactaatctagtcacaactctccctccaccaggtctaactccaccgtaatcctcctcctcttccggcggaggtccaccataaccaaactgagcttcactctccaaaatcctgtcatgaacactaaacaaagcctcttgagcaggagagaaagacggcattctcccatcagggtcacgcctacgattatcagaaatctcaatgatacgctctgcatctccaggaactagctcgtgcacgttaatccacgcgccggtgtgttgccttatagatttgataattgtcccggatttaccaataacacctcctgctttagcgtcgtgacagaggattcgataagtcgttgttgccatcgtttcaggatgagacttcgatggccggccatttccacctccaccaccgccgccgccacggtatctgttatttcctccgccgccaccaccaaagtggtaattattgttgtagcgaggtttagacctaggcatggaatctccgtcatagtcttggtcatagtggtagtttctcttggatctagatctctccatttgaataaaatcgcaaacccagaaatcaaagttcaaatctttaactagtcatttatcaatctcgcagcaaatttttcgaattcgagggttttctgaaggattagaaagttcacaagccctagaaggaagtctacagtacccaattactttcctttttaccggaaattgaaaaaggaaggaactttccggtcaatttcacaggaatacttggagggagaattcaagaatgtccaaaatcgatggaggcgaatcggtgcaatgcaaaaatcaccagctttttgtgtgttttgagggttctttcctgtgaatctaaaaagccaaagctttttgaagtttgagagtagagagagaccgtgcaatgggtgatgttagtggcgtgcgctaactacgatattagctactcccaaacgttgtcgttttggtctcttgggaaatttgggtatgcttcatctttaaaaactcgtattaagctaaataaattgttagacaaatgaatcgtcatcagattttcgcatagttattagcactgatgaagatgaatttttgtgctcacgtaacgtattagtagatactaaaaatgtataaataatttttttctaataggtaaaaatgatatgattaatacgtaaccaattagatgatttttcgtgttatgtacgagactaaaactgtagacacgtatgtgtttttttctaatttaatttttaactatttattaaccgcggtattatgtaattaagtacatatactaaaactgtttttggaaaacaaaaaatccttttaatatttaccaggtaaagtataattggtttagtgttaaagtttagcatatggtaaaaatcatttggtgcatctaagtattgcatccgttgaataccattttcatcaccaatccgtaaggacaaaaaacgatttactatcccttttcagcaatttaatttgtattgcttcattgacaaaattaatttttcaagagtttaaaaataaagaaaccaaactctcattgcactttaagtctttaactaaatgatcacttttgatgaaaaaaaaaactaaggatcagttcacaaaaacaagcaataacaaattaacaatacaagaaaatcgtctcgcacttatggtcaaagactcaaagcttaagttgttggtggatcgtttcgtctaaattgtgagccttgacgggcataagtactttccaaatgataggtcttcccaacaaatattttccgtttcaggagaaggtattgcgttttcaggttgtgctacgacaagatggtgacctaaactatatataatgaaaaagcagccacgaagtcatggaggttttattatcacatgtcctggtgaacaattatctagtgtccagcataaaatgtcagtaacgatcttgccttgttttgtgtctcgatctgtcttctcctgaaaccacaccaatataatataaagcaacgcggatcaaaatagcaaaacattataaagttcaacaaattgaaccggagattaaaatagtgtagtgactacttcaacaaatggtctaagttgctattgttttaggttaatgctccacttgtgttcagacccattatcgcttctcttatatatgatgcatatgaattccattgacgtagtactacttctacttctagcgtttttcacgtgctatatttctatacaacatagttttctcgtgtaaaaaatttgaccgttgacctttgttagatattacccgccaataaaatccagccgaccaatcctacgtggcagtcctaacctccacccaaaaaaccgaaccgaaccacaccacagacccaatctctctctcttccgatagaaaagtcctttcctttcttctcctcttctcctctccggttattcaaaatctgatcccacccagatatcagagtttgagaacaaaaaaagcgatg

SEQ ID NO: 23598 - DNA, 3003 bp, Unknown
  misc_feature (1)..( 3003): 2750-1469P.txt file - cDNA_ID_2146182; gDNA_ID_1620462; Annot_ID_157790
agaggaggaggattacggtggagttagacctggtggagggagagttgtgactagattagtggtttctaggatgcatgttggttgtttgttgggtaaaggtgggaagattattgagcagatgaggattgaaactaagactcatattcggattcttccaagagaaagtaacttacctcgttgtgtttcactctctgaagagattgttcaggtctgaaaaattgctattttgagaacatatttgaaatggtgaatcttgttgagattttgatatgaaatgtagtcagtttattgaaatgctagataatttaaatgtgtgattgtgaggttgaggttgttgacaagagttgaatcactcttatgtagttagcttggtcattatttgttatgtttaagctttctttggtgttttctacctatgggaaatgcatttataatgttggttctttcagattgtaggtgaactaaatgcagtgaaaaacgctttagccattgtatcatctcgtctaagggagagtcagcatcgtgatcggagtaatttccaagggcgttcacattcaccagaacggtcgtttgcagctgcgggggatgattacatgccacagctaagaagacaatcatccgataggtttcctcgtggtaattttagaaataacaacttcagttctcgccagtccaactatgcagaagaagctccagcagttccagttggtgagaatgtctactccgaagagcttgtgttccagattctctgcccagctgacaagattgttcgggttgttggggaatcgcaaggaataattgatttgcttcagaacgagatcggcgtggacgttagagtatctgacccagttgctggatctgatgaacagataatcaccatttcttcggaagaggtactctaaataccctcagatcttcttcaatattatctgttacatttacaattgtgaacttgaagttttgtattcttactttgcttaggcacctgatgatccatttttccctgctcaagaagccttgttgcacattcaaactcagatcatagatcttattccggataaagataatttaataacaacaagattacttgtcccatctagagactctatatgtttggaagggaaagcaggatcagtatctgagatatcacgattaactggaacaagcgtacaaattctagctagggaagaaattccccgatgtgcttctatcaatgatgttgttatacaggtatgtttgtctatttttgaggagtcgagcattttctaaacaacttctggtctcaaaagagaattcttatgtgaatgtcgatgtagattactggcgagatcagagctgctcgggaagcacttgttgaattaacattactattgaggagtcatatgttcaaggagctctctcaaaaggagacaccaccagcttccacatccacaactggccctctcgaaggtgttgcaggagtaatggaggtagcttcatcaaataacacaattcaatctcgtgaaggtcctactagttcgaatctgaacttgcagcaagttagcacaatcttgccacagtttaaggtttttgttctcatcaacaatcttttcaatataaaggcatctgtaatcagttagggtcagacttatttttgccatcgaaacaatgtaatattactatcaggctatgcataattacctgaatacttggaaagtagtctatggttcttgtccattcgtgcaatgtccctatatttacatatatttttctcttggtttttataggaaggtttcggatcagttgcaaaggcgggtgaaagtgaacaccgggaagaggttcctgtcacgacaagcaggtagagaaactcccaaatttgatatattttcccaaaaccgtacaagtgcttgtttcacacctttccttcctgctttttgtttttttctctagaatggcggtaccacttgttactagaagcactcttgaagttgtcttaccagaggcggttgttcctaagctcgttacgaaatcaagaaacaagcttgcacaaatcagtgaggtagaactctttttaactggaactagattggtgcaaatcatgactctaatcaaaatctttgacgctttgtcttatctctttcccacttgatcacagtggtctggagctagtgtaaccatagttgaagacagaccagaagaaacacagaatatcattcgaatttcgggtacacccgagcaagcagagagagctcagagtttgcttcaaggcttcattttgagcagtaagtttctctctttccaaacttttatatccgtattgtactgatctataagtctgatttccgttccttgtttggtgcagtacaagaggatggaccgtgaacttggaccagatcatcagtcaacacagagatgaagatcaagaaactgagaaatgtggagttatgtatgacttgttgaatattaggatttcagtaagcagtagtttagatgaacattccacattttgaccatcactctttggtttctatgttgtctattagtcttctttgtttacattgttctgtaacttatttaaaaaagtcattaaagtttaatccgaatgactaatcattaaagactcatctttaattcacaccacccctatgtatattggaagaacttaaacgctgcgtttcacttgagttaacatcattgagattggggtgtttttgccctagataaagtttagggtgaaaacatagataaatcttaagtcgtattttacaaaaatagccactgctaaaacctcacctgcggcttcacctttcttcgagttcgtgaaaaagagacgtcgcatcgcaccgccgtcgccatttccaccgtcgtagcattgccgcttcactggtgattgattcttccttaacttctctttttgttttctctgttctcttatatccgtcgttttctagggttttctcactccttgttgtggaatctctctttgtagactgtcgcactgaatattgttgaatcgagaaaatg

SEQ ID NO: 23599 - DNA, 3000 bp, Unknown
  misc_feature (1)..( 3000): 2750-1469P.txt file - cDNA_ID_2146242; gDNA_ID_1620463; Annot_ID_157804
tttgttacactttctgaaggtcttttctgcgaaactattacgttttttaagttatgaaaaaaattattaagatatttttctctctaattttggtattacacattcgatctttcttttcgtacatcataaatgaagtatatttctaatagcacgatatctagtatctttcatacttgagcgatgatttagaatcgtcgaaggcattaaagagtgctctacattatttgcataaaagaccttttactatatagaagttatgggtttcaaacttcaacgtacatcagaaaagaatcggatcaaaagaaagcaaatgaaaaacaagcaaaaggatccaaagagttgttaatttggagaagtctaacatgcaatgcaaacaaatgatcataatggtgtgatgatcgaaagaggagtggtgactaattgaatcaagaagaacaacagcctgattgctggttcactggctgtccacggatctggaccgttggtggcttggcacctccagctggttggctagccattctgcgaaaacaacaaaaccttttaagtatggaagtaaagggttaatgacttcacaagtaaaatttagtttctaaccttgtcttaattgcagcagtcatagccatgaaagcttcttccacattggttgcatttttagcacttgtttccaagaatgggatcccaagttcatctgcaaaagcctgtgggacaaggagatgagacaacaaaaatgttattctctttaagacaaggtttacgtggatagagagttcacctagtttattataaaattaccttagctgtctcagtggatacaactttctgtgaagtgagatcgttcttgttcccaaccagtagcttgttcacattttcgctagcgtaacggtcaatttcattcagccattgtttgacgttgttgaagctctctaggtctgtgacatcataagtgacctgcaaagataggcaattgtgagcaagaggtataggatgtgttatttaacaagaagatgattggttggttagagtaagagtacatacaatgatcccatgagctcctctgtagtagctgctagtgattgtcctgaaacgttcttggcctgctgtgtcccactgtatacacaggcgattaccaaaacaagagtaactatctgctctttccaaaattttaacagattatgattgcatatctagctgaagaacacttacgatctggagtttgatggtctttccgtcctgctcaactgtgcgaattttctgcatgatatcattagtaaaggttaacacttattattctgattcctgtatataaatgagtgatgagcaaatgaaggtgcttacaaagtcaacaccaatggtgcttatgtagctatccaggtaagaatcatcctgtccacataaaattcaagatatcaggaaataagaacacaaaggagtaacaatgataccatagtgagaactaagctaatccaatggagtaatgacttttgagttttgagtcttgagcaacaggtattgaactccaagatgtgatcctcaaatttttgtgtgtacacaatgttaaaaagtaactaccagagatgatgaatccagaattgtgggaatacttacagcaaatcttagaagcaagcatgattttccaacaccagaatcaccaataagcagaagcttgaacagatagtcactgcaacaacagaacggtaaacaccaatctcagtgaagctcataaactcatgaaaattcgggtcaggaaataaaaacgcaagaacatctatatacaatatgctaatgagatcaaagggaaaattgtgtcacactcgcgaatttcaactacaacagtaaacagaaattgcagatctcgatcaaatttcctcggatctgacctgtataagatccatggaacgaaaatccaaatctatacaaaattctaatacaaaataccttaaacgagcaaaattaggtagattcaattcacaaacctaacaaccaacaaagatccaaagcaaaatcgaacaaaaaccaaatcaccaaacacatcaaaaaataaaaaacgcggatcgatccgaaacaatagatacatgaaacaacgagaagacaagtttcttactattcaggattcattatccctcaacgagaatctgacgattaaaggaatctccggcagtcaattcagcgatcgtcgtcggccaaaaaaacgagagagacgtgaatgttcttttttttttcttctatgtggctttggcttattaagtgctctttttgtcaatgacacggttaagaaaaaagaaaaaaagggacccactcttttcgacatttaaatgcgttttggttttgatgtttgaatgctgacgtggccgagccaactcagagagatgcgtggaggacaaaagaatcaatcaatcttttttcttcttctttgtcgatttttgttcttttcttttttgattctatacaatcggagaataactatctttaggagattaaaatttcgtatccaattaatgtaactttttatatgtatgctaatattacgtactgttgtcaagcttttaattaaaccacctgtaagagaatatatattcgtttcacaaagaaagaagatggaatattttgattattatctttttggtattctgattaaactaacatataatagcttttcatcgcttgcggtgtaagtcaatgtaacgtgaacatgtagacgacttgaatatacaacatagtcacatagaataatatttcaactccagcagaaatttattcgtcaatcataacttttaaaaggcccaaagtagattatttagagctatcaatttaaggacacataaacatacatttgtttgtaacagaaactctttatttaaaccatttttggttctacattagtgtacttggacaagccttggttcgtggtggtagactggtagaaccagctttggtaatgggtttcttgttatatcaattgaatatgggcctaaatgtctaggcccataaaattagtaaatg

SEQ ID NO: 23600 - DNA, 3003 bp, Unknown
  misc_feature (1)..( 3003): 2750-1469P.txt file - cDNA_ID_2146277; gDNA_ID_1620463; Annot_ID_157816
atctacttgcaaacaatggaacaatttattcaacaatgggagattcacaagaaaacacttggataaagccccaaaggattttcagaatctcatgttgagcgactctagggtattttcgatgagtgtcagtttccatggaattccatctgtagaggccacatgtgaacttagcctaatcgactctttttctagttttgaagataaattcgagatttctcaagtctttcactgtgacggcttattgttatgcaccgacgcagacaacactagaatcgtggtttggaacccgtgtactggtaaaactaggtggattgaacccaataatcgttgctactactatgcttttggatcctacttggacaaatcctacggtaatagctacaaaatattgagctatagtggttatggctacgagaaccaagaactcgcaatctatgagattaactctcaatcatggaggtttcttgatgtcactcgtgactgcatcctcgaaagatatactgattacggtgtgtctttgaagggacatacttactggtttgcgtcagatgagaaagagaaaaatctcagcgtatttctagtcagttttgattatacaactgaaagatttagacgtctacgtctcccgtatcagtgccctgattataacactgcgtctttatccgttgttagagaagagaaacttgcggtgttgttacaacgcgaaaatacatcaaggacagagatatgggtgacaagtaggattggtgagaccaaagtggtgtcgtggagcatggtcttagcagtggatttcccgtccgaactattcattttgtctggcataagtttcttggtcgatgcggagaaaaaattcgtcgtatgttgtgataattacttcggagaggatgaatacgataccaaaaacttggttcacattgttggagagaacaacaaagtgagagaagttaatttcggagtatccgaatcatcttggccatttttgtttaattatgttccaagtttgattcaaatctgggaaggtgtaggaggcaaaagaaagagagtcgaataagtaagcttcacgcaaacctgttttttttttttccttctcaccgttatctttggtcatatctagttatgttttgactaacaaatgtttcatacatacttgttgcattactttaagacagtttttttttttttaatagtttcgtgatcaaaaaagatctgcattaatgccgcctccagcaacatgggggtttcattcttcttttcttaacacatacaaagacagaaaaagcaattaacctaatgaagagaccaaacaaacataatgaagagctacgtgtacgttccaagtctagttccccttccaggataagatggttgtttcgtgtttctaagcttaattggtatgtgattgttcatcttctgccatcatatatgatagtgcatatgtattgaaattgactttggtttttgtgatacaacctggacacgttttaggtctttgtccacagttgtatcagtttcggtcatgtttgtggtatcaacaaaactaagatacacacattccaagtatacatgacaaatttcactctatgctacaaataaccaaggtttgtactaaaatccaaatacaaagaatttggatgaaccttacagaagctatatggaacattctaacttgatatacttaatttgaataaacaaaaaaagaagtcattatttagttattgaatactttttttcccttgaccttacagattactgattaccatatacatacatatatgtgaatttttgaagaagacaacattgcatttgtaacatacattgcaaatgagtaacaatgaccaacaacattaacagattgtttaccaagacttacagtaaatgtacaatgttcagtttgtatagatagggtccttatatatgctgagtcaaagatgtcaatcctaaaggaaaggaagacgagtaacggcattcccccacaaacgctatcatctgcttatttcttttcggatgaaggtggcaacattttcttggtggatcgacgagaaagtatctgaagccgcactttaaggtgagtgccgagattctaccgcgagttgataactctatactagctctaactctacacataaacataacacacaaacttatacaaagataaacgtaacacacaaatatctgaacagagattcaattgtcatacacataagcaaaaacagcaagaattgtgaaccagagtgatccacatgtgtatttcacatatctgagtcgatctctaataccctctcgtggtgtaccatatatttggattaaactaaatgatagcatatttttgtaaattatcttaaaaataaaaatttaattacttttttttagtaaaaatataagtctatgtaccgtgattaatatatctagttaattaacaaagttgataactattccgttattattacactttgcaatgtcgatcacatcaataaacgcattgtccctttcccttttcgtatccgccggaaaaaaataacgtctttttttttttcttccaatctctctgtctctctccccaattcccagattctcatgtaagctctctccaaggatttgatttctgtataatgtttgcgaattgagactaagagccctctcgatttcgatttttgttcgtctggatcctttgcgttaggttttttcttctcgtataattagggcttccgatttgtttacccttagttcattttctctaaattttggtttttgattgatgggttttcttgatttagcaatttttaagatttacttgaaagattccgtaattttgttctgattcggattctttgatctgtgctcactagctctctaccaaagcagcttccttttctgatccctagtgttcaattatgtgaacagattgtttactttagcttctcttccttttcattctagttttgcagagattttaggaggaacatgattgtttgaattgggagagacattggttcgtgtaaaatg

SEQ ID NO: 23601 - DNA, 3003 bp, Unknown
  misc_feature (1)..( 3003): 2750-1469P.txt file - cDNA_ID_2146279; gDNA_ID_1620463; Annot_ID_157817
aggacagagatatgggtgacaagtaggattggtgagaccaaagtggtgtcgtggagcatggtcttagcagtggatttcccgtccgaactattcattttgtctggcataagtttcttggtcgatgcggagaaaaaattcgtcgtatgttgtgataattacttcggagaggatgaatacgataccaaaaacttggttcacattgttggagagaacaacaaagtgagagaagttaatttcggagtatccgaatcatcttggccatttttgtttaattatgttccaagtttgattcaaatctgggaaggtgtaggaggcaaaagaaagagagtcgaataagtaagcttcacgcaaacctgttttttttttttccttctcaccgttatctttggtcatatctagttatgttttgactaacaaatgtttcatacatacttgttgcattactttaagacagtttttttttttttaatagtttcgtgatcaaaaaagatctgcattaatgccgcctccagcaacatgggggtttcattcttcttttcttaacacatacaaagacagaaaaagcaattaacctaatgaagagaccaaacaaacataatgaagagctacgtgtacgttccaagtctagttccccttccaggataagatggttgtttcgtgtttctaagcttaattggtatgtgattgttcatcttctgccatcatatatgatagtgcatatgtattgaaattgactttggtttttgtgatacaacctggacacgttttaggtctttgtccacagttgtatcagtttcggtcatgtttgtggtatcaacaaaactaagatacacacattccaagtatacatgacaaatttcactctatgctacaaataaccaaggtttgtactaaaatccaaatacaaagaatttggatgaaccttacagaagctatatggaacattctaacttgatatacttaatttgaataaacaaaaaaagaagtcattatttagttattgaatactttttttcccttgaccttacagattactgattaccatatacatacatatatgtgaatttttgaagaagacaacattgcatttgtaacatacattgcaaatgagtaacaatgaccaacaacattaacagattgtttaccaagacttacagtaaatgtacaatgttcagtttgtatagatagggtccttatatatgctgagtcaaagatgtcaatcctaaaggaaaggaagacgagtaacggcattcccccacaaacgctatcatctgcttatttcttttcggatgaaggtggcaacattttcttggtggatcgacgagaaagtatctgaagccgcactttaaggtgagtgccgagattctaccgcgagttgataactctatactagctctaactctacacataaacataacacacaaacttatacaaagataaacgtaacacacaaatatctgaacagagattcaattgtcatacacataagcaaaaacagcaagaattgtgaaccagagtgatccacatgtgtatttcacatatctgagtcgatctctaataccctctcgtggtgtaccatatatttggattaaactaaatgatagcatatttttgtaaattatcttaaaaataaaaatttaattacttttttttagtaaaaatataagtctatgtaccgtgattaatatatctagttaattaacaaagttgataactattccgttattattacactttgcaatgtcgatcacatcaataaacgcattgtccctttcccttttcgtatccgccggaaaaaaataacgtctttttttttttcttccaatctctctgtctctctccccaattcccagattctcatgtaagctctctccaaggatttgatttctgtataatgtttgcgaattgagactaagagccctctcgatttcgatttttgttcgtctggatcctttgcgttaggttttttcttctcgtataattagggcttccgatttgtttacccttagttcattttctctaaattttggtttttgattgatgggttttcttgatttagcaatttttaagatttacttgaaagattccgtaattttgttctgattcggattctttgatctgtgctcactagctctctaccaaagcagcttccttttctgatccctagtgttcaattatgtgaacagattgtttactttagcttctcttccttttcattctagttttgcagagattttaggaggaacatgattgtttgaattgggagagacattggttcgtgtaaaatgcgggtgcttggtttgagctcaagcttatgctctggtgaggataaggaagaagaagagattaatggagaaggctctctcacgcctgtttatctcaacgtctatgatctaactcctgtcaacaattatctctattggttcggccttggcatatttcactctggcattgagggtaattgtggcttcttctctattacttacttgacctaactaaatttttctttgtcattgctttctatttgctttcatccatatctggtttatcatgttatcaaagtacttctagccttgaataggaacaatgatattcctcaattgttctccacaagttgtgatttattattcattaggtgaaaatggtgtttattatattagctatggaatacattattagaaggaaaaagtggaacaagttttgaggaatctagaatggaatgctttttcaaatcctgccttattgtctgaagcattctctttcaataattagaacttgcctgatgagttatataactgtacttctgctgaaactgttattgttgctaaatgttcatctaatgtggagttttttttcactttgccatgtgtactactagctcatggtttcgaatatggatatggagctcatgagtattcgagcagtggggtatttgaggttgaacctaggagctgtccaggtttcatctttaggcgctcagttttgttgggaaccaccagcatg

SEQ ID NO: 23602 - DNA, 3003 bp, Unknown
  misc_feature (1)..( 3003): 2750-1469P.txt file - cDNA_ID_2146287; gDNA_ID_1620463; Annot_ID_157819
tataaaccattcaaggatgtgtggttggattgaagccgtcctattcatcattataccatgaatgattgatggtgatgaccatttttagtatggtatttgtgttttgctttggtttgcctcgggacttaactctcttgttgagtacagttaatatattcagtcatttcattacttgcgtatttaaccagaaccttgccgtatcttttttctgtgcagcaagagtcatgacaaacaaagtgaccgggaggtctagaggttatggatttgttaacttcataagcgaggattctgccaactctgctatttcagcaatgaatggacaggttagaaatctaaagaatcattgatctatctatttacctatcatgtcaattgctgtgttgtatggttaatcttccccttttgttggttttgggatggtgaaataggagctgaatgggtttaacataagtgtgaacgttgcaaaagattggccaagtttgccattgtctttggatgagagtatagaagaagctgagaagaaagaaaataagatgatgagccgatctgtatggaaagatccattcgttgatgcgttcctgatgaagaagaagaatgcagctctgaacaggaaaatatggtcaaggagatcgacgattcttcccgagtatgttgattcggcggtgagaatctacaacggcaaaactcatgtgcgttgtaagatcacagaggggaaagttgggcataaattcggagagtttgcgtttacaagaaaagtgaagaagcatgctaaagcaaagtagcatctttgagaatgaattggtcagctgcttgaaaggattgtgttgaaaagccaaaaacgaatcaaatcaataaattctcaataggtaaaactcattagctcacatgatcatgtagacgaatattgagctttagaaagtctttagttttcttgtcgatttcgtatttttggaccacaaaagtgccaatgttattttggaattcgattaacaaatatcaattgtggagcttcaataaccaaacgaacgatgcacctccatagtgcttgttcaagaacttgtattgtttatatacagaagcaagccaatggggccatgttgagtattctattcgatctaaagatgtaaaagaagattgaaaatgaaatgagaatccagtttaaggtgttgttggatggtactagtgatattagaggcaaatggtgtgaacttgttgacaaaattgtgtcttcttctctctttgagttcacatttcagtgtcataattcgtaagatttgcgagactaataattagtacaagaatttattaatcaatattcgtcgttactggttatggatttgatatgtttactcagaaactgtcgtctaggcttgaagggatttattattcagttcacattttcatgcaatggagccctcacaagacctgtaataagacgagttctatttgtaagttttttatgatttataaaaagctcagaaattcatttatagtctatagcttttatggtttacatcttgagctgaaaaattaaaacttttgcttgtagatattataacttacataagctatgaattatatatataaatttgtatttcggagctaaaaatgttataattttattcatagatttcatacttctatgttgcttacctaaaatgttaattcaaccatatattttgagtgttaagggggtgtaaaagcatatggaattatttgtgttaaaatgacaaatcctctgttattcaatcatcaatattaaaaagttttataaaaatccattgttattgaaataatgattccaaaaaagtaccatcaaatccagtattatggaaatattataaccactggatttttgaatgactttaaggtggtttataagattttaacatgttttgttttttggaatttggaagaactttagaacaaatcataacatttaatctaaaatcacccaaaaattcatctaaaaactcattaaaattcgaatcattcaaactatatggttggataacatagaatttgtcatttcaacaccaatcatttcaatgtgatttattgattatattttttatcatagagagagcaaaaatctctgtcaatggcaagtaggtaccaagtagtggcatgagagagtgatgtctggatttattgatttctttggtagcttatacttccatatgtttccttatttaatttttcattccaaatatgggacaaagttataacaaatagtattcgatatcaaacgtcaaaacatgtactcccaaatatattttattggaatatagttttggagatatttttacctggggggagatggaaccaaaataagatctagaaatgtgattggctaacgaaagaagcacaataagttaacaagtgacagtgacaatttatccctcgacaacaacacacattcacatatatctttttattttattatttttctgtgtgtctttaaagtttacagcacaagtagtttctaaatcttataatcaattttcattgataaacagaaatttaaaatatttaaatagacaaataaatgatcaaatctatatttctatacaagagttaattcacaaaaatttgttgtgaaacaaactctttctatatttctatacaagagttaacatatttctatataagttattgtaaagatcaaaatatgaaaattatggtataaatgcatagacacatatatacgtgccctattaaaagaggcagcgagaagataatataggaggaagaggaagaagaagaagatggtgaagaagagagttaatgcaactgcaagaagatagtaactaatcagcaccgtccatttttgtcatctaattctttcttacttggccgcaacttccaaccacatcacacactctttctattcccttatatattcccatctcaaaagttcttggagacacataaacattaaaaaaagaaaaagaaaaaaactataaacataaacgccaatcgcaactttcttgtctttcaatg

SEQ ID NO: 23603 - DNA, 3 bp, Unknown
  misc_feature (1)..( 3): 2750-1469P.txt file - cDNA_ID_2146320; gDNA_ID_1620465; Annot_ID_157875
agt

SEQ ID NO: 23604 - DNA, 3003 bp, Unknown
  misc_feature (1)..( 3003): 2750-1469P.txt file - cDNA_ID_2146324; gDNA_ID_1620465; Annot_ID_157876
caacgaaggagggattcctaattcaagaacattcactattatgattgagcatcttgtgaaattggggaatcttgatgcagccatgaagatttttgagaccttgcctttgatgaggattacgcggactctgaagcattattcggttttggttgaagcctttgttgatgcacaacggtttgatgaagtcaagactctgattgctgagatgaaatctgatgggaagttccctagtagacgcatgcttgagcccctgaaacgcatgagggaggctggttttgaacatgaaacagaggagtttttgagagaaatgttgccggatgagaggatcaaggacatttctatgtattctatggataatcccagcgatagcgaagacgaaggagacgagtacaaagatgatgttaatgaagctcaagttaagttgaagccatggctggatccaaaagctttagcaacttcgttaaagaagtggagctctgatgcagtcactgctttggaagaagctaacttcgtttggacaaatctattggtctgcaagatgctaagaaacttcagagcacctgaaacagcatggagtttcttctgctgggtggcgattcaaccaggattcacccacgacgcctatacgattgagagaatgatggctatgttagcacgcaatggccaagttgaactggtcgataagctcatctcgaaagtgagaatcgaagggatcaaattaccattcagcaccatcaggctgatcattgatctctacggaatttcaaagaaaccggaagcagccatcaaggttttcaacgaagacagaacactctgcggttcgatatctgatttcaacctcatgctgttgtactcatccctcttgagaacattaacaaaatgcaagagaaacgcagaggctttagaaacgctagaagatatgatgttgacaggagtttctcctgatatccagacgttctcgggtttaatgtaccactttgcattgcagggagagattcaaacagttgagagacttttctcaatggtgagacagattggtcttgaacctgatccgtacatgttaaagcttctagttcaagcgtattgcagatgcgaaagatcagtgcttgcttacagagtgttccaagacatgaaagattcgaatctgatgcctgacagagagacgaaagagctgcttgttaagagtttgtggagagaagagaagcgaaaagaagcggctgcggttgaagagagctacgaggaagagaatgataacaagaatagtagtaacgttttgcgtttggcgttgaagggtcatgtgtggaccattagttctacagacatttctcgagtctacaatctctaccgcgattgtgttctgaaaacttcgacttgacaacatttattctaagtttcgtttttattgggcccaatgatcgttaaaggcccatagagtctgttgctgatatattatcttaaagctggttggtaaattaatgggtcaacgccattcaaactaggcaaacaagaatatacaaccgtgcctcacacgctctcatatcttttctttgatcgttgatagttactttttggtcagtattcggactttgactatgagaaccacgtgaatggcccattcaaataggtgtaagtgtaacatctttttatcctttttttaattaggatcatactaaattaataacaagaatcataaattccattggcaatatttgcgaaaacatataaattggcaatcaaatcatttgtttttgaaaatcagatagtcaaaatattctatactgtatattgaattttgcaaccgaaatcatttacactataaatcgatttttctttggtttcaaccatagaagattatctaaaaccgatccagggattatgttcgaaataaaataaaatataaaccatcatcatctcaaaagaaaaatactatagtaagcctaaaagtgaaaaaatcacacctagccactagcatataaagaaacaaaaacattttcatatattaccaaatgttgagagcacatgggagctgttatattatattattattatttgacgttgaccacttgaccatctaaatgaaatgggatgaatctctctacgcggtacctaaaaaaaatccaaaaaagtaactttaacccaactttacaaaatttatattttctccaactttacaaattaattatttttacaaaaaaatatgttaattatattatttctctataattgtgtacggtcgcctccgtagaatttattcattagagtagccaaaagtaaatatttttaactttttagaaagaaaaaaaattaagccttaaactgtgtaaatttcgcaaatctacttttacataagaaaccttagtattttagtgttctactgatatggtactttaggaatatactgatatgactgacattctatttgattttatcctacggcctgacaaatctgaaactctatacattctctgcaaatgttgtgcctttatttaacatttttataatatagtttttcttttctctttcccttgtatataaaaccttataagaaaagctaggccactagtgcgctattctccctcctctctgctcccctagtatctctctctgtctctccctctcgagattaattcaaacatgaaaagcaaattggctctaatatttcaggaaatttcttaaacatttcattgaaactttggcgaagtttccatttagagtaaagcaaagaattagatttaatttggtgtttctttggccttttttccccctttgaacggtggagaagtgaatttaagagtatgtcgtgttgcttctcctgcttcaaacatgatccatctaaggtttttagattcgttttctttgcttatattacaagtcttttaatttgaaaagtcctggtccatattttgatttctaggcttacctatgtataacttttaattggcaagccaggatcctttaaataccgccttggtaatttcacggtatgaagaagaagatcgcatg

SEQ ID NO: 23605 - DNA, 3000 bp, Unknown
  misc_feature (1)..( 3000): 2750-1469P.txt file - cDNA_ID_2146330; gDNA_ID_1620465; Annot_ID_157878
cccgtccttaaggaaaataatttctaatttttaactaaaaccatgttcatttcactattacttttaaaaattagtttaagtgttaaaatttgaaaatgccggaaactaacagcgcctacgctgcctaggcatccaatccttaattgatctgtaaattttgatgtgttcgtagttcggcaatgttttcacataatatagatttgacacttaaactattaaaaaaataattatgattttcactaaaaaaataaaacttaaactttaaaaaaataatatataatttttaacttaaaatcatgttaatttcactattatttaaaaaaatttaaaaacatcggaaactaaccgcgcgtaagtaccacattcttaatttgcggtgttcgaagtttgacaatgttctcatataatgtaaatttgacatttaaactcatttaaaaaaaaaaaaatggttttcactaaaataaaataaaattattatttctcgtttctaacatcttataattatgaacaaagaattcaagtatattttaaagtataaaccgaacataccatcttatcttaatttttagttgattgtcaaaaacttaaaatttaaacatcaaggtaacatgtcaatctggtgatatatttgtaacattcgtagattacaatatacaagcactgcctttgaatctgattaaataaatgtcaaatgtatatacatcaagtgttccttccatctgcagaaaccacctcgatacttcttgccataccttttttccttctttcttttatcatataagtttctgaatatatcttattccactagctagcttcaacattatggttttgattttgaataattcacgccacacacaacaaaaaggtaaaaaagaagagagtttatgtattagtgctacttgtaatttcaaattttacaaaattgcgatgagggatataagtttctagagaaaataatatatatttggacagcaaaagtaagttggaaaaattcggttacttcgtaatttgttaagaaataaaaattgacggtcaagaaaaggagagtgtggggatgaataaaaacggtaagcttatatcattcaactgggggaggtagcttcgttaaaagaatccatctttttatttattttcatcaaaccatcctttattgatttatttgtttattacaaaaacaaccgaaaaaacgaccccacgagaaattaaggagatggagcctcgtgaggagtttggtatagctctgaagtctaaagaaaccctccttagatatcaactccccaacactctctccctacaacacacacacacacacacacacacacagattccaaaccctctttagcatttacgtggcgactcgtttacgtgtgtccagtcctcacacattttcatgctttttattcaacctactaacttccacctttcccgttttttgtttcttttctttcactttttcgttaatttagattctttattaattaataaactgttctctaatatcatttataagtccgttttacgttaaagtggctatcccttgatggttaacaattaaatgatcatttttgggtttaggggaaaatttttttaaaaaatctattggtttggttatcataaacggttttaatgacagaaatacacaagaattcataatctagtttttaaacactctttcaaatttaaactgcaatatatagatattataacattcatactgctgtaactctcaaacaaacagatcattaatgtcttccactaagaactttttgtaatttgtgacatctgcatattctcgaacaaatacatggttgcataaggaatcggtcactcatgtcttcataatccagtactgaaatattccgcattggcttaatatttgaaaaagaactatatcttatcatacttccaccgaacttttttttaaaaaataacaaaaaatacagagatgatgcttgcacttatctaaatctacgtgttatggaacaccacattttaataaataacttacttaaatttatattaaaaccgtttacatctgatataatttaaaaggttttagacgaattagtattagtgaaccattatcaagatgtatttattacaaaatctataataataaaaacaaaactgggaaagcaatgggaagaagatctgattggctttggaagacttcgcgtgttaataagatttttctcaaaaaagaaagatcggacggcaatgcgtggcaagtcgcttatgacgtcggaagcttagcttgccacgtgtacggtcatcaccatttaggtgaccgatataatgtatttcccgtgacttgacaatctaatctcccaatttatcgtgctccagtgtctcaagagagaacttactctattggttacccaaaactcacataaaacgtggattttatatttttttttatcaaataatttgatgtgcaatataaacatatatgtattattatcttgcatgtttaaaaaatgctaacttaaatttttcttcaatgattgagatttttcatacacatccatcgagttcacacttatgattaaacaaagtgtattgttacactaataacggttctaagttgtttcaatacgtttatgataacggttctatactaatactagtattcatacgtttatgaaactcgttaattatatatttaactttgtttagctgtatcataacaagcgttttaagaaataatttaataaaaaatgagaaaacgataagcgacgccttatcgcctatgtgtaattatcgtgtcaaaatatcgtgataaggaagctgtttcagaggagccttctcgtttgttgcgtcgttgctctgagccaacaacgctaatataaaaggaagctcaagtctctctgttttaatctcggaccaatatacaaaaccgtgtgttcttctctgtatcttattaaatcaaaaccaattttgttcttcttctttgattcttttttccttcattttttaacgtatcttgagagatcgacgatg

SEQ ID NO: 23606 - DNA, 3000 bp, Unknown; identical to SEQ ID NO: 1905
  misc_feature (1)..( 3000): 2750-1469P.txt file - cDNA_ID_2146350; gDNA_ID_1620465; Annot_ID_157883

SEQ ID NO: 23607 - DNA, 3003 bp, Unknown
  misc_feature (1)..( 3003): 2750-1469P.txt file - cDNA_ID_2146358; gDNA_ID_1620465; Annot_ID_157887
tcaccactttcccttccttcgtcattattctttttacttctcctttgccattttaaataggccaatattcgtatttgtgcaacaaaataaatcaaatatccaaaataattattatcctctatttacacattcgtattcgtataaatgaaattacattagtcaaaatttcggttataaattataattgtgatcttctgtatcattcttaacatattgttatgtacaatcagaaatagcaagtaccggttttattttggaaatacgttcgatttgagataaatataaaactgcaatagctaggtccattaaatttgaagatgtgacgttagaagagacaaaatgatggccggggacaccggacacaccatttctaattttacatagtatacatgcccaatggaaatagcttttagtatgtgtgagttgtatgatgcgtcttcctccaatagtgagaaaagctaatgggggacatatatacaactaaaaaaagcttttctcgttttcatcttctgattgggtgacgaataatcacgtttgaaatacccgagaatttaccataaatccgtacctcaaaagattcatttgttgtaaagatatatatacagaaagagcttctttatttgttatttttagcttctttcatatgttatcaaaacattggttttcaaacatctaatccatttgatctataactaactaacatcgacatataatctcttaattaccttcaagtcgttttctgtttttttttaataaaaaaatagagttacgtcaaagaatttgacactttgattccaacttattatcttttcttctttttgtttttcaacctgcaaggaacgtcccagtagataagttgaattttatcctcgtccctctttgaagtccacgtgaacttcacgtgcatagccgtcactcaatgtcggaatacattgtttttatttttcttcttctgtgaattatttagttcttcctaattatataccttcccatgattcgtgttcgttgcccacacattactatctctcttttactcacctaaaaaggcacactataaccttatgtatcaagtgaccgttttttaagatgaaaagtgttgactgctatattttatcatatactattttaaaccaatcagtcgtgtcaattctgtatatatgtttttttctcctttagaagctagggttgaacaccttacaaatcgaaagcaaggcattgtaaaaaaccacgtacccttctactaattaagccttccacaaatttaatataattttagtgttcgaatggtgataaaggatagtgcagaacatgatgctaaaaacgaaagcaatatatggttatgatagaagagattgaccaaaacatgttgaacaaacataatagaattattaacataacatgtgttcaactcattttattggttattttgtgcaagtgtggtgttttaaatttttctttaaacatgcattccaaattcatgtgagcgaaggtgtgaaagctttaatgtatttgctgcttgtggccaatctttaattattccaccacattattcattcccttaaatgtactaaacaaattgtaaggaatataatttaaggtttttggtacgaagtaatgaaggcatgaaagcgtttatgtctttgctccttatggccaatctttatcctcccgttgttgtgtctcaaactcggaaccttaacttcctccttgatcaagaaatactagttcaactataacagacgtatatataattctcatacaccaaaataggaccttaatctcaaagacctgcaacgtcgatgatacgtaagttgtcttgtgtcaacacattacatgataatctatggctgaagaaatttcgttaaaatggtacaaagagaagggtttaaaaatatgtttcgtatacgtacaaagtaaattaaagcaggctatgttcaattaatcgcatggtgtggaatattataacactgttgaagacgacaaaatagagtacaatgtttaaatataaagaaagaaaactcgggaagattcgtggttatagactcctagtcactggtgtaaaataataatctataggaaagatgggaaaaagaggagcacactgcttttcaaaggaaaatgagtggtctcgagctccgaaaacaaagaaaaaataacctacaaaattgactaattaacagtaaaaactaaaataaccaaagacaaagacagtttatgttatattatacatatatacccaatagttatccacaaatgatcggatcgcttgtttactacttcctccaaaatttggtcatcttcgggatccacaccacgtctcttgtccagaattgtcgtcagccaccttatttttatgtttacttattctgatgggatgcgacaatgttttcgttacatgaagttcttaaaaatatctgatcaaaaagaatgaagctcttaaatattttgaaacataaccaacaaacatttcttttatataaagttaaaatgaaaattttaaacatccaaaaatttccatcaaatatatcttgccttaacaaaacagatacatgttttcttgttggataaattatttcataatttggatcaagtgaaacaaaatgtttctccacttttaactacgtttgtacattgtgcaaaaatctagagaacaagtatatctggaagaaatgtaaccatgcaagtgtattctctcatttagggtaagtacatcccattaaacataaaaatagaaaagtatatgtatatccaattcgtctcatacatgcataccacacaattaatgattctttattcaattacatctttttacataaaaacagatggcataagtgtaaataaagggaaagacgacccaagaataaggggtcacagtcgttgaggttataaaaagcatctcataggactcaacctcaccaaagtcatatcctattgcatcactctcctttaaacacagtcagagaaaacagcaactcttgtctgaaaaactagagagagaaaatg

SEQ ID NO: 23608 - DNA, 3003 bp, Unknown
  misc_feature (1)..( 3003): 2750-1469P.txt file - cDNA_ID_2146370; gDNA_ID_1620465; Annot_ID_157891
aaacccccaaaagaaaaagaaaaaaaatcaaaacttcattacccaagaaatctcttaatcatttaacccagactctctcttctccacacgcatcttttatccaccgtccaccgatctgatccaacggctgagatttcaccggagacgagttatccttactacttccggcttgtttctctctgaagaatcaccggaaaaaaaaataaggcggcttgtgtgtgagactttgtgtgaaagcttcaaccttttttttctttttctttggcttgtccaagaaaaaggagccttcttcttcttttctctctctggagacaattatactaatttttttctctcaacttttcacccttttttttttgttaacaaacattttttatacataattgtgtcgactttcaagttccaagtatctaaatctgtattttggactcccatgcaaataattaaaatagaataatctttttgtagattttaaattgaaaacggtgtagaaaggttaaaagcaccaaacaaaacgagtaaatagatattgtaataattttttcacctttatggaaaagattatatcatagacgatgtacacagatgaaaattagaaaatggcatgtgaatatatgcagtacccaatgaatgcaatatcaggtttgtattatttttctattgtatctctacatgttacgtaatcaaacgatcaagtaatttattaatattgtcgatggcgtagaaattataaatttattttatgtcattgtttactatatagattttgagctaaacgacttattttgtcaaaagatatatccgtgtttggtttaagattgggttttagtatttccaatattaatctaaattcttagcttatgaacatgtcaataaacaaaaaaattattttactgtcactgtccttagacggggacaaaggagggtattaccgtcgcgttgtcggaccgtaaaataattaaccaaattttgttgttgaacgaataacattttttactgtgggaatttgtcgtgtagcattacgttcgaaatcgcaatttgttttcttctttgtgggtgtatatttctggttaacgaaactataacccaatttaatgcaatgttcgtctgtttttgttgactttgacccttttttggtaatattcgttcagcttttgttttaacgttttcattgccttgtaggcatctgagaagctcagattctgacacgtgtcttttgttatctgaatttgcatccgttggataaacatgacgctgacaggtggattgaaaagtaaccagcttggatttctgtgtatatgttacaccgccacttcccttaatttcttcgttcttagttaaaataaaaaaggtttaatttatgagtaaaagtatgtaaaacgacaacgattactataagaattaaaatttatctttgcttagtaatttgcacttaagattggattcaaattttgtaaaaagcgaatgttacatatatgtccattgaaaaaattgcatttgactttacaagcattgaaattaattaatttgggacccctttttttgttagtttcaaaggaagaattattttaggctgagatgggtccctccataaactcactattctgccagcatacaaattccttaacatatggtccaaatagcagttccaaccactagtatccaataataatctgaacaaattatctttctttttttttcctgataatcttgtatttgtttgttcaatgagcttaatacgtatattagttatgacttataactaaatactttgactcacttgatccgtacacattgatttcgtttattcaaatccgaacaacgtaatgatctttttgggccgagttatttgtattctcaacctgagtccaaccatgctttatgggcttttctgtttatttatgcatgtaaagtttataatgcttgcaaataaccacatattgtatgaatgtaattactatgatttaagggcactgcttttctgttttcacgttgttttcgaaattgctattgcgtgtgatatctgtgttggaccaattattgaaaaggacaaggctgactctggtttttaatgagtagtccccatgggagttatgttcatttaccacacatttttttgtatagtatagtatgagtttttatttgatatcttttatcttcggaaaataaatggttcaaattgtttgtctaaaaatgcacacatgaatatcttgtggtctcacacaattgtaggaaacaaattaatatttgttgcgaaaataatgttattattttatcatacgaaatcctagagaaaatggtggcaaaagaggcaaagactaaactaatgaatttaaaatatgaaaatgatggaatgactggtttaccaatattacagtatattgtaattttataaaaacgaatcctgaagaagagggcaaaccccaagaccacgcaaatcagtctacaaatatgaaaatttccaataactagaaaaacatgtgcatttatctttttccatcattcggatttttacaatggaaattttgaccactgagcgcaagtgttatagtattttattattatccaatattaatatcattattcggatccatgcattctatataactatgtccaccatcttacttgtgtctatgttgcaacttcaacgtcgtatatatatagggattgttgtcacgaatacaatgctaattaaggaagattgtgacttctcggaaaatttagaactaattaagagtggaactaaaatgccaatgaaaatagcctaaatcaaaggagaaccacaaatataaattggaagaccttaaaaaacaattaaacgaggacgaaacaaattttggaatcatcaattatacgaaaaaaagaagaaagaaaaaagaggtttcatgaatcacagtagtgctgacaatcttcgaaccatttgtgggtttcatacaatcgatcaccaatagaacaaaagagaaacagaggaacagaaagaatagaaggagtgggaagtgtatg

SEQ ID NO: 23609 - DNA, 3003 bp, Unknown
  misc_feature (1)..( 3003): 2750-1469P.txt file - cDNA_ID_2146397; gDNA_ID_1620466; Annot_ID_157906
ggtctttttggttttaagaattattagtgactaaaaattgaaataaagtcggcaataattaaataggtgatgcaaacaaaaagttattaaaataaaaccataaagatatttataaatttaataaagatgaaaaattaagaatttgatagtgaatcatactccctctgttccacaaaaagagtcattccatatttttcacacatgttaaaagttctatactccttattaatacactaaataaaattatactatctcctattaatacattaaagcaatagagttaaaaaaaggatttttattcaaattttaaattggaaatatcaaaagacactctttaatgaaacaaaaattaaatcttaaacgacactctttgcaaacggaatgaatatttcattacgattagaggtgtgttacacaaaacacaagcatgactcactgaagttggaaatcttgatgggcttttactaggaacataccggattatagctaaacccccttaatcgcttctttcgatcaaagtgagaaaaatcagaaaggtcaatgaaagtttgtgatgatcaaaattcccacaggaggaaaataaatgggaactgaaaacgaaaaggtttaacatttaatcgtatgattcaaaattcatctccaacattaatgtcgtttatcgatatttaatgatatgattcatctgtatactatatatatatatatatatatatatatatatatatcatgtaactaatcagtttataagaacaatccaaccgtcataatagaaagcgaagcgatgtcgtcgtctgacaagaaaccgttgattccgtcgtcacatatcaccgtcaaagttaaaaatcaggtacttgaataaatttcgccattacttatgctaaaaacaagataatggtgtagttttgtaactcaattttgaaaagaatcacttttttgttatgctattgtgaaaacaagaaaaatttcaaacataattatattttggagatttttgcaggacagcaaaacaatcattgatttgtaatgttcattagtgttaggattttagtttttttttgttttaattttatatattttgcaatagatttcccaacaaaagtgtatatcttttatagcaaaaattataatattcaaccgtcctaaaactaagatacgtataacatgttaaaagttttgtaacaattactatttaacaggacgacatatgtgtgtacttccggattaagagggacgtcgagcttcgtaagatgatgcatgcatactctgacaaagttggagtagaaatgtctactctaaggtttctcttcgatggaaataggatcaaactcaatcaaactcccaacgaggtattttttaaaaagttactccaataatgtatatatgaatcaagttgataaattaacgaaaacgattgcagcttgggcttgaagacgaagacgaaatagaagcatttggtgaacaactaggagggttcagcttctttcatcgccattaagagaatattaaagtcgttagaacgactcaccaaaaaatcaataatttatagtcttgtttaattcttttcacctactttttcgtactacaagagttggttattcatcgatgttaacgagtaacaacgataaggtgtttatgtatgaacgagttatctataagttatttgaatgaagtgtaagagatatgagaatagatgggcattgatatatatagatgggcattgtccttgatcgttatatttgtttaagtcacgaaagatataagaatcaaagaggtaatgtttcactcgcatggaaattgcaacaaagaaaagagttagatatatattctatttccgtattaaatgtgatatatacacaagtacaattacaaatcattgtcaaatatgatcatcattagaagccgtggcccattttgactagtcaagctatacagataacaaaatgaatataatcagaactatctttttagcattacatgtcgtctagttcacgtgcgaaatagttttttcatttgcccatcaatcaccacaaaaaatttccgaatttgcagaaaatttctcgtaattaccttgactgggccatatcatatgaattacgctagatagaaatatatattacgttaacaattactcaatcgaaatatatgttgtacaaatttttaattagcgacgaattatgcgctaacacaaaaaggttaaaaggaaaattaaaaagtcaccgtcctaataaaaaataaatcaaacaattaggtttgtcgatgaccaataagaaactgccatttgtcaaccaaatacacttccctttcttgtccctctctcctctctgtctctcttctttctctctcctcgccactgactttgctctctctgatttacagaagaaatttcaaaactttcaaaagctcaaatcttttttccctttttcgattatattcatcgtcgtcgagaccggagatatctttatctgatcaaaagtttcttttttccgatcgtcttttctctcccagagaaaaattaaaaatcgctcctttagattatttcctttattttcttggcgcggtttcgatttcacgtttctgggttttcttcatcgacccagaaaaacaaaaaaaattcaaaccgcaacgatcaggtacgaatcgaattttttttgtcaccatcgcttgttttgaagatttcttcgtcggtggaagagacgcttcttttattctaagattagcctctttggtttgtagaatctgtaacaaattttggtgattatgtttaattaaaagttaccatctttgatcttcgtttaattaatctttcccttaataacatgttcttagggttttgattttttccttatgtgtgtactgtttgatatttacttaatttgcttaatcttctattaatggaacagaaataaactgattttgagctctctgtgtttgtgttgtctctctctgtatcaggtagtgaatccttgattttatagtctatataaagaaagaaaatgcaaaatg

SEQ ID NO: 23610 - DNA, 3003 bp, Unknown; identical to SEQ ID NO: 16965
  misc_feature (1)..( 3003): 2750-1469P.txt file - cDNA_ID_2146877; gDNA_ID_1621153; Annot_ID_173337

SEQ ID NO: 23611 - DNA, 3000 bp, Unknown; identical to SEQ ID NO: 7586
  misc_feature (1)..( 3000): 2750-1469P.txt file - cDNA_ID_2146909; gDNA_ID_1621153; Annot_ID_173350

SEQ ID NO: 23612 - DNA, 3003 bp, Unknown; identical to SEQ ID NO: 19546
  misc_feature (1)..( 3003): 2750-1469P.txt file - cDNA_ID_2147267; gDNA_ID_1620674; Annot_ID_164199

SEQ ID NO: 23613 - DNA, 3003 bp, Unknown; identical to SEQ ID NO: 19546
  misc_feature (1)..( 3003): 2750-1469P.txt file - cDNA_ID_2147267; gDNA_ID_2926210; Annot_ID_202547

SEQ ID NO: 23614 - DNA, 3000 bp, Unknown; identical to SEQ ID NO: 5347
  misc_feature (1)..( 3000): 2750-1469P.txt file - cDNA_ID_2147297; gDNA_ID_1620781; Annot_ID_167940

SEQ ID NO: 23615 - DNA, 3003 bp, Unknown
  misc_feature (1)..( 3003): 2750-1469P.txt file - cDNA_ID_2147327; gDNA_ID_1620781; Annot_ID_167963
ggtgacctaaacgtttatgccacatttcagattcattcttaacactagaacatacagacttaccaggaaaagacgacacatcaacaagacttttatccagattcagaatatataagttgccgacttgactacctttgccaagcatcaattccttggtaagagcctgaatcatacattcatcagatgtaaaactcactttagattgtaaagttttagttaaaacactaacactcaaaagattaaatttaaattcaggaataaacaaaacattgtgtaaagacaaagcatcagtgagttgaataaaaccagtgccctctattttaaccgtatggccattagggagtctaacaaaggttctatctaaggctttgtaagtgtggtataaattcctttcatgagtaacatgatgactagcccccgaatctataacccaagctctaagagacaactcagtttcaataggtatagaagaggttaacatttcataataagtagagtcatataaagaaaagaatgtaccagttatctgtgagatagaaggtactggatttgaacttgaagctatagccttgtctgccactggacatgagagtatgtctaatgatcacatccaacaactgatctcatacttaagcactaagctccagtccaacatgtcataataagtagagtcatataaagaaaggaatgtaccagttatctgtgagatagaaggtacgggatttgaacttgaagctatagccttgtcaaaacatgaagtgatactaggggactggagcttagtgcttaagtatgagatcagttgttggatgtgatcattagacatagtctcatgtccagtggcagacatagtcggaggtgcctgagtctcaatctgatcagtactagccaagtttgtgcttccaacataagtgttctctttggctcgtggatgacctggaggatacccgtggactttgtagcacttgtccacagtgtggccaatccggttgcaatgagtacattttggtttcttgaagttaccttgagctagtagaatagtgttctgatcattgagaactccttgagtttgaaaagcagctggacttggacttggaactgattttgcagcaaacccaaccaaacgctgactttcatcttgatctagcatattgtagatttcattaagccctggtcgtggcttcatgttgaaaatttgactccgaatagtgttaaaatcatcactcaaacccatcaaaaattgtatcactcgacttgtctctgcctcttctagcagctccttcacttggtcacaatcacatttctttacactgcgagactttgtgttagcaagttgttcccacaaggtcttcttcttcgtaaagtatgtagagagatccagtttgccctgctgaagagtcatcacagcttgttcaagttgatacctcctaggcaaattgttcaccttaaaacgagtaaacaaatcaatccaatttcaacaccatcctcataatataagatactgtcataaatctccttgttcacaacattaagaatccatgacttcaccatactgttgcatctactccagatccgaaaagtagaatcatcaacagagggtcgcaacaaagaaccatcaacaaaacccagcttgtttttcgcatctaagctaattctcattgcaatcgaccaactgttatagttactaccatccagaatatgagctacaatagataaacctggatgatcggaggaatggaggagcagtgggttttcaccagagtcagaaaccttaaacccatttccaccataaacgtccgatcgttgagctagctgttgtttcagtgtcgtgagcttctgatcttcaaggattgctgcttcacgaacagatctgacagctgaaccttcatcatcaggtgtagaaccgcgagtcttcatttttcctcccttcttcaccatttttcttcaaatccaaggtcgcggaaagacaatcggagaagaaagaagatcagaaaaggtgtgattaagaagaaattgaagaaacgatggtgaaaatcaccagatttgtgtgaggaaatgctctgataccatattagaaatcatgaacaaagagaattgtagaatgattttctatttcctcgaagaataaatgtgttacaatgagagtatatatacaattactctaaaccatctaaaccaatgtacaatctctaaatagctaaaccaatctaatcaaaccggaatactatatacaatctaatagtataagagacaagagcttaggcagtcaaatgtttgtgcaagtttaaggcgaaatcaaaaagagtaaggaagcgaaaaaagagaagaggaaacgagaggagaagctaatggcggtgatacatcctgagagaaatgcaaagaagaaactcaagttagctgcaaagaacaaggctaacaagaaaagaaggattatgagcaataaaatggatagatggtcacactcttaagctcccataaccacattaaaccatttttgtttatgttaacatagaaattattatttgagattagactttttcaggtatttatgatccatttttggtctgttacaatccaattctaaaccattgcatttaacttgtttcttagcagaaaaaaattccgacatttatttgattacataaacttaaaagagataaactttattaaattatgattactaaaaaaaatatttaacaagattatcaatatgattacgtctgttaaaaacaaaaaaggaatttgccacgtggcgacactaaaattacgtaatgttcaagtcaatcaccggcgatgtggcttttctcgccgcgagttgaggcggttgaaattgagtttcgagacgacgtcgtttccaagtaaattgcactagcacgtttaaaaaaaaaatgcaataagaaaaataaaccatgagttcgtcttcttaatacctaaattaaattcgatttttgagacaaagctcgacaagtcgtcggcggcggtgtaaaaatagtcggagctatg

SEQ ID NO: 23616 - DNA, 3003 bp, Unknown; identical to SEQ ID NO: 20477
  misc_feature (1)..( 3003): 2750-1469P.txt file - cDNA_ID_2147327; gDNA_ID_1620742; Annot_ID_166486

SEQ ID NO: 23617 - DNA, 3000 bp, Unknown
  misc_feature (1)..( 3000): 2750-1469P.txt file - cDNA_ID_2147361; gDNA_ID_2926161; Annot_ID_139725
gatcgacgaatcgagagttcgcgaagcttcccggaggtaagtccgactaagtcggtggcggcaaccaaagcttttttccctgaagacgttattaaaccttcgagatctccatttctcgctctttgtaactccggtgactgattatagatctctttcgctacaagcgaaacaccattgacgagcctggtaaagctcttgctccacgaactcatcacgaagccgcgtgcaaagttactcttcttaatcgtggatttgactttcctctttttttttgttttccatttttgtcaatttggttttgaagaattttctcgagaaagtatataatgtgtgtgtttttgcgttagaccacgaagatcggagacgtcgacgaggaaccgaggtttacgtggggagccgataaccagaaactgctcctccaaggtttctagtttcggccggcccaattagcctattctttttttattgtcaccatataaggcccattgggctataaaggagttttacgagtagcttccttaaccatttgtgatgttttgttggattgctcccgtaacatgtagttttaattgtccaaatatatttcatcaatttatgatgtgtttttttgtgtgtgataagaatgtaatgttaataaggtttaggaaacgacatcagtaagatcctagatacattgtcccatgccgaaaaggtaaaaaatatggaagcatagacaatcgagaattagatcatcactacatctttaagccgtgaagctttagacaaagctatgaaatgaacgcgataaaaaaattcctctaagcaaaacatggcaagaaacaagagctataaaagaaaaagaaactttaaaatgattataaagcgaagcgaaaatcccttcaacgtgagccccaacctaagaaggagcgatgcaacatgagctaaaggcggcaggcaatgctgttttctaccaacatccccaatcagtagcatggacaaagcaacttcttatcctccaaaagtcatactaacatcttcagaacactatgaaacaatcctataacacctcaaccaaattgaagcttcagaagacatatactaacacctccaatactaacaatttatgatgttaatcaccaaaaaatattttaaagatatgtatgtattagtaatacagtatcaccaatctttggctggtctaactcaaacatttagagagagaccgaacttaaataagagagactaatggttgtaaataatgagattcatgagactagcaaatcttcatgtctaagttgaaaattatcggatccgtcatgtgaaatccaaaaataacgatacagttttgttttctcagataaagtgaaagtcaaaccaaaaaactatataattggctgctttacattaacagtagaaaaccaacaataattgaattttatgctgctactaccaatgttgtaatatgtataagcgttcattatttaaatttatatacaatggccgccaaaaaaaataaaaatatgcttaagtacaatgcatctccactcataaaaggtaacacgagaaagaaattatataatacgaacaaacaaaattgagacccctaagtaaatatgaaaatcatctttgaaactattaatcttctctaactaattttcttaacgtaaaagaggactttattttaactttcggtgatattactccaatcttagggtacgaacaaatattgttattaaaccatttcgaatataaaattggtcaagccactcagaattgtcaggatggtaggcaatatagtatattggattaattaaaaactataacacagtgattagttggcattaaactacaggtggtcatcattttgtctatacatataaaccaaattgtatttagtcttgagatcttcaaaaacatctgagagctttgacaaaaaaaaagacgaagagaaaaatgtccattagagctcaagaaattcaaacccttgaaggtatagtaactctcaatctctctcttttaagttttaacggtttatacttttaatccgttttacatcatttgttaagcttttgctaacctctctaagatcctgagatccaaaaacatacttaagattttgatccacctggtttatattccatctcttagaagttttatttgctttctagattagatcggtttgactatatcgatcatattatatttgatttataaactataagtataagacttctgtttaggtgaaaatcacaagtcctttagtgatattgttgaagatttcctcttgaagatcattagcacaagttaattcaaatccgttattgtttaaagatcatcaacctaaaacattgccaataagtttcctcaaaagttcatttggatctataattttagttttttttttgtcttttattttcataatgcaaatagagagtcaatgacaatttagtgaaagatatatagttaataactttaagtgggtgaataatattggcattttaaatttacataatttatagtggaagattcaattaatacgtcatattttaattttcttttgggggtattttcattatattaaaaacttttaaaaaagttttttttttattttaatttaagaattataaacttataatatataaagttacatccgaaaaagaagagaaatttattctaaattgtagaccgaaaatgtataaaaatacctttactttaacaaaaaaaaaaaaaaaaaaaaatacctttaaaaaatatctataaatacacagcacaaacaaaacttttaaatgtttccaatctaggaaaaaaaaatattttggtttcgacgtaaaaaagaataatattgtagatagaaaacattttgaaaagtttttaattatgaatatatttaattaaatccataatttatatattttaaatgggcccattttgactttaagaaaatataaggcccaaatagaaagcctatagctcaaagcaagcctgcttttagaccgctttccagatctagaagaaacaatg

SEQ ID NO: 23618 - DNA, 3000 bp, Unknown; identical to SEQ ID NO: 23617
  misc_feature (1)..( 3000): 2750-1469P.txt file - cDNA_ID_2147361; gDNA_ID_2926161; Annot_ID_198780

SEQ ID NO: 23619 - DNA, 3000 bp, Unknown; identical to SEQ ID NO: 4398
  misc_feature (1)..( 3000): 2750-1469P.txt file - cDNA_ID_2147481; gDNA_ID_1620704; Annot_ID_165179

SEQ ID NO: 23620 - DNA, 3003 bp, Unknown; identical to SEQ ID NO: 20035
  misc_feature (1)..( 3003): 2750-1469P.txt file - cDNA_ID_2147485; gDNA_ID_1620704; Annot_ID_165180

SEQ ID NO: 23621 - DNA, 3003 bp, Unknown; identical to SEQ ID NO: 20036
  misc_feature (1)..( 3003): 2750-1469P.txt file - cDNA_ID_2147485; gDNA_ID_1620636; Annot_ID_162923

SEQ ID NO: 23622 - DNA, 3003 bp, Unknown; identical to SEQ ID NO: 20036
  misc_feature (1)..( 3003): 2750-1469P.txt file - cDNA_ID_2147485; gDNA_ID_2926204; Annot_ID_202073

SEQ ID NO: 23623 - DNA, 3003 bp, Unknown
  misc_feature (1)..( 3003): 2750-1469P.txt file - cDNA_ID_2147516; gDNA_ID_1620704; Annot_ID_48836
cgatagaatactttaaattttgtaacccttacctgaaatacaaattttctcacagtatgaattggattttaattatctttgtacttatctatccaggactttatattggcgcacatgggctatatacatcagaagtaatccatttaaaacgcaaatttggccagtggaaaggtggaaaggagtctaagaagccaacagatatcgaattttatgaatatgttgaagctgtgaaattaactggagatccgtatgtgcctgctgggaaggttagctttatgtttgttctagtatgaggtattaagacaaatatgaaaacttgttgttttcatggtcagtgtcaaaaatttgcgtactcaaacgactgtgttaccaatctagttaaaaaaaacgctgttacttttctgcctacacaggaaaggagtattatcatgcaatagtcacttggatctataaatgcacactcgcttattttcgatatctttcttcttccctaatactcttttgttgcaatatcatgatgagtgccttaccacagtcttatccatgacaggttgcatttcgggcaaagattggtagacgttatgagctcccacataaaggactcatccccgaagaatttggagtggtgtgcttaccttacaacactaattcaagtttatcattaagctcggttttcgtttagagttgttgtttgtgtcgcttcatagtagagttattcttacaaaatgcagattgccagatataaaggacaaggtaggcttgctgatcctggatttcgtaatccgagatgggtagatggcgagcttgttatcctcgatggcaaggttcctctcttcgtctctcaatatactaaaacaaacttgtccatggattcaaactcaaataaatgacatgttttgtgtgattgttgaattatggttttaatgcagtatgtaaaaggaggacctgtagttggattcgtctattgggcacctgaatatcactttgtgatgttcttcaaccgcctgaggcttcaagcctagttgtattctgctctacaatcgaggaagggttttcttctggctgtaaccattgtgtacgtatactcctagatacacagtagatatgaagtcggtactgagaaaggtataactgaaatggtttaattatatgcagattcatgagatcggttgtgcctaagataagattacttcaagttcaggtctttctggaccagtatagagatccacggtctcgctttttcttctggagcttggataaaggtacctaaattgggggaagatttaacacgccagagagtctttgatcagaaaggaaacttagattgtaaagcttgacaagtttatagatatatatatatatatatatatatatatatgtaaattaatgtatgtttctctgagattgctgctatattgggtagaaacgtggtaagagctgttgttgtatttcctttgtgtattttcagtttatatggcagaaaaagagaagaaatctttcttgttaatagtgactttgttactacatgcaacaacttaaaaatatagctcaagcaatgtgatcatgacaatagagaagcaaaggaatcattgatcttcaagtttatcatttcattacactcaatagtataaagattaaaagcagaaatgggaacttaggaggaggctgcagtagcagcagcagcttgcggtggcggtggtgttggtcggagagtgatctcaaccttatcgtgaacgccttgaagcaaaagttcaccttcaaatgcgactattttgcgtttcttggcagctctcagagtcccaaccaatgcttcaaagatgttggcacatcgatcgtcattgaacaacactccaaacgtcacctgtattcaaaaggaacaaatcaatcctcatgatcaagaatcaatcaactgtgtttgttagatctgagcgagagaaaagagtaaatgttacgatcttgattcttcagataagagtatttgttgattgaaaatgaaataatacagatttattccagatatagggagatccaacaagatttgaggagaaagagagagaccttgtaagagccatcggtctgacgagaaccaagacgatggatctcttcttccagtttctgaatctcttcgtctacgttcattctttcttcttccttagagatttcaggtctcaacagcctaatgttgtaaaaagattggattgaagaagagactctttctgtttctgacgaagacagctcgatggactcattcttgtccctcctaatccggttgaaaagaccaaaatgcgcacacttaaccggtttgaaaaccttatcgtaccgatttttcttcaacattgaaaattaacacacacctccggtttgagaccttaataaatgatacgacatcagccggtttaccacgattttaacattcgatttttctctattttttttttcttttagtttatccatacaaaaaattactgatgaaatagcaaaagattgcgtttaagttaacaacgaatatttaaagacagaacagaacttcagttcctcactaaaactgtatctatagattttttctaaacttatttgattaataaaagcacaggctaatattagaaagaaaaaaagtttttataaattaaaaactaatgtaattaggtaaatgaaaatgtttattcgcttcttttggaccatggagattaaggtgaaattatttagttgttatcattataaattaacaaaggttaagtgaatataaaattaatttgaattattttgttaagttgtgattaaagttcaatttcttcttcacgtttttaaaattcttgagcaagtaaaaattatttagcgactctaataaaaagatcctcctctcttcgatagagatagagctaagcacgaaaatcccgagtaattgaccttctcttcttcccagtgttgtcttctcttctccacgaacttaattttttcaaaaccctagcaactttgattcattcaaaatccgatccaacgatg

SEQ ID NO: 23624 - DNA, 3003 bp, Unknown; identical to SEQ ID NO: 23623
  misc_feature (1)..( 3003): 2750-1469P.txt file - cDNA_ID_2147516; gDNA_ID_2926204; Annot_ID_141673

SEQ ID NO: 23625 - DNA, 3000 bp, Unknown
  misc_feature (1)..( 3000): 2750-1469P.txt file - cDNA_ID_2147523; gDNA_ID_1620704; Annot_ID_48841
accacgaataattttgttttaaactaatttgtgatgatggctgatcatatttaactattttctttctttttgcaagatggccattttattattaacagaatgttttcaaacataataattgctgttatagtttaatctaattgaacgacttaaattaaaagagattcgatacttgatatcatgcattagtaaaaataaagttataatattttagatttcacttacataaatagttagctattcttgacggtttatataacaaaagtatccggtgttaatttcatacacggaaatctgaatcttgatgccaagattccagttgaaatattaataactcccattatgcatcatctaatgataattacagttttaagcacacacaagaaaaaagtattattccatgacaaaatattatacaaactataaacgtacaaaggaaccaccacatcctgatagatggtgatcatttattccaaattatagaaaacacacacgtcctctatggacaagtttctttcgtctgcgtacacatatagttagtaaggcctacgtcccctaacattaccaggatgagaatagttgcaagtcacaaaggttccaccattgtcacacttgactttggcacatccaacccactctgagtttttccacacaacttgagtataatgaccacattgttttccagcacggcatgtgttcgatttgtggaagtagtcagacttctccctgacccacaatctcactgcggcagctccggacatatcaccactgctccatgccaagttttcaccgtaacgtccgcgtgagtttgagtgaatgagacgacagtcccgctttcttctttgagcatagttccaggcgtatcgggctgctcccgcatgccattttatatgaggcacactaacgtcgtctcgagcatggttgtgtacatcaaggtagtcttgtcgccggtcttgggctttcagtggaactgcaaaagctaggacaagagctaatgccaatagtactagggtttgaggagagataaacatcttcatttttattttttttcttagttgtctgtaagctcttttattctatgttgtgtgttattggttagaacttagaaacgaggatttatatagagtttaggttggagttattttatggacgattaataacacttgcgagatattttttaccaacgaagacacgacttgtaagtaattgtattattattatcaactgttttaccaagtcaataaggcgaaagggtcagagagccttgataatgcccctttgtaaataaatttaaaacaaggatttgactgaaatgatttttactgtattaaaaatccaagacaatttcttcatatctttctatatacgttggtatgcttttattttattattattaaggagaaactttgaagcacaaaaatgtacaaatcattagaatatactaccgttcaaagttatttttatcctctagataatttctcagttttatgctagtttaatttctatgatatttagtagatcacgtgaatgtatggcgatgatgctaattaaataatgcattttattgtgaaaactcgttcttatctcatttaatgtatcttttttatattataaaatattattaattataactaattcaactaataaaaaatatatatttaaatttaatgttaaaaaatattaaatacattcattagtttttatgtatcaaaattcgttaaaactaaataagagtttgacccacggcaaataattcttagagtcttcaaaaaaaatataaatacgaaataatttgggatgcaatgattttcttgaagctctcaaatacattggggcggaatgattttcttaacaaaataatgtggcctaatagtcattaaaaaataaaatttgaggcctaaaaattaaaaaaaattggtggcttaggcaattgcctttttactaacaccatagatacaacactaattatatcccgacaactcgaaataatttctatgttttatactaatctaattcttatgacttttactaattaacggcgatctcgtaggtattcgatcaccagattatcaattgtgaacggataaagatgatcttgctcgataacctacaatccaatgaaatattatatgagaactcgaatatgctttttgctaaaaagaattttgccgacccaaaaagtagtagttcataaggaaagcttctcttcttcataatatatggaaaaagaaatttggtaacgtagctttttgataataataagaatttcaaaactacactagccaatcattcaaaaaagaaaatggtaattgatcaagtccaatttacgatttttttttacaaaattaattttaataaaaagatacaaaaaacactttgagtttgaagacacataaaaaagtgttgtggcgagaatccgtatcggatcaaaatcctcgtcatagcgggaaaacccagctagttgctgcgtcaccattaaaaaaaggacacgaccgtcaaatttacgaaaacaccttttgtcatctcacgtacgtagccctcactacaggggtattattgtcattataatatctaattgccacgttctatatatggcagtggatctccaccgcacgagactctgttgtttgttttatcatctctccataattgcttcgatttctctgcaaagacacaacacaaaaagtgctttttttaatcagatattttctgggcttcactttaactctcttcgtgcttggttttccgatcttagtcgttactaattgagtcggagactgttcatttcctgattctgaagaaagttttggagaaggagaagatgtcaactctgcgagtgagctagggtttagtgtgttttccgatttttgagctcttggggattgttgttttctcttaaagagtcgattttgaatggcggtggagtatgtatgttgcagcccaaacttctttatacatatagctgtgattgtgtttcttgtcttgttcgctggactcatg

SEQ ID NO: 23626 - DNA, 3000 bp, Unknown
  misc_feature (1)..( 3000): 2750-1469P.txt file - cDNA_ID_2147523; gDNA_ID_1620704; Annot_ID_165200
atgcatagttgttggagtttcacatcgctgactattgtgttttcccgacctaggatggctaaaaaactcttgataatattagccaccacgaataattttgttttaaactaatttgtgatgatggctgatcatatttaactattttctttctttttgcaagatggccattttattattaacagaatgttttcaaacataataattgctgttatagtttaatctaattgaacgacttaaattaaaagagattcgatacttgatatcatgcattagtaaaaataaagttataatattttagatttcacttacataaatagttagctattcttgacggtttatataacaaaagtatccggtgttaatttcatacacggaaatctgaatcttgatgccaagattccagttgaaatattaataactcccattatgcatcatctaatgataattacagttttaagcacacacaagaaaaaagtattattccatgacaaaatattatacaaactataaacgtacaaaggaaccaccacatcctgatagatggtgatcatttattccaaattatagaaaacacacacgtcctctatggacaagtttctttcgtctgcgtacacatatagttagtaaggcctacgtcccctaacattaccaggatgagaatagttgcaagtcacaaaggttccaccattgtcacacttgactttggcacatccaacccactctgagtttttccacacaacttgagtataatgaccacattgttttccagcacggcatgtgttcgatttgtggaagtagtcagacttctccctgacccacaatctcactgcggcagctccggacatatcaccactgctccatgccaagttttcaccgtaacgtccgcgtgagtttgagtgaatgagacgacagtcccgctttcttctttgagcatagttccaggcgtatcgggctgctcccgcatgccattttatatgaggcacactaacgtcgtctcgagcatggttgtgtacatcaaggtagtcttgtcgccggtcttgggctttcagtggaactgcaaaagctaggacaagagctaatgccaatagtactagggtttgaggagagataaacatcttcatttttattttttttcttagttgtctgtaagctcttttattctatgttgtgtgttattggttagaacttagaaacgaggatttatatagagtttaggttggagttattttatggacgattaataacacttgcgagatattttttaccaacgaagacacgacttgtaagtaattgtattattattatcaactgttttaccaagtcaataaggcgaaagggtcagagagccttgataatgcccctttgtaaataaatttaaaacaaggatttgactgaaatgatttttactgtattaaaaatccaagacaatttcttcatatctttctatatacgttggtatgcttttattttattattattaaggagaaactttgaagcacaaaaatgtacaaatcattagaatatactaccgttcaaagttatttttatcctctagataatttctcagttttatgctagtttaatttctatgatatttagtagatcacgtgaatgtatggcgatgatgctaattaaataatgcattttattgtgaaaactcgttcttatctcatttaatgtatcttttttatattataaaatattattaattataactaattcaactaataaaaaatatatatttaaatttaatgttaaaaaatattaaatacattcattagtttttatgtatcaaaattcgttaaaactaaataagagtttgacccacggcaaataattcttagagtcttcaaaaaaaatataaatacgaaataatttgggatgcaatgattttcttgaagctctcaaatacattggggcggaatgattttcttaacaaaataatgtggcctaatagtcattaaaaaataaaatttgaggcctaaaaattaaaaaaaattggtggcttaggcaattgcctttttactaacaccatagatacaacactaattatatcccgacaactcgaaataatttctatgttttatactaatctaattcttatgacttttactaattaacggcgatctcgtaggtattcgatcaccagattatcaattgtgaacggataaagatgatcttgctcgataacctacaatccaatgaaatattatatgagaactcgaatatgctttttgctaaaaagaattttgccgacccaaaaagtagtagttcataaggaaagcttctcttcttcataatatatggaaaaagaaatttggtaacgtagctttttgataataataagaatttcaaaactacactagccaatcattcaaaaaagaaaatggtaattgatcaagtccaatttacgatttttttttacaaaattaattttaataaaaagatacaaaaaacactttgagtttgaagacacataaaaaagtgttgtggcgagaatccgtatcggatcaaaatcctcgtcatagcgggaaaacccagctagttgctgcgtcaccattaaaaaaaggacacgaccgtcaaatttacgaaaacaccttttgtcatctcacgtacgtagccctcactacaggggtattattgtcattataatatctaattgccacgttctatatatggcagtggatctccaccgcacgagactctgttgtttgttttatcatctctccataattgcttcgatttctctgcaaagacacaacacaaaaagtgctttttttaatcagatattttctgggcttcactttaactctcttcgtgcttggttttccgatcttagtcgttactaattgagtcggagactgttcatttcctgattctgaagaaagttttggagaaggagaagatgtcaactctgcgagtgagctagggtttagtgtgttttccgatttttgagctcttggggattgttgttttctcttaaagagtcgattttgaatg

SEQ ID NO: 23627 - DNA, 3000 bp, Unknown; identical to SEQ ID NO: 23625
  misc_feature (1)..( 3000): 2750-1469P.txt file - cDNA_ID_2147523; gDNA_ID_2926206; Annot_ID_141719

SEQ ID NO: 23628 - DNA, 3000 bp, Unknown; identical to SEQ ID NO: 23626
  misc_feature (1)..( 3000): 2750-1469P.txt file - cDNA_ID_2147523; gDNA_ID_2926206; Annot_ID_202188

SEQ ID NO: 23629 - DNA, 3000 bp, Unknown
  misc_feature (1)..( 3000): 2750-1469P.txt file - cDNA_ID_2147537; gDNA_ID_1620704; Annot_ID_48848
aatccgttgaaacaacacccatctatcgaataaggataactgcatgcacttggataatttccatgtgacgttgtcattatatatattcttatagagagatgtttttttctccctttttgaagtatacaaatattccattcaccaaaaatagagaagtagactcagcttctatggaagtcaactgtcagtgtcaggtgtagaataaaagcatatgcattactttttaagtaacgatccatcgcaaatatatttgacggcacattatattctcataaacatgaacattgatgtccggtaagcgataagtcaacacggtatatgattctagatttagttaatcgtcagcacttgataagtctatgtcagtgttaagtcaaggatcgtattctatctgcaccatatgcatatgaatgctaaaatcatattaccgttttttacatctcaatttgggaaaaaacaaatttgctcacaaaatgtctacttaagaattaggtcaaacaacatatacgaagttgtattttagtaatttgaataaaaaataaatggtgactggtttatctatattaggacgaatttatttatacatggtaacacaatcatacactagacttatatatagtgttttgcaaaataatgatgatgtattttaaaagtactagtctttattagttgatcaatgaaagtttgtttgttatatatatacttacattatatacataacataaagtaatcattttccaaatatattaaacatatgaaacataaatagactgtattattgtgaatgatagctaaattagtaattacattagaaagttttaaacgtggaaaaggtttatatatgttagtttgatattataaatttacctaaaactaaaggaagattctgacagaaacaagagactagctatactctgctgcctaacaaaaaggagcatattcccttgcatgttgttcatcgttaacatattctataaagtatattgcatttatcaataatttaagttggaaatcagtagattacctctaccttttttaataattcttaattgggtgtgatctaaagagacctgatccactagaaaagatctcaaggttatatgttaaaacattttgcaacatttgtttatccatttcataaaatattagttgttttctctcttaacttttgtgtgcaacaataaataaatccaaaagttttttaaaaaataattatagtagtggctagtggtgagtaagactatactagtatatcaaatttgcatgcgtgtgcgaacgatcatagatttaagaaccagacaagcttatccaaatatcaatcgtcttagaaaagcacagaattagaaaggtcgtcaaatcgaggaccctatggaccaaccaagtaattgtcactgaaatatcaccctacatgaatggaagctcaatgtaaacatctaaaaaaggtttttgaccatgaggaaaacaagaatcttaaaggtgcccaagcactattacaagtagaaatcacaatcaaattgtatttgattactagctttctacaaaattagcaaatatatatgtcatcactgttagttttgtcaactatctatgcgatgatttagataggtcttaataaggcgctgggggccggtcgtgagccatcatcatggaaccgctgtcgtatatgaagaaggatgacacttaatcatatacaaaatagatcaacgaaaggtttctaagattttttctcatcaatgtttcaggatccaacaattagcaaggatcaatcatatgataattcaacaacagctgaccaaaggttttttttccaataggtttcattgtttttttacctcttttttttttttttgataatttacctttttaataccaatttgaatttgttttccgattattttgctataaaagaacacatttatggactcaaatatatatccaacatttatggcagacatcgtccattttcggttctttggaccattaggcgcgaataggaactcaccactaaaaaagatttggtgacgtaattacgtcaatcatcgaagtttctaacttttacaaccccaaggctcaaacatgcttcaagcaaatcttgttgcatttgttgtgatcgaagttggaaaatttgtcacacgaccttatggctatttacagttttgatggtagtcatgctacacaaatttacaagtactgctcgtttactgtactgctcacttgctcagtcactagttaacaataagccaattcatcgttatctaacgaaattcattatagtaataatattaaaatactcaaaatacgatttgtcagtctattgatgtatttgatgtagaagtaagtgtaattcactaaaaagagggaaaaaaaaacgaggagaatacgtggaaactatagccgctttttagtgtatttgacaattgtaaaaaaaaaaaagtatatatagttttaattttgttgtcgcttgtacttttcaagttgcttgtaatatggtttcatcttgagaaaaaaaaaaacagaaagagaaaatacaataaatgtattcagaaaagaagaataaccaaaaaaagcagcaaatctttgggaacgaccatgtcactgtagcatctgtttttctgcaaattattctctctataaatatatttgatcatcagaccaatctctccctcaacatttcctcatctcatctctctgatttcttgcttcgaattttgatttatctctctctgtctctctctcggtctcgtgctctatctcgtttgtaggcagtgccaatttcaccacttgtgttgtgtgtcagcggatatagaatctgagaggaatatttaaagattctccctttgcttcttcttttttataccgtttctattaatgtttgggactcttgcttccggcgaaatcgaaactgccagactgaaccgtaatttggggattacgtccaatttaggggtttcctgcggtggatttgaagactttgctatgagattcgaaggggaaaacatg

SEQ ID NO: 23630 - DNA, 3000 bp, Unknown; identical to SEQ ID NO: 23629
  misc_feature (1)..( 3000): 2750-1469P.txt file - cDNA_ID_2147537; gDNA_ID_2926206; Annot_ID_141726

SEQ ID NO: 23631 - DNA, 3000 bp, Unknown; identical to SEQ ID NO: 7921
  misc_feature (1)..( 3000): 2750-1469P.txt file - cDNA_ID_2147566; gDNA_ID_1621173; Annot_ID_174026

SEQ ID NO: 23632 - DNA, 34 bp, Unknown; identical to SEQ ID NO: 5419
  misc_feature (1)..( 34): 2750-1469P.txt file - cDNA_ID_2147566; gDNA_ID_1620787; Annot_ID_168164

SEQ ID NO: 23633 - DNA, 3000 bp, Unknown; identical to SEQ ID NO: 5408
  misc_feature (1)..( 3000): 2750-1469P.txt file - cDNA_ID_2147635; gDNA_ID_1620785; Annot_ID_168117

SEQ ID NO: 23634 - DNA, 2836 bp, Unknown; identical to SEQ ID NO: 1926
  misc_feature (1)..( 2836): 2750-1469P.txt file - cDNA_ID_2147824; gDNA_ID_1620469; Annot_ID_157967

SEQ ID NO: 23635 - DNA, 3000 bp, Unknown; identical to SEQ ID NO: 1930
  misc_feature (1)..( 3000): 2750-1469P.txt file - cDNA_ID_2147840; gDNA_ID_1620469; Annot_ID_157971

SEQ ID NO: 23636 - DNA, 3003 bp, Unknown
  misc_feature (1)..( 3003): 2750-1469P.txt file - cDNA_ID_2147864; gDNA_ID_1620469; Annot_ID_157978
cctgtacatataacaatgactacaagacattaaatacacagagacacgcatgaatgtgtccacagacacataaaatagactttttccatgtggtccacttatttatcccacatctaaaaacaattatgtaaatcacttattgtccgtacagtgttataacattatcggataattttcagttttatttcagcgtattactttcatttgttttaattgttttaaaaaagaaaaagaaaagcgacgagacaacaaactttttcccagcaaagccatggaccaaaaacaaaagctatattttcagattcactaaaatagtaaaatggaaacagtgaagtttaaaggaatgggttccaccaaaacgtggtttatgttgtttctccccatcatggacctcacacgtttggcatgtgtaaaaactatacgcacttacaaaatagactatttatagttttaagagtaaacattggcgaaaaaaaaaaaaaaagttaacagtaataaccctataaaataattgactctaaatttgttttatcttcgtatatataaaagaaatgaagaagtgtaatccaaaattttgatagaaattgataagatagaatttgaaaaaaaaaattgtttaaaatgtaacactaactagtaaaaatataaataataaacatataaagtaagtattttagtgacatggcaaacgattgcaataatatttttatatttattgatattattatgtttttcgtaattcattttctactacacagtatcctgatttaatattatgtattatgttttataaaagacataatatatcctaatcttttaacatacaatattttcaattacaattcagaacaaaaattgtacaaatttctttcaataaccattttttacaagtaataatagctgagattggacatctcacattatattactttgattatcccatagatgaatcatctgacaataatcataatcaaaacaacttacaagtagtttttttttcatttatacgatctaggttataaacttaaactaagttttgaggattgataatttgattataattttacgatttttgctttcaaagtatcttaaattaaatcctgttaaattaaaaatcaaatatttagtggtgtgctcctccaccttacaccatcatcaagtccttttttcagtgaaagatggttttgattaatgctaactgctaactgtttccccttacaccatcattcagttgtattctttttacatgttaggtctaaaaatagtggaatgtggtattaaaaataaaaataatgagttaatcacaacaaaaccattattgggcatacgatatatattttctttgctcaaaaagaaaatgaaaattgaactatgcaattcaaaaatatatcaggttccttaccttttatttatcaaattcaacgtcacaattttactacatgacagcaattgtaacgaaaaaagttaaagttgaatcttggattgtgaaaatttttcgtaatttggtatgaaaataatttatgagcaataatcctctttcattcaacactagtcacttcaatcaaaaataactcccaacattgttatctttaagttggcgatgttgtaaaaatacaaaaaattttgaatttcttttttcttaaaattctaaagttttgaaactaaaaaaaattaagaagacatttcagtgagtactcatgctcacaattttgtctatgaatatatcaaagattgacagagtgttaatatggattttaatcactcaaacacccttgattatagaccttatttgagattcaagattaacaaggaataagaatagtaaaggtggcatatcagattaacaaatgaataacaaaatcaatagaaggataacaactgtaagccgaacaaattttatttttttaaaacgccataaagctaaaatttagttataattttaaaatgtgctagtgctagataaattaaattacttattatttccacgttttataattcaatgcaaagttttgtgaattatatgtattcaacaaatcaaattttcaaactgtaaaaacatggaaaattgtatatcattcaatccctaaatcaaactagacacgacatttatttaaaatacacacttactcaatcaatatgtttggaaaaataaacaacaacaatacaatagagttattatattgtcaaaaatatatacacggtcgaatcttcttggtaattgcatgatgtagcaagcgtggagaggaattaacacataacagatacgacttgcatgcttctcgatttgtttttgttttctgccagtacatttgagaaaattgattttaccaaaataccccttaagattcttacctatgacatatactgaccaatcatatcaatgcttatagatagtaaaaaaaaattaaaaaatcattccgtttttatgtatagtcaaaagaaaactgaaaaaggtattttaaatgattcctaaatttcgtatagtcaaaacaaaactgcaagaaaattttatattagctagatttatttccttttgctatgatatattataccaagatataaatagcatttatgcacgggaaaaaataacagattttaaggaaaaatagctaaacaatttctttctttaaacattactaacaaataaaaatcaattttaaatttacaaaattaggaatacacaatatttataccatatcactacaagtcaagtcaatcaaaaaaaaaaaaaaaagtatacatatacagtcacatgtgctggtgtttgttaagatatttatatataggaaattaatttaaaaaaatgtaaaactttcaaaaggataatttattctctttctagaaataatcttattttaatttattcatttttgactttttttctctctctctcttccttaaataaaaagcctccctccatagatttcttcaccagtcttcttcttcttctgcctccaaactctctctttctctctcgagaaccttaagaaaacgttacaaatg

SEQ ID NO: 23637 - DNA, 3003 bp, Unknown
  misc_feature (1)..( 3003): 2750-1469P.txt file - cDNA_ID_2147908; gDNA_ID_1620786; Annot_ID_168146
ttgaggttgatgttgatataagtagctcggcgattatgacggcgcttattaggtttatgttggggtatgttacgtatttaatggttgatattggttttgttgtggaagcgcaaacggaggaggagttgccggagagattgattggtggtgctaggatttgtcatatggagttatcgtcggcgtttgtgatttatgatgatgttgatgggaagaagagttcgcagcaacggcggagaatgatgggtgcggcggaaggaaatcacagcgaggatgaggattgagatttgaaacgaagatacgtcaacgcttactttttttttttgttgggatctgagttattaaaaaaaattgattattttgtttccacgaggtgggcaagatttgagattagtttttttttatatatataatgtaaaaaatttggcaaaattaataaatatgttttgtttatttctaaagtagaacatcattttttaattatctaaacatgattcaactaataataaaacaatttaacaaattaaagaatcaaatttattaattttattttaaaaactaaaaacatcatttatgttaaaagaaatttttcaatgatatatcagaaaattacttacattatgatcggtacgaaaataatatttatcatatttgaaaacatagaaagtggcgccataatatttaaatctattaatctgtagtgtcttgtgtgatacaatgctagcttgtcaacacgataagctgcgaagtttcattgaactgaagagtatagcttgtgcgatacattcaaatgtaaatttgacacttgttaaatgcaaaatatgattacgatgcgaagatatttaaggtttggcaaaacgaagtaaacaaaaacataatcagacatatatttgagaatcagctatttcttaaacatgtaagtgatagctgatccgataggatatataaaatcacaattacttccactttctcttttgttggaggaacttgggaatgcccatttaatgaattgcattctctggattaaacgcaaaccactttcttcagctagagcctttaaatcccacttgttaaatgggtttagtgtgtttagagtgatatgaatctctccatcttcgtctttcatcatctctcttgcactctccataaatcctccaaataccttattgcgtttcctgtgaattgcacactcaaatgttgaatatacattcatatgaataatatatatataatcataataaatattatacatatatatttttaaaagtatatatatgaaagtggttccaaacatatatggatgtatcaggaatccaagatcttgttatgaatttccaaatatcaaacttttgatatataagatctgaaacaagctcatcaaaaaccaaaccctgcatgaggaaaattaaagatgattatgtcgtaatgagctaagcgatcgtctgatttcatggagtgtacattaacaccacggaccacagtgcaaccaagtctctccaactcttccacgttcccttttccattgttgtaattacgccctagatcctctaccatacaaaacataatcgccaaacttgataagctattgttctttatatcggataacgacaataacaaaattgaaaaaaaaatgattgataattttagacatattactacctcgaatatcaagcgatattgcagtgatgttggtggcagaacccaaggcttttgctaaagacaaagaaaatgaaaactctccttctccgaccacgagtattttttgctcattgctatatcgacttaaccttttagattcctgaacatccatctcagatcagttgcatgtttaagtcaattcacaccatgtccttttatacacatgtacatacacatcacagggatgcattagtcaaatttagacaattttagtgttaaatgctggattttgtaattcgtctcttcgaatttagtgatcatttatgtacttttgaaagaccattcattttttttttccgttcatatttttatttttatttttgttaaaaccattcatattctacagaggataatcaaacttcttgttttgtttttcttggttcaaaagttctttctatcacggattagttttagtttaggatcatgaatagccctaataaatatgattatgatatagtaataataatacttaggaagagtgactagctcgttttacattctttatctaatgatgaaatcatatttattattcattttgtaatatgtttatagataacaacattcttcaaaagttaaatatcatttaattttcaagtattttataaaatagaaataacaagtaacaacaattattaattagttggtggcaaggttttttgttttttttgtctatttcagtatttctatataaatgatcaataaaggcatgacacactcccaaagatgctgggatatttaatattatttcttttgttatgaagaaatgaaaatggacatttcactttttggtatattataaaatcagtggagaagtatagtggtgacaagatctacctttgatccaacgatttccgaacacgtatataaaaaaggaaatactacgttagaaaaaacaaaactgtccctttgtttggcgacttattttgaaaaaaacttagtagattttttcttttttttgggaaatactgaatttagaagacaataatgcaatgaatattatacataaattaaattctttcagacacattgtattatttgagatatgtggtcatatatacgtcggctatctttttccctttatcctttattttcttcttcttcttcttcattgtaattcatacgaaagcatgtcaacgaagcttgacttttaacttgcgtacgtcaaaagattcatccttatgatctgagatcaatccaagaaatatccacttcagacaactgttgtcctcggatctgtttttcagacaaaagtggagctcaaaacggagacaaatcttcaatctttgactccttgcagaaccagttatg

SEQ ID NO: 23638 - DNA, 3003 bp, Unknown
  misc_feature (1)..( 3003): 2750-1469P.txt file - cDNA_ID_2147918; gDNA_ID_1620786; Annot_ID_168148
ttcagtatcggatgggagatcacagctcccgaattgtcagctgccgtcaagtcgtacagcgaaattgtgcgtcggacctcaattacagatggaggtggtggtggagcatcagtcatagcttcagagaaaactcacttgaaatactcaattcgaaaaacacagattgcgctctgataccatgagaaacttaagacaagatgtagtttggtttatgttgtcttatcttattaaagaggcgttaaaaccttacttatacaaagcaaaagatataacctaaagtgttgcacaaaggaaatgactaaacaggatatatattgttgactaagccaactaaaatattgaccagcaatagcttcaacactctcgcactctccataaagcttttcactacctcatggtgtttcctgtgaattgtacacacaaatgatgatgattactatataccaaagagtttaacaggaaaaaatgttgcaataagtaatggaccaaactttatgttattctcacgtatccaaatgcataaatactaaacaaaaatcagagcggttccaaacatgcgtacggtacggatattttgagttatagatcaaatactgagatcatgattaatagactcctaatatcctacgcatatcggatcagatttcaaatgttttgtccatccctatatcacaatatacatgcatgatgaaataagctttcattctcacgaccaaaaccttaccctgcacgaatgaaatgaaatatgattttgtcatatcgagctaggcgacaatctgaggtcatggaatgtatgttaacaccgcggaccacggtgcacccaagtctctccaactcttccacgttggcttttccattgttgtagttacgacctagcccatctaccgtacacataaaacattaatcagtaaagttgataagctatattgttgagtttatttttcatgtagtgattatgctagtatatgatgataacaattaaaacaatataaaacgattgatggttttagatctactactacctcgaatatcaaaagatgctgcagtgatgttggtggaagaaccaaatgctttggctagggacaaagagaatgaaaaatctccttcaccgaccagaagtatttgcttatcactatagtggcataccattttacaatctgctgtttttcttttcacaacatgtccttatatacacatgtataacacatatggatgcatgagtcaaattacgagaactcgtattaaatgtttagttctgtctcttcgaactttgtgatcattgaagtacgttgaagaccattcatatttctttttttttttggttcaaatttttttttttacaacgggtttattttaagtttaggaccatcaatttattttggccctaataaataagattatcatacactggaagaggtgacttgctatttgcattcttttttctagtaatgaaattatttttctaaaatgctttcttgataaagatttatatttgcgaaaaaagaatataaaaaaagattcatagtttctaaaacaataccagaagttttattagtttttttgtaataggtttatcaatgacaaccaccacaacatcctccaatgttgaatatcattagagattgatccgggttatacgtcagaacgatatccttttacaaaatagtttaaattttaaattacatttattttgttaatattgtttgttttgttaagtatttaagattatacaattttatttcttaattctataatttcaccgtagtattatcagatgaattttgtaaagactgaaagtgaaaatactaaatactttaagaatttttggctaaaaatctacaaaaacgtacatgtagattatcagtttcaagtattttataaaataaataaaaaaagtaatataataaagagtaacaacagttagtagttggtggcaagcttttgtctaagtctatataaattatcaataaaggtgacaacaatatcccaaaatgctgggatatatatatttacttttgttataaagaaatgaaaatgggctttttggtatttcatgatcagtggagaagtagtggtgacaagatctatatttcacccaacgatttccaaacacgtatttaaagaggatatactaggttaagaaacacaaacaaaactacttctgttcctttgtttggcgactcttcaaaaagcttttggattttattttattttgggaaatactggaattagaaaacttatacacataaatcaaattctttcagatacattgtattctctaatatactttaaagttacgtaattttaattacaaattcttacgttcacctttaacaacaacgaaaaaggttcttcttatgtagagaaagaaaagtcaaaagtattgatgaagtaatatggtgactttgatgcaaaaccaagcttaattccatttaacaaagaactcatcttcttctattgaattaataaccttataaattctataaaaagcttctatttttgaggtaaaattgcaaaaaataagcagaggaaaacagacaagaatgttcttagtaagagacaaagaaagatgtgtgttctggtcaaacatttagcagcaaaagctttgaccttttcctttcgtctctcttgatctaagttttatcctttagtttctttattcattttctttttcttctcttcttcttcttcaatggtcatttgttgttcatacgaaaacagggtcaacgaatgtgtgcaaatttcatttttgtttcttgagtttaattcaagattcatcatatttgattcccaaatctttgatttttgacttgcttacatcaaaagattcatcctttttttaataatctgagctcaatccaatccaagacataccaacttcaaacaactctcttgtcctcgcccctcggatctgtttttcagaccaaacccatatcaaaagtttcaacatttaagctcaaaacagagccaaatcttgaatctttctcctccttgcaagttatg

SEQ ID NO: 23639 - DNA, 3000 bp, Unknown; identical to SEQ ID NO: 5412
  misc_feature (1)..( 3000): 2750-1469P.txt file - cDNA_ID_2147922; gDNA_ID_1620786; Annot_ID_168149

SEQ ID NO: 23640 - DNA, 3003 bp, Unknown
  misc_feature (1)..( 3003): 2750-1469P.txt file - cDNA_ID_2147939; gDNA_ID_1620786; Annot_ID_168155
aatagtccaaagattttggtgaaagagattagtgttgttgactgaaatatcgaatataaataagtgatgatgacgcaatggtagtatttgtttgtagctatcgttggagaagatatttctagcggaatttttgtcattagctccaagtatcaaaaaagaaaatactaatgacacaaatagtgagtatacttatacatgcatctatatattaaagtttttatgtcgacgagaaaggacacgatgtggaagtcaatttcgtcatgttgttttggatctttgttttttgaggctaaactatagctaattaatactaaacacgattactgtatatacacgtagaaatccttaaatgttgagctggtttatttatttcactaatatcattttgttaaacgtacaatttttattccaatcgagtaagctttttcctttaagttgtttggaattttgtttgacatgaaatcagtaaaaaaataatcaaagtatttggtatttatacaaaggcctagtaacaatataaacaacttacaaaatcaaatctatttatagaacgatcttaaaatatcaagatactaaaactttgggaaaaatacaaaacaattacaaactttaagcttaggaaggttgttaaataaaagaatttgttagagtttctaaataatttaactatttaagggtctattggattaaggattttgattattttggtggattttaaaattagtgggcttttaataaatatcaaatatattctaatgattataaaaaggcttgagattcagtgggctcttatgatttttttaaaatgctgctaaggagaattttcgtatcaaaagttagatacctctaggcccatagttttgacgaagacaacaactgtgaaagaaaagtgttacctccaaaattgttctactacctcacagaacataatgtgtaagattaacgtcaatgattttttttatttttttgtcatctacgtcaataatttgttaataagagattagagatccaactactaggatataaaattttaaatagtaaatgcaataataatagtagaaagatcgaacaagagatcaaagtgagaatcagagcttaaccggagattaagagagacatgagaacaacgaatggtcaagatgaataatggagactaccatgaagagatcaatacgatagaatccgacgataacgaggcatgaatgaggctttttttttgtttttttacgttgatgttgtatatatgggagatttcatatttttaatttgtttgaagtcactccaaatttcatgtttaacaaaaaatagtaataatatatgaagtttcataaaatcctttttcattagatttttcccccaaattgctatattcctattagcatcacattttctatgaattttcatataattaatcgtataacgagatatttcaaattatttttcaaaagtttcaagttcactaattacacatttgagaagatattattgatgatttggaagtccttcaaggctttaacaaaaaaagatgattagtgatttaatttgggctactgtcacggatgtgttactatccgaattcgaactcgtgtatattacatgacaaagaaaaacacatttaaaaatcatcgattaaataacatgaaaacatatatacactcttcaatttttttctaaattttagattttggtggaaaatttgtagaaaaacctaataagtagatctaaaatcgaaagttcaacactaacaacatttatattgttgattgttcataataatttataataaaactaaatcaaaaatatttatagtgataatataatataatatatttggaacaaatataatatctaaagcatcaagtttcacactaaccacatttatattgttgattgtttatcacacaccgtagatttgctgccacgagtcaaatccacaatccttttcgcaagcgtttgacccagacttttgatactcgtttaattataaacacacaaatatcaaaataacatatcaccttatcttgaaaattgtggcattatattcttttgtgtggacaagaataatatgcttaattaaataaacttataatgaaagacttccatgccaccacatccttgaagcttatgtaattgaaatgtcgtgaaatgatgtataaataattaaatatgaaatcgtcacaattattgctcaaaaaaagaagaaatcgtcacaattatatatcccacacaacaaagtccaaaaagaaagaagttatcaacaacaaaaaaagaaaaaaaaaagtcccacaaacacaaagtgtaatatctaaaaatccatatctccatctctcccctctatctatcgctccctctctctaattcttcggacacaaagcataagacttgaaggtaatcctacagaaatatcaaatattacatattctcaattattattttttaaacacaaagtgttctttacttgttcgaatgttgcatgtctcttgaccgtgaaaagaaatttaggattcttcattacgacagagtgatgattttttttgttttgccaaaaacgacagagtgatgatgctttggtggttttattttatggggttctatatttttcatctattggtgattgattacaaaaacttttaagactttagataatatatttttgttgagtctttaaaatccaattttcttgaatcaaacttaacacattcatagccctaaaaaatcttctaaaatttctcgtggcccatgtgtttggtttagtagtttttttcctttttaaagtcaaaattactggaacaaacattttaacatcagaatttattgtcacactcataactaatgaacaccacactttttttttggggttaaatgatccactaagcttgctagttataaacttatagtatttcttttaggattgtaaaatataaattgttgcattcgtcttcttttcaaccataaactaatttgctttgtataaacttatccttttgtgtaggaagcaaaatg

SEQ ID NO: 23641 - DNA, 3003 bp, Unknown
  misc_feature (1)..( 3003): 2750-1469P.txt file - cDNA_ID_2147947; gDNA_ID_1620786; Annot_ID_168157
ggaagcttccagaaggaatgaaggtagcagatgttgatcttgaagaatcatatggacttgtttgtcctaagaaaatcccacttcagcttatcccggtccttacccaatggacttgatgttattttttcatatttcaaaatgtaacccttaggaagtatcttaaagttcttatcattattatatatgaataaagaaattatttgatgaataatgctcattttatttggtaacgtaaccttaacttttaataaccattgctaaagttagtctaacaaatttagagatttaattacacaaaagagactcttatcaatcattcgttccacatattttgttcattccacttataatgttgatcagttttttctgcattgccctttcagttgtcactatttaaatccctactcacaatcgtttcgtaaacattggaccccagctattgatatgcttgctggaaattttggcattacctctcatattcaaataaacatatacctcatattgaaaaaattggcattattaattcgtttgtgtggacaaatatattatgctttattgcaaagtaaacttatcgtgaaggaattctatccaaccatcctttgaataaacaaggattgataagactccaaaaactattactataattttgtggttgagtgatagagattcccctgtaacaaacaaggattgataaaagacccgtgaaaactctcttttaaaagaattcacgtaaaatatattttatcaaacagacaataaatactaggatttcaatataaatataattgccgaccaggaaaatatgtggtggttcatttcttttggacaccgccacaccggtcaatttgatcagtcatcttatgaagattattacatatgtgtttgacgtaagacgtacattataaaagggcaatttgtatataataaattattagtttaattttccaaaaaacaccactaaaatatattatttccaaaagtaacaaaactaaaactaaacaataccttcaaaaatcaaaactaaaccctaaatcttaagcaaccatatcccataaaaactatattctaaacttcaaattgaaattttaccattgaacatcaattttggtgtttatggtatttttgaaaaacatttttagtggttttttagaaaatcctaagaatattgaatacccaagcaggacaaaataaaataatttgagacagcatgagaaatggaatcgttgagttggatacaggtaggaatccgaagaaataattatgtttcaaagacatgatatactgcaagaaaacatagtaaatttttaccaattttcctatgaaaattttggtacgaaaaaaaaaccatatacctacaacctttttatgaatattttgatagaaaaatggtaaaaaaaatttatgatttttttacaaaatattttacgaattttcctacaattttttttttgtataaataacatgcatatatatatataaatattttacaataattttgaattatatcataaataagatcaacattaataaaataaatgatttttttttgtaagatgtgtttggcgagacattatttaataaaaatggtaaactataaaatatatatattttataaatatatataatttgttaacttttatatatagtaacttcaaaaaataaaacgttttgcggtataccgcgggttaaaatctaactatacttataatacatataataataccaaaatcgttgctaagaatcagacctagatacgtcgccggcgctgctaatcaatcctcgatcgaattccttttaatacactgtcacggatatgaatatctctatcaggtttgtcgtgtcacctgattcttgcttcaagattacttctttataccattaaagtttggatttagcttctggtttctcatctactaaaaaaataattattaaaagcaacattagtatttagaacgcaaaaaatatatatatgtggatagattaaatttctttgtaaatatttatgggacaacgagtacgaaagccattttgaagattcaaaataacaaaattatcattttgttaaagtgttttgtaagagttcaaaaccttgaaggtttaaagtataagtaaatattcgtttgaagatttttaaatggattttttcctaaaactaaacgttgaataaaacttgtggagttgtggtattgcaaaccaaagttgtactatagagttggtgggtgtgaaaacttctttcattgggagacctatgatttgtagctatataccttttatgtagttgccaataagtcagtatataattagaatatgtataaaaacccttataaatttaataataatatttatgaaatgagataaatatttttactaacaacaattatttctaactttaggtatacttaatatataaaatatattaccaaaataaggagctcaaaatgtgatgttttctagtggacgcttatataaatgtgcgattgtcacacagtgtcatctctccctctccgtctccctctttctaaaatctgcggcacaaagtatatgaattaaggtaatcttcaattttatatttatttgtgtatatatatgtgtattagatgttgcaatattgtagattttgaacccggaatttaatacaaaaaaaattcttaaacccggaaaacaaaaactaggtgaaattaaaataaataaataaaaacgaaaaggtaaaatttgttaaaagctataagcgttatttattacttattcgaatattgcatgcattttgcctaccgtgatcatataacgaaatttgcaattcttacggcaaattgattctttggtgatcatcttggtttgtgcagctctatatatatttgcatccacttaacatgtttttttttgggtagttggcagcatcatgctatttatttatattctcttgttaatcatcaaataaactgaacaaattgaaaattaatttactttacataaactatccctttttgtgtagaaagcaacatg

SEQ ID NO: 23642 - DNA, 3003 bp, Unknown; identical to SEQ ID NO: 23641
  misc_feature (1)..( 3003): 2750-1469P.txt file - cDNA_ID_2147947; gDNA_ID_1620793; Annot_ID_168366

SEQ ID NO: 23643 - DNA, 3003 bp, Unknown
  misc_feature (1)..( 3003): 2750-1469P.txt file - cDNA_ID_2147955; gDNA_ID_1620786; Annot_ID_168160
catttaaaatcaaataaaataatatcgtatatttataatcatctttacaataaaagtttttagtttaactaaaatataagcttacatgcggtatactgcaagttaaaattataaataagcaaattaccatcacgatgtttgtaccttctcacatacacacctatcaaaaacttaaaacctttcaagacctcttggtatattcaaattaggatttcttcattcatggaatcattcttccaagggttttaggatgtcccatgaaatgattttggcagaagaggatgtaaaacttttcgaataaaacgtagacagcaaaacatatgtttttttgggagtttttagataattaaatcagagaatggggctgggcatatgagtaacctattcaagttcgggtagaacccgttcgggtagaacccgttcgggtttgggattaatgggtatatgatttactacccaatagaataattctaaatatttggttctggttcgggtcgggtccatttgggtttgcgtcagtttggataaaaagtttcaggccctaaaaatacccaaaaaaattgaaacgggtattttgtatgtagatagtgggtctccaaacaaaaaaaacttttagatttgttaagttttaataaatttaattatatttgaatatattttactaaattttgacaaacataacacataatttttgaatagtttagttgttttggatatttaggtccaaaattaattgacatatttagatttataattataattttagataattagattatattacgattaaatataattaatattttggatattaaattaatgtttgggtttttgaataccctctttggataaagggtaatttctggaccaatcggatatccacgggtttactaaaactctacctaataaggaaatttcctaaaattctaacccgctctaacccggttttttggttcggataatggattggttatcgggtctgttttttcgtgagccctatcaaagataatctaatatagggcccaattaggttcacaaatataaccaaaacattatacaaaaactaattttaagttaggccaaaaattagatcttttaatacaaaggaaacatgtttcttactagaacaacttgtatacaaattttacacatttacttaaaattatatatgttgtatttattataaaaataatatttttaaacaaattcaatccaatgcagcattatatccaaatagtaaaaacattgaaaaatattatgacaacacttttatattatactatttcttatgtaattcaaataaagtatacaatttagtttatacacaatattaatgtccgtgctatacagcacgggttatgatctagtaatgatgtaatacacaaccttatgtgggaaaccaacaacaagtaaactatatatcaattcaaatgacagattcactgctacaccacagttaaaaacaatcaatcatttctcatcgaaataaatctgccatcaaataattccaatgagtttttttttttttggataaaattccaaagaggttactagtgtgcataactccacgtggtaagtaaacccatagtggatgaatgttatgtctgcaattgataatatgtcaattttgggttaattagtttttagtaattttttaccaataaaattattccacttttagaaaataatcactgcagatttgtaactttcgttcactttgaaaacttttattgaattgaataaatttagctaatcatgttaactattagattataataaggcccaaaaacacttagatgaacccggttagtggttaatacttttactatatgatacttaattacttaccgatagcattgacagattaaaaaatacacaaaagctttgtcaaacaaagagatttgaaagacgaatcaaatctctctacatacagggaaaattatgaatagctacatgtcaccatctgtttaaagtaagatccaatgttctcatctgtatcttttgactatgattgatgactatgtgacctatatcatataaatacaacgtggtaaattgttatactcattaagctaccatagtccataatacactttaatttcccaattcacgatttcacattactcactaatctaacattttatgatcaatctattgagtattgaggattgatgaaacaaagaacgaaggtatacttaaatggagatgtcatataactcagaaagaacttcacatatacatttattaaaggaaaattagttttcttatgaaaataattagccattaattagaaactgaaaactcttaattagctttttcccatttttgtgtcggccatatgtaacgttggacccatcaactaggtcacaattggcatacgacaaatatacataactttaaaccattagatcttttctctttcattacaagctaaagtaattcaaatttagctaaataaatttaaactaaaactttggaaatgtggtttagattgttatcaaaagcttaagtgggtttgatcttgccgatgtggcttccaaaagaaaagtattaattggttgaagaaagtgacttttgtcatgcaacctagttgtatgtcatgatgtgaaattaagtgggaaaccaaaattcatattgacaaatccactaaactctttagatgataaagtagaagagcgtgtggaagtttcaaatatcatttcctttaagattacacaacaagagaaaggttgatccatcataaagacgaaatattctttaagtcatatacatggtctacaatttctcactaagatacaaagtaaaatcgataaatataataatgaacgtacgagtggtttccaagttgttctaaccaggtgctttgtcaagatcatcgatctatattcttacccgaaatacttacttaactattattacaaagttcgaataaccagttcttttactttgtgattagtttgagctttggtttgactcaatagaagacaaaagaaagaatagatg

SEQ ID NO: 23644 - DNA, 3003 bp, Unknown
  misc_feature (1)..( 3003): 2750-1469P.txt file - cDNA_ID_2147990; gDNA_ID_1620468; Annot_ID_157958
ccaagatggatgtctctgtttctgacaaaagctttgcatattctgagccaaagactaagcagttcaagtctatctcgagtcatctcaaaccaagataggtatgattttatagcccccccaatgtttttattttttgttgattcaacatgtctgaaaaatatcatcaaaatcagattatctttgtcgttgttggtagtatttgctcattttaacacaaaaaagtccttgtttagtaatgttttcaaaatgtacatcaatttttttgtttatcatcactctcttttaatcctgtgtgtcttcttctcattatgttggactatttgatcattttttgtgcagatcagtttcctttggactcttcctcggtggacgccgttttagccatttccaaaacatctggtttcccagtgataaaatatgtggtcaagtatcttgaatggcactgattttgtgtgcaaacatttggagggtgaaatgcaacgggtttgtctcgtgcatctggtctatgtaatgggtttatttgacctcttataatggcatcttccttgcagaccattcaaaggagagtggcgttggctggttttctggagccacagtgtctctatttgaaatctattaagttgtctacattcagtttatcctttggggttagcatttttacacttcttgtctgtcttctctttcttttagtatgaggaaacgtttcttcttcccccaacatatgtataaaaacatgttctttgagttcaggccattctaggcctttaacatgaaggataaaagatcttcattctacttatctgtcaaacttggatatcaggggacaaggtaactggtcctttatatatatcaccattgtaaagtcttgtaaatccttcattcatgtaactttttcttcctctttaggtatctctatctcaaaacttccttgaagctgacatataaccatgcgaaaggtgcatcttcataactcacaaatctgctgtgttgctctgtagccaaagtgatatcactttgaatccgatagcgaaactggagctagagttagtattttggacatctacttcaatctagagcatctcgagaaattatgaatacactacacaaccacaaagttggtctaattggtaacttcattttggagaccaagcgttgcgttaaagaaattaactgtaaaacctattccgaagcacattcccccttcttttttttatactgcttataaagtttctcttcacaacttgttccaactaggtaacataatgaccacttataactaggtcaaactattgtctaggtccaccattgtttagactttagacgcagctaggaatttatatcgaaaacaaaaagtcagatactaatgtaatagataagatatggttctgatttgtgtggccgtgattacctgctactgtgttcataaatgatcttctctgattttcttctaacaatctcaattgccaaatactttttgttcttcttcttcaacaatgatatatgatgtttttcttaacttcagtggggaagacgtccgtggaactttcctcaaccactttttcaaagagctagaacggaaatcgatcattgctttcaaagacaacgagagcgaaagaagccagaatctaagtcccgagcttacacatgcaattagggagtccagaatcacggtggtcgtgttctccaaaaattactcctcttcaacctggtgtctcaatgaattgctgcaggtctatgaatgctaccaaagcatggatctcccggtcataccaattttctacggtttggatccttctcatgtgaggaaacaaaccggagaatttggaaagaattttgagaagacttgcagaaacgaaacagaggcatgtgtatatcagtggagaagagctctgtgcgatgtatctaatttcctcggatatcattctccgaactggtacaattcttgatatttgactactttatagttgacgtttcttgcttctcaagtattgatttttctcatattgttagggctaatgaagcaacaatgattgaacaagtcgccaatgatgttttatttaaactgaatttaactccatcaagcgatttttctgaatttgttggcatcgaagatcatattgccgcgatgaattctgtggataaacgatgactaagttcaagataggtttggtgctgagaaatgatttcccatggggatgttgatgaagcttagagcttaagacttaaagagtttgctgggacatttacataggccaagagaacacaaaacgaggaaaagtaattaattgaaaagtcgaagtctaagaattgactattgaagacatgttcaagaagaaaaacatggattctgaaacacttagttaagattatatgagtaaactcatacaaatacttgatttgataaattggaagcttacgcagaaaaattgcaaggagaaagattagtgggtgagtcagagagacgaaggaagttgaacaatgttattaagcaataagcaatagtcacgaactgaacattctttcaaactgatttgatagcttgttgcacacgtttctttataggataaaaaaaaaatgaattactgaataagtttacatacagtttggccaaatagaagtctctgcttcagactagagctactcagaaatgttaagcgcataagatagggaaacatgttttcttcgaaatcgaataagcttaaattttaaatccttaaattaagatataaagtttgattatgtcctttctttgctgtagtatatccacatattcacacgagaaagttgctaagcttaagagttctttgaaaagtcttaagaagaaattaaagactccatccgccaataaatgttatttttgaaacacaaagaccccgaaagtaatgctcaggataagacttaagaggctatgaaacatttgtttgtgaccttgtgtatactatgattaagacatcaaattggaaacatccgtcaagttgcgtcggaaaagtctgagaaacaatg

SEQ ID NO: 23645 - DNA, 3003 bp, Unknown
  misc_feature (1)..( 3003): 2750-1469P.txt file - cDNA_ID_2147994; gDNA_ID_1620468; Annot_ID_157959
cttccttcctttatacgaaatctcaataagctgttgaaattgaacatggcattctgcaacagtctggaaactcttccaactggtttcaacctcaaatctctggaccgccttagtttctctgaatgcacaaagttgaagacttttcccaaattctcaaccaacatctcagttctcaatctctttggaacaaacattgaagaatacccttctcacttacatctcgagaatcttgtcgagtttagcatatcaaaagaagagagtaatatgatacaatgggagggagcgaaggtgagtagttctaaacttaatattctctccaaactattttactatcactgtttatatttaaactattgtcgcagactcaaattttgtacacttgtgtattaaaacttaaaaacttaagtgacttttataaaatttacaaattttatattattcaatcataagttttaaaattctaatgaattctaatgttattgaactaacgatttaaaaatcctactatattatttgggaagtacattttaaatgtaaccttaatttttgtaagtaattacataggtatgccattagaaataaaattttaaagagtaaattaatttatctttttaatgattaaaagtcaaatactaatttaattaattaaatttaattaattaaatttaattaaaaaacgaaatacattattattttccaaaaataataaccaatcaaaatcaacatataagatttgatatctaaattttaattaatttaatttaattaaaaaaacgaaatacattattaatttccaaaaaagtaaccaattaaaatcaacaaattatatttgatatctaaattatcatattatttttttattaattattatagttcacttctcatctttatatgattttatttttgcggaaaaataatatcatcattataaaaaaataattagagttatttcgcatatgccacaatttgaatttttaaaaacgaatataaactgttcaatacatgaaaaaatattataacgggtgaaaaatagatttaagaaaactttctactgagtaacgggtcataatttgaaatatttatattcaatttcatacatattatattgaaaatttataatcttatatactacaataattaataacatattagatgtgattcaatttttaataaaagctggaaaatcctagaattgacgggtttagatcgatattaatacaagatggaatactacaggtgaaactcttaaattaacaatcaaactacaagtgtataatcttaaacactaaacaatatagataatatcaacaaaacatatacatgaactcacagtttactatacatataaaatcaaataaaataatatcatatatttttaaatcatctttacaataaaagattttattttaactaaaatataagcctacctgcggtatactgcaagtcaatttaatattttatatacgaaatcaattaaatcttaatcacataaaaattagcacaaaaaaaagtattcaacaattaaaaaattatcaaatctctgtgttatataagttttgatactatattcgaataatgtaatataccttttcaatttgtattctttaactaatttaagctaactaatatatttgctaattttatacctatcaaaaccgactatcgtttcttatctctatagtatttttgcaagacttttttggtggatttggataaaagtgtattcgggtcatatgatacattcccctattaaataaatatggtgcactcctatgttattagctaaaatgtttagaatataattcagagtcatatcattaataaaattaatattaataaactaaatgactttttggcaagacgaatttggagagacgggtttttgaatcaacattaataaaaaagtaaaatatgattaatccaccgtttcaatacgggttaaatctttaatttattattttgtaagaccactaatattaaacatatcaaatcatcataatttaaaaaagattatataaaaccaaaaatgttatgtggtatgtataatgttactatatataaaattaaataataaaatataaatgtattagagaatgatacaatttgcaaaactttaatatataaaaaataattcttaaattttaaaaattactactttaaaaaaataatcacgggacgggtaaaaaaattacagaacgggttttattttggaattgggttatatggtggatgtatttgaatcaatatttataaaattttaaaatattattaatatgctgttttaatagggattaaaacttcagttttttaacaattatctcatggattcgtggtatagggttacctaataacaattataaactggaaaataaaaatattttataaaaataaaatttgcaagttttaatatatattacttttaaaaaataaatcgtcaaaatctagttttacctttaaatctactgttattgaaaccaatttgtggatttaattcttattaattttaaaggatttaagaagatttgaaaagatttctttagttaaaaatatagaaatccaaatctcatggttttagatggaatttgaaaagattttacaataaattacatcaacttccctaaaatcattaaaatcatataaaaccccagtaaaactcaaatcattctttgtccaatacaccctcctaatttcgttttgtttatgaatactttaatttgattgaaaagtaacttttggttacaaagaacgaagaagaaaacatttgattttaaaaaataaaataaaaatacaaaataatggatttcaccaaaacaatatacaaaataacggtaataaaagagttccaaacaatctaatactgtactgatgagatttacccataatactgttattcttttgattttaaaagatttattttctaaatttaagataataacactttaaaagtaatttgccactgaaacttgttatttggttcagccgcttacgcccttcctggctatg

SEQ ID NO: 23646 - DNA, 3000 bp, Unknown; identical to SEQ ID NO: 1939
  misc_feature (1)..( 3000): 2750-1469P.txt file - cDNA_ID_2148095; gDNA_ID_1620471; Annot_ID_158014

SEQ ID NO: 23647 - DNA, 3000 bp, Unknown; identical to SEQ ID NO: 1937
  misc_feature (1)..( 3000): 2750-1469P.txt file - cDNA_ID_2148131; gDNA_ID_1620471; Annot_ID_158025
